United States Patent Application Publication US 2014/0057251 A1 - sequence listing, part 9

SEQ ID NO: 14735 - DNA, 12246 bp, Cannabis sativa
  modified_base (11974)..(11975): a, c, t, g, unknown or other
atttcatatataattaattagattaaaatatatagaatctaatattaaattatattaataacaaaatacaaggcttattgtgttgggtttctcaaaagaataatgtcatttttgtaagttgaaaccgatttgtattattgtccaaaaccacaatgtaatctaccatttctttgaagtttcatttcgttatcattatattatatatagttagtggccccaacgtatatgatcccattataagctttaacttaaagtgtatgccactattctattttgttttattagtcatcacactaacctccaaattatattttattgctaaaatttattacacatataatctgtaaaatcaattcaattttcattaagaaaagaatttttttttgtttctttttgcataaaatcaatttacaaaattaatatagtaatggggattgatttgatttaatccaatttatgggagactgctattaattaatttcataatacttaagaccaggttttatacattaagttcagaaacagctaccaacagaagaaaacaacagtgaaaacgtagaggaagaagaactgaaaatgtaaaatggagctcgtgacaacctacgaaatgagtggcgtaacctcagagctatcaacagtagccatgtttaaatcatatgtgaacaaaagggaaacaaaaataaaagaaaaaatcgttaactatttaaagtaaaggatcaacccttctaagagtggtggcaaactgttagcatttggaatttgacttcacttgttaggccgggccgaacggaacgaacaatcatcaaagccaatacccccaatgcgatgtcgtcgtcatcgtcgtattgttaactgcaagcaatgcatcttcattgttgtgtctgaccagcccacaattggtgatggtacatctgttgcatactatggagcggttgaccattattgttattgttgttgaagaatgcggggcctctgttaagagggctgccgttctcctcagatgactcgctggactctccctgcgatggagggctgccagcggtgctaggtacaccaaagtttaacatttggggcgcaccagtgcctggcgcagatttcacggtgttgttggagtgcgattttttaccatcagcaataaagctaccgacaattacctgtcaatagcatattcaaaattaaaccagtggcattacaaagattattctttttataaaattttcactgacctgttcttgaatacactacaaagtaattgaattactaagctttctgttctgaagtcctataaatattcatggatgggtggtgtggcgaatatgttatggatgataaagctatgtgtactttggacccaatcgattacgcagtgtataagtcaatactcttatgtaggcatgtataccatagaatatatagcaaatgccccgagtaatgataaatatacctgaactggtgatgcggccattagggttccggcaacgctgccacccacaactcgaccatcaggtcctgcaagtgacacacttaaaccacctgtcctgctgcgcttaccattgtcatcagaaaacaagtaggaccctgataatgaaataatttcatagcggccctggaaaaagacaaggaacaagtatatcacatgaaaacaaagtataagaatgtgaaaatgaaacttgaaaacgaaaatgaaagggaactcgtcaacaggtctagtattaattatatcacttgaaatcgcataaataagatcagataagaaactcataatcataaggtcgctatcaaaattcacactttggagaaaatcatgtacaaacatgaagaggcataaataaatagcacaatataggtcttgccattttatgacaagtaaattttttcaatgactaacaacaattaaaaagatgcaaaattgcaattaaactcccaacaaattataaatcaaatgatatgcaaaatctaaattggctttgtggacatagattagcctgggagacatactaaaatgaatccacttattagatcctttacccgatagtcattgatcactttttctaagaataatgtcttctttttcattttcttctttccaaagttttttcactgtacaagtcattgatgccgagtatagcagacataatccattacaccgcttgtttgttatttattaattagatatcaacactacaaaggtatgtaaagaaattactcgaaagttccacattaggaattaaaaccacagacccgaccatcaacataccctcatgggtgcaacaaacaaaattagatgactttaccttttatactgaattttaagaagaaaagaatgaatgaagaatttacagtcatacaagactgtaatatgttaacacatatacaaatacacatatacatatatatatacatcatgttgtaagtcttatcctttcttccttcagcattagttggcattgccagtatcagtttatacatccatttttaattaacatatcttgcaaacaaaaattaaatgatgtagtgggtacctcaaaatatgaaggatgtacctcatatgaaacattgccaccagacatggatggctgacgaagagtagcattacaaactgcgccatttgcagagagaatacaaactgtgcggggtccttcctctgaaaatgatataaccttggatgctacatcctgcagaacaatagcctcaatcagaagcacatctatttataataaatccttatgtaggttaaggatattatgatataataaaaatcaggcataagcaaaaatgaaaagaggtgaacaattttccttgcattgattaaaaagaaataagaactattttattggggaggagggggtttgcgaccaaaagatggtctggtatagtcattgtttacaagaaaggaaaaagtccaactcccaaaaatctgaaaataaacaattcttagaaattttagaatcattatcaaaacagaagcacatgaccgtgtcccaaacagaatttaaatccacacgactccacaacttcaaagatttttcctgttccttttgaaccaaagagaccagcagataacagtgtcccaaacagaatttaaatccacacgactccataacacattgtcacatttacttggccagacacaagaaacttcctcttagaaaaattattttattacatatacatattttttaaaaaaaaacaaagaaagaaagaaaaaactcattagatgggtaatcaaatgagctagaaagtatgtacagaaaaaaagaaaaaactcattagatgggtaatcaaatgagctagaaagtatgtacaagaaatgttttagttgactgaccagtgaccacaatccttaaggcactacatattttgtcatgcatctcataggaaacatcacagaaacatagaaagtgtaaagtcgattggaagaataacactgaagttccaaatttgctttaccatgctccatgatacaaggaaatcaaagtagtataatgatcatcctttactcacaccctcaaagtgataactgtcaattacacccacaacatagaacagataatgtttcaatcaattatatgaggtaaaacactacacatgatgttgaaatttaaaagaaattactaaaacacatatgcacgcacacacataatagctgtctctaataagtacatatatgacaagaattctttgatgttggttattaattgtatacagaagtgactgctttcaattctgcatctaattctataaaactaaactggaaagtataaatgagataccaaataacaactgggaatgataaagatgaaattcaaaatttgaattaaatactatatgcttgtgccagccttttgaagaaatagcaaatgccaacttaagcatcataccaaatgatttggttctacatgatgcttaccccaagctaaaacaacagaatgagcctgagcaagaccagtacaaagtcttaaaaaatgataacagtgaaagaaggaatttttttcattttggtttaagattgcattcaaccttcttgaagaaaatatatgctgaattgtctttgttaaaatatatatatgtgccgaatggttttctacttctgggaaaacagatgaaaactttcagaaaaagtataacatattaacataacacttagtagtgttggaatccaaacaaatggtaccaatttgctctcctccacataaaatttcaaagcatattcttttcttccagcatatatagaatctatatgactttgcatccatttcataaatatcatgtcaaactcaaatgcacaaacaatttgaagaaattcattgtaacccgtatgctaaactaaacagatttgaaataaaaactgagcatgtaaaaagataatgtccaaatatttacactttgtgcatgtgtacacttgccattaattcaatatcaccaagaaacacaaaaccaaaacaaaagcaacaccgatctattgcgtttaagacagttagtaaccaaatttccaacccttccctcatattatttatacctacaattctttatgaaacagcccacaaacacaattaatgaaaaaagaacattctttattaacattcaatcaactaaaaccaaacggacaataatcaaactaattgcagagaacaatatgtaacacacatacctctccagttttcaccaaaataacatgaggagtaaaaccaaccccaccaacacctgtaaaaacatcaacaataacaatcacataatgtaagattctaaaaccaaaaatttcacatttcttaatcaaaaaaagcagtacccaatgcatctaattgtttctttccagaaccaggaggtcttccccgattcttcttagccgagggttcagacgaaggcgtgccactcgaatctccatgaacaacatttgaagaaggagtcggtgtaggagctaatccaagcgcaatgttgccatcgggagagtatttcctcggtcgacccctcttcttcttagaacccgaatccatattaaagcctccaccaccgcttccactgcaagccctcataccaggcgatgaagatccatcataatgatgactagacaaagaagattccataggcttagaagaagccggtggagtaacagaactaaaaggaaatcgagcaccgccaggaccagccatcatctgagccgaacccatcgagttagggctcatcatcatagatgaagcgttggtactaggcatagcagaagcataagaattatgattatgatgattatgatgttgttgttgttgttgttgatgttgatgatgttgttgatgttgatgatgttgatgatgatgccctcccatcatcatattaggaggagcaactggtgttccggcagcatctcgtgaatccattcacacacctcaaaagatcaaattttcaattttctttctctcttttcccctgtttggattccgggaaaatcaattagagaaaagtaaagctaattttccggttcactgaatcatttctctgcttgttgtaacctactttatgcgaaagtgaagagagagaaagagagagtgagacttagagagagagaaagagagtgtgaatacatacaaatctgtttctaaatagaaatcaaaaagcggagctcaaagaacaaatttttaattagggtttattttattttaattattttttaattaaaataaataaataaattataattaaacttccatctttcaagatggaatttttgttgcccacagtttttttcacaggtggcagattcttattggattaatattacattttaaaataaagatttgcaataaaatctgatattggtactttggtacttgttatttggtatatttttaaaggaagaaaaaattatatataaagaaataaaaattaaaaaatggatgtggtattaatattattatgtatgatatgaaatgaagtcaaatcttttatagaaagtgatccatcacaatttgtttaagacatagtttggtatatttaatatgataaaatcaatatattttttaagacataaaatataaagtataaaataaagtatcatttggtctatcacaatatcatattttgtttgttaaaaaaatgtttctctcaaacatttttcttaaaacaaaatctttcttactggtcaaagaatgattgatattattattctatattgtcaaatattatttttattatatttataatattcatgtaggaaaatattagttttatgctactcaatataattttgtaaaagaactatactaagaagctcaagctcaagtaactcctttccaaaaaaaaatcccaagtacctatactttaaggaagatatttatcacataaatacttaaaattttacgttatatatagaaactacttattaattcttttagcgccaaaattatccaaaattactaaaattgtaattcagttagttttcattctttaggttgtaactacaatgaaatgtgtcattacctaattgagccacctcataataatagaagttactatctaataaaagttaacggttcaaataagtgacagaattacaatataactaattttaattagttttgccagtattaaaaattattgggtcagtttgtaccccgaatgagacaaactatgtctccaccccttgtacgtttcgtacttccactctttcttcagaaatgtgcatgatttaacggtcatatcctttgttgtgtgtctatttgactttcgtctttgtctatcccgtgttcaagatgcgagaatgacacttagaaattcatctaagtgtttagcccatgtggatcttgttgaaataatttgaacgaaatgaaagaaatgatttctgttatttattaacaaggcaaatatagagtatatatacaatgagcctaagttcagctgaaccaaactaaacaacagaaaaactaactacttctaacagaaaatacaattactaattaactgttctcaacatcccccctcaaacccaagttaaaagtgctttcaacattaaatttgtttctaaggatggaaaatttagagcttgatattgccttggttagacagctagcaatttggtcataggcttccacgtgtctgacttctagatccttgttcgagaccttctctcttacaaaatagaaatccaattctatatgcttggttcgagcataaagtattagatttgtagttagcaatacagtgctaagtttgtcacaccaaactgttggtgtgcattgtagtgatacttgaagttcactaagtagagatttaatctaagacatctctgttgtaatgcttgcgagacttcgaaattttgcctcagtgaaagaccttgacacaacctattatttcttagattgctaagcaatcaagtttgagccaaaatagatgcagaggccactggttgaccttctatcgtgcagattggattggattgactgttttatgaacactcctatttggatcacaatatagcataatacaaaatttacatcacaataaatgttatatttttatattattattaaaattgtcatttttaatattttattattaaattttagttagcattctcctttacaataaatgacatgtattattattattttattattaaattttttatttatttttgtattattattattttatattttcaataaatttttaaataagcattaaatgacatattaaattttgcatcaatatatataattatgtattggactacaatactaaaaattgatgtaaaaatactacaaaattatcttttgtgccaaatatagtgtaactcaacttacaccatctccattacatttcattagagatggtctaaattattatgtgaaataagaaaataagaaaatgatagttaatgtgatggtgactatagtctaatgtagtggtaactaagtaccactttcaaattaactgtttgttttttaatggagtgttagaaagttcatattgttaatgtgtagaaagataatagaatatctaagatgaatggtcaactcctcccactgttaattggttttgagatgaaactatgttaactttattttaaattctaacatgaagtgataagtaacttgttactatcatcaaaataagcataagaaatgaatgatcaaatttcaagggagtaccaatatctttggtaactttaatatggtaacttattacttaataatgatgaagttcgaagaagaagacaaataagaataaaggaaacttatgaaagattacaaaaagaagaaatggataaaataaatcaaagatgatgatgaagaagagaagcttaagacaagattgaaataaaagatgaagttgaaaataagacaagaagcaaaggggaaaaggggaaaaaaaaaaaaaaaaagaacaaaagtactagaaagaataataaaaaaaagtactatcttttgtaaattacttaaattaattaagatatatgacttgctcaaaaacaaaaatgaagattttttaaaaaaaaaattatacacaatattgtatgctgtctaaaacattgaaagagaatctaaaacaagactgcttgaaaaaagcattactataatgtattagtgatgtttagtactatttaagcgtatcatgttgcgattgattaacgatattttataaatattattatattaaattattttagactggattttatagcaataataaaataatatattaaagagtactaaataacataattattttttagcatttctcctaaaaaaaaaaacccacgaaaactttgaataaaagaacacaaaatatatatacttttttttttcaaaaatttcaaattttattaatattaaaaaaattatatttttttttgcttagaaatacatctacaagaggaaagaaacaacctaaatgggcaaaataataagcagagtacagattacatcaaaggatctcatctcaagatccaaacaatcattttcatgagtggtcttactctaataactcacgcacaacggctaagtagggactgaggcaaaataatttttgcgacaaggaccaaagtgcaaaagaaataattgagtaggtcattaaataaatttaaaaaataaaaagaaattacaaaagtaaaacttcaaattttaaatatatttatatatttgctatccatcccgagtatcctgaccaccacaatccacgaggtgaatgcgggttggttggcatgtttgcagtcaaacttgccgaccaacctgcatccgacacgtggatcgagtggtcaggatactcaagatgaacgaccttattatatatacatttgggggagaggcaaactagtcaaagctccttatatatacttatgtagctttgtgagggactctcacacaactcttcttcttttttcttcatctagcctttggtctaacaatgttagaaagaatttaatattacattagtgtagtactttataattagttaatacttttttatattatttattaaattaaaatatatgtgactaatattttttttttaacaaaatgattagaattattcatgaatttacgacgcagacgtctgtcaccggtgctggaacctcctcgaaccaagatagctcatcgtctaaccgcagagcatgctttgccaaactatgagtcgctaaattctcagagcgagccacatagaacaaaactactcttgaaaatttagataatgaagctataacatcttcaaacaacactcctatctcattgaaatacacttgaaaaaatagcagaaaatcagaataaaacttttattaaaaaattatcaaattgatcaaaatctaccaaataataagaactacgcaaccagaactccactaaaaattactagaactagctaaagaaatcaccctttaactaatattaaaatacactaataacaatacagttacatcttaaagtccttgacaatataaaatggccttagaactcaacatttctcaaaacaccatgtttttgtatccactaataaataataaataaaatatgaaaaggcctattttagagggtgagatactattaccatcacgcatgactaaaaagtcaaataaaatgattgttaaggatgtttcttttgaaatttttcttggcattagaagaaaagtttgtaaactagtcctacttgaaaaagagagaagaaataaattaatatatttatagatgttgactagttggagagatggatgaatggaagttttattatattaatttttaggacgaaatttcaccataaaattgtttcaaatttctttcttatgttgtcttaataaatttaatttctttaactagctagtgatacttctttaatttcttattccctttgcaaatttttgcaattaagtctttttagccaacacgtgatatcacaaacaaaaaatatatatttttcaaatgaaaaaaaagactttttttttattgaaaataagggaaaaggtatattacatgtatagtcaataggcaaactaaagtggattttcttaattctaagtattttgtaagtgaaaagaaacttgattaaggctaaataggaaaagaaatgtgaggccaccacactttagaggtagccaaagataaggctagtttagtatgggaatgggtaccttacatattctcaagctatcccattctaaatagtacacaccatcttgtgatactcaatctgtttgcacaaaatcagtccatgcaccacaacacaaccattgactttacaagagtggccacaatagatgtgtcacttagagtatcttggtcaatctctaaagttgtctcaaaactttagggtgtgattgatataggatttgaatttgattttatgtttttaaaacttaaaaagtgtgggatctacacagaaaacttgattggtttattgtttttgaaaactgatttcaaaaacaaactcaaaattattagaaagattttgaaaacaactttttcatgttttcagttgatccaaaaacatgatttttgacttttttttttctttcttgaaatatcaacggctactctctctctctctctttttattccttcttttttctatattctattttttttttattattttaaggaaagattttatttcttttattttttaataaatagttttttttcctacctacatttctattaatatactatttgttatttttttttctctaatattattattagactatttattattgtaaactgatattataataaaatataaatatttttctaatttataataaaatataattatttgcacctggaaaaatacactctattttattatatatatttttaatttatagttacttatattatattttttttcttcattttaaatgctacgactaaaacaaaaaaataaaaatatatattttatttgagtaataaaaaattaaaagaaaaatattaaaattaatacaacttagttacaacaatagagtataagtatttataaataaaaaaaataagaaaaatctagctttaattaaaaaaataatgttaatgtattattcttataaatttataattgtaattattgtgcaattaaatattaaaattatataactaaatttacatataaatataaaatttattatcgtaggctatttatttaaaattaaaatcatgtagattagttaaatcaatcatatattctaatacagttatatttttaatttctgtgccaaacacagattcaattttttaaaattcaaaaattgtttacagacactgtaccaatcacattttcagaaacatatttccaatcacaaaatttaaattttcattttaaaataccaaattttgaaaacatagttttcaaaatacgaaccaatcagccccttatattatcttaaaatataatattttattatttttttgacaaatttactactgaatatatccaatactaaacaactataaaaattgtcactatagctcagactactgttatagtgagatttctctcnnctagaaactcgagaccagactcctatttaaaggacatgtgtattcagatttccaatgaaagctgaattgtccatgagagactcctcgatgttttaacctcgcccaggataaaatcagcgagatactgcgagtacgacctaagtcgaatctcataactttaactcacattatttaggatggatccaacccgcatgtgtcaggacatatgcgagtatcttctctatacttctgcgaaagcatagagatcaactctctatgatgtgatttggtc

SEQ ID NO: 14736 - DNA, 7557 bp, Cannabis sativa
aaaaaaaaaaatcaatatttgaaattatcaaactgggagagaaaatttggaattaatttatcttgttctgatacaatgtacagctatcagaaaagaaaaacttgacaatatttttaccttgtaattaacaaacgtaaattcagttgagtatcattacagaattcaactctacttttgttatgccctttacaatgtcaaaactatcaagattaaaactaacaaagaaaaatcaagagccagttggtctctaaatcaaaaaagaaaaagcatctaccttcgatcgtgcgatcctcgcaaacctgatgacagcctcccataatcaccagagcttctacttctatgatctactttcttgtcgtccttggaatcaagttccattttttctgacttttgcttcctcagcatgtcatccgcatatcgtcgccataatgattctctgtctttccttggcatcttgttatacctgggatcggacttcagaagacgcttagctgttgaccatgaattaagagccgttttaccgtcgtctgtttcttgggcagcagcatctgcagtcagcacttctgccaacagagctttgaactcgcgtgcacatcgctgagaacgtaattcatagcacatgagaaattccttctacaagtttatcttacaaatattaagctcaatacatatttgagttgggttaatggtttcaaacaaactttttttcacttgttagatagaaaaggggagacaaaaacaaatacaatccaagttttttctttgttcttttgataaaatgcttgagtttaatccaactgaagtacgaactgacagacactacaacagtaagacatcaattttccacgaaatgaaatataaccgcaaaactaattattgaaatgtgtggactgtggaattaattcaattaaagtagcattaaaattgccaatttgattttgaatagataaaaataaaaaggtttacctcattcaacatcctaatgtgttcgcgaaaaagcttttcagtctcggatgaatcaagttcagggttggctgcgcgaccttgtggatccttctccaatttcagcttagcatctgtccaagatacctgagtgcataagagcagtaagagaataaaatccttcggaaaaaccaagtccaacacttgcgaagattctacaaaaccagtagataattgaaaagtgggttgataattcctaaaccaacaaacaatcataaatgtgtattcctgttcttgagaatggaagggcaactcttaaaacattaccgagaaaataaatacttgtacttgttagcatataaaaaaaaatgaagagttaacataattgatttgtaaagtcaataaaattatagcctggatggatacatacgatgtatgcctatacagtaaccctagccctttcatgaactccatgcatttcaaggggggtttaagaatctaaaatgaggatgatttcttttgttctttgccattaacagatcctaaaggatagaaaaaaataagcaagcagaggtttcaagagcactgcggcagttttgttattaaaatatttcctagtcctttacagctcctagaactaaaacaaaagattagaaacaatacctgggggtcttttattgtctccacaagtaaagcttgatatgacacaattgcttcctttcttcgaacttttatccgtaccctctccatttcttgttcctctctctctttcctcttacgcaactcccgctccctttcccttagtttatcctgaaaatcaaggtgagggggccacacacttcaataatttccacagttcccttttataaaaagacacagaaaaaatttcttgtatctaaacctttttgtatatcaaacatacatcccaattaagtatcaatacagtagagccacaaacaattaacaattttacaggtagagaatacacacagtaaaatgcttttcagaaatatcatagaaagatatgtcgagtatacatgtattattacatgacaaagacaaataggtaccctcataagatattcattcctttactaattccctctgtatcctaacactgcctgaaattgcatttccactactattttttaaataaaaagaaacatcaagttttattttgtagaagtctaggaaataaaaaagtcttgtgcagcagccagaagaaaacaagataaaaaaaagaaagacgctaatggagcatttagaatcaacataaagtgaaaaaaaacacaagaacctcaaacagaagacaagactgtcaggacttgggatgaaaaatcagcaaaccaaaataactccctagacagcaacaagaaaaacaagcaaacaaaaaaggcttcccagtaaaacagtcaacaaatcttgtttagagaaattccagtaaactgcctcacacaacctccaaaatgaaaaactggtctgtttttaaggggcccaattcccaaatggaaacttgacaagaataaattataatattaaagaacttgaatagaatcatccgcctctaaaggataatcaagggacaacaatacaatggaaaaagtacaaataaatgatatttgctgatgatgtgaaataaaacaggacaaaatattctcaaaattcataataaactgttcattcatacctgctcctctcttttggctttggcctctctttctgattcctcttctacagctctcaagtcagatagatactcattaaataaagcttccctatcttcatgcttaacagatttgtatcttggatcatccctcaggctatctttcacctacagaaaccccacatgtgaaagttatataatttgaaaacaaatgtgccttctataaatgatatttttcagaagaaacagttagtagttgcccatttgctaaattagtccagctggggtttgaacccagacctcctacacacaacaaacacccaaccacttgagctagactcaagagtctttttaaaaattgaattcaaacaaaaaaataataataacaataataaaaatcaagtcaacaaacaaacaaggatattccagcatatatgaacaaaaaactctcagaaagcacagaatttgctggtgataatttacttaaaaccgctgtgtctacaaagtttcttatctttttcaattaattctttatatatatctatgggtttgtatttacatctgcagcttttaacagcacccaacatgcaagagtttagaccaagtgcatctcactttttctatagcattgatactatataaatacataaatatacaatatttaagaacctatatacctatactaattacactacatagcagtaaaacttgtctattatcaagcagtcccactgtaattttaggacattaaaacaatcctgtgctagtatatgtaatttgttaatccaggagccaataattatttactagtatcatacttaagaaatgtaaatatataggtgttgttaacctatcagtaactagcaagaatcaataaagaaaatacatacccttgaccagcgtgaattaacagttatatctcctttctcttgaagcaaagatttaaaactacttgcagtagctgcacgaattgcttgggctttttcttcagcagccttcctcaaaggaaggaccctacaatacaagtaaagcataatataaaatcattatgaaataagggggaacccagagatataaataacattttaccatgcagatccaaaaagaatgcagggctaaaggacacacccaaagtgaatccaagtatccggtcactagcctagtacttgctgactcatcatgctttcaaggttatcaatagaaatcactctttctgtcttggaaacagttcaatataaataggaataagagcacgttaaagaatgaagatgataagaatttataagggtgtgagtcacatttaattagaaaccactattatatccaatgatatacgaacatgaaagtccaccacatgtataaaggattaagaggttgttacactggttaatttagtgaaaatcacattcagcaatcaaacaaaatggccctttcaaatttctaagcccgttgtactaatacatacagaataaaattgcattctacatcttgaagaccttaaattcaaagataatgagctaatgaaaaattagattaagcaaatcattagtttatatccagttatttctgtttccttttctttttgtttttggaaaagatttctgtttcctttttgtttgagctcttttcacaatcacatttctcaaattcaaaaaatttacatgtatcaagggatccaaaaggatgtggaaaagcatcaccaaggttatgatcaaaatactttagctattagacaaagcaacagttgacttttctctttgtcaagactcgtggctgtagttaaagatggctaattcaattttatatgtatctaatgagtaggaatctaatatatcagttcaaatttaaaatatccagtatccatgctccagcccagccttttaggaaattataattaaattaattaaacaacaaaatctgtacaaaaattaattaaacaaaaaaaacaaaacatgagaaaccaaatcttgaaagaaaaaatattaggttaaaaagaaatgactgaatcatgtcaatgagtgaaagcaagcaagaagaagttgatttttcaccaaacaagagctagatcctgaaaactgacacagaaacttcagaacacaatcactacattgcaactgatagaactccatagtctggtaaaaaggttaaagggacaattaagaaacatcaataatttaagtgaatatgagaccaaaacaagccaaagatgtaagaatataatgaactgacaaagttgtgtatacaacatatataaatagctctctgtgtctcaaccagtattttcatataaagtagtacctttcattcaacaagtgctctcgatccttgcggtccaaggctaaaaatcgttcatcatcaccccacttctttcgaaaaatttgataatcagttttctggtcaatctcctgaaaataacaaaagctaatcagtaagccatctgtatataccatggtttgattaatacaagaagctctaaatcttttgtggggggctatcaaacaaacctctgaggcttcatccagtaattgcttaaaaccctctattgctgccttctgagcagctcttttttccttgcgttcctcctccacacgtgttttaacaaagtgctcaaacaaggatctcctagtggagtagcttggaatagcctgcaatgagacccaaaatcagtctccctcattttataaattataagatggcaattttaaattaaaacttagaaacactcgggaagaaaataaaggatgaaaaaatatttacgtggtgggtgggggctaataagtaataattaactacatactacactgacaaacatcaaagttgaaaaacagttacgacttcatgttattttagttcctcttaattacctaaagtgctaaagttgctagtactgccttccagttttttttaactaataccgcctaagcctacaacatttggagaccaagacggaataacaattactacatgattgactatttgagcaatttagaaagcacattttaatattttagttcagcaaaccttaaaccgtggatcaaaaacaatcttcggaagttccttctcccattttgagaatggtgccacgcctcgttccttaagcatctcctgtagagcaatcaaacataagtgtaaactgtaaacatttttcgcatctccaagctttttatgaggaactaggaaactacagcaattactatgtaggtgcccaagaggggctcaaacctctcagatcttgtggaagcaaaccacatgtctgaccatttgagctaccctcgtaagtggaaaaaaaacttaaaaaactactgaaaaaggcattacagtacggaggacaagatatcctcctaataaaaccatattacaatcaccaaagctttaataaaaaaatttaccaagcaaacctttttattctagtagggccagattttttttcttgaagagaaaataaaaggctcaaaatagaagactgtataaatctgtcaagatacaaagttaaaaagaaagaaaagaaaaacgacaatgcaccacattaatcacacatccagaccccttcaggtaaagaatcattaaaagattatttttccagagcagacaatgtactctgttagtatatcattaaagtttcatccagagcaagaagaagaagaaaagtatacatcagaagaacttaaacacatcagatctccaagaataatatatttgaataaatttttagacaaattcaaattatctagacaactagagcagtttcattaacacaagtaaaggatttctgttaaaaaaacaattattattgagatcactggtgtaattgtaaaggatgtctcctatacaggaaacaaaacttatgtaagtatgtataaacttaatgctgccagttcagtaaatcaggcattaatcttgactgtagctaaaacagaacagaacaggataccaaaatataatcctaatattacatttctttcaaaagtttgcttacagtgcattggggacaaaacatctaaaggaagcatgcaaacaaagaagcagctgcagacttaccttaaattgaagaatgcactcctcctttgtgggcccactgtctacatcttctgaatctgaagaagagtctgtcacatttccacctccattggcatctttaagtttatctttgctgttatcactcagttggcctttagctgtagcatcaactgccttagagccatttggttctgatgccattccagactgtacaggacttggtgaagaagtaacaggagctccaaattcttgcagcttcttttttattaagtctaaagcagacgatgatccttggacatttgggggtctaagagccattgcatcacgaccacctgtgttaatggcaggagcattcaaaattactggagtagattctttttctgccaatacattagtatttggcactgacaaggaatgttcttttggaatttcaacatcctgcttcttccttagttctgttacctcgtttggaatctgccagctacttacctgattgtggaaaaaacatcaaacaaattagtattaaggcttaccaacaagttatctctacagtgatactataacataagtaaacacttctacactgttaaaggtttagcaagaagaaaactgtgacaaaccaaccaggcaaccaccatttttctgtaaccaaaaaataaaatctattgttacccaatgcttctccctaatataaatttctcattttatcatcagacttactagacaaagtagtgaaactctaattccccatgacagaaagcatagtacttcacaaaatgcaaaactttggtcaattgatcttatttttagtaatggcatcaaagacagcagatgaagtagaagtatatttatgaaaagaatgacaaaagaaagtcttcaaaggtttaacaaaataagacataaattacctaatagaaactaatgctgagacccaa

SEQ ID NO: 14737 - DNA, 11588 bp, Cannabis sativa
  modified_base (9455)..(9460): a, c, t, g, unknown or other
tttttacttgctatgtttttttttatgtttacattttttttaattttaatatattttaaaattattactattagttaattaggcgttagtttgttaagcagttataggctgttacaattagattttgttcattggctctctattagctaattaatctctgcaaataactttgtctttagttaaaataattcttaattagagtagctagtttaattaccttatttcattcttgttctataaataccataaaatcttgtatttcaattcaaccatttacatttcattcatctctctctttatacaatatggtatgaaagcaagaaatttatgctttcctccaatcctaaaatcgctatgtcttgttctctcgttgtgttctcatcgacaactcaatctttcatcaatccctaatctcaaagttctttggttattgatttcttccaccatacaaaatgtctataaacgatgaagcaacaagaactagagatagtgttcctacttaggcagccgccgacaatactcacaatctaattactcaaggtaatcagagtctacaggttgtttgatcgagaaatccactcgacaattctgtagaaccctattatcttcaccatggaggtaatcctagcaatattctggtatcacaacctcttcctagcaaggataactaagttgcatggagaagcgttatgcaactcgttattactatcaaaattagagctcaatttcttgcaggattcaattcccaaaccttcatcctctgatcttatcttgttaaccttgaatttgtaataaaaacattgtgatttcatggatttttaaatctgtttcaaaacaaaatttcatctagtgcactttattttggaaatagttgcagcaatttgggcagatctcaaggtgtgatatcatcaaagaagtgaccctcacatctaccatttgaagaaagatctcatgaatttgaaagtagagaatcaaactgtgagtattatttcacaaaactcaagactatctaggaacaactttttaattacaggccaacatgtacctgtaattatttaacttgtggatgtgttaagtagctccaagaacatcacaacatggactacgtaatgtcttttctcatgagattgtctaatttctattcacaagtgcgaggtagtatctttatcatggatccattacgtgaaattaacatagtttttcaattagtgacacacgaagagaataaaagagggaaccataattccacatcagatccaaatcccaacaaggcttttttttttcttccaaaggagataaagctacacacaataaaccaaactctcacgcacctaaccctcatcctccaaaaagaggcagacccttctgcacttattgtaatatccacagacacattgctgaaaggtcttacaaatcattactatttaccaagttacaacaagaaaaagaaaccaaaagatgctgcaacaaatcaagtgcaaaccactaatgggaatcgtccaccttctaaagataatcacaccatacttcttcaactcacaactactcaataccaataacacatcaatgctttacacctcatccacttaaaaaatttatttcatactcagatctatctaaatatcacagtgattttattcttgcagtagcagctgaagtgagccacaaaattacaaccaagccacacaacacaaacatcggcttcgtgccatggacacaaaaatcatagcactttgcaaaacataggcctcttcccctaataaaagagcaattgaatggttgttggtctataaagtcaaatgcaataaggatggaaccatagaatgatgtaatgcatgcttagttcctcaaggatacacgtagcatgagggcctcaatttctttgatactttttcctttgtggacaagagggtcacattcaaacttcaccttgccatttcaacaaagtaaagaacttccacgcaacttgacataaacaacgcctttcttaatggagatgtagatgaagaaatttatatgccattgcctaaatgtatagctatcccttcatgtgcatgcactaatcttgtatgcaaacttcacaaattaatctatggctttcaaaaatcctcacaacagtggtacaagaaactttcaaatgcgttgctttatgaaggatttaagcaatctcaagtagactatactcttcagttggtcttaaatgactcttttgtggaaattttagtataccttgatgatattgtgattgtatgtcctaatctcactgttcttcatcagctttagaactctctacaccaataattcaaactcagagctttaggataacttacatacttcctccgctttgaaatcactcatgccatagaagaactatttctctcataatgcaaataaaatttgcaacagcttgaagacacattgaccctcttaacaagctaaatgatggatgatgctactaaaatgagagaaaaattgagcattcccagggtacttaaaaaggtctctttgcagcaagcatatccggatttgattgagtttgaagatgagaaagggtgcactacttttgttggtgttacttacgagtggaaaccagtagtgtgtagccattgctctagcatggggcatattggtgctgattgtcgaaagaaagtggaaagaaaacaagaatgtattgtcaagaatgattagaaaaaggataaagctgaggagaaaacggatgcagaggggtttcagccagttgtgaaatgctggaaagtcaaggataagggggaggagttagttgcagcaggaactagtaacacattccaagttctggagcagcttgataaaggaattgagaatggccaaataggtgagaaggaggaccgagggcatgagattgctaacaagggaggggggagcaccctctcttggaaatggataaaataatggcatggaatgtcttgggaataaacaatcagcaaaaacaaatcagtcgagcaattgattgaataacgaaaaatagggctggttggactcctcaagacaagagttaaggctcggaatttaggagttttatatatgcgtatgtttgaagggtggtgctttacatcaaattgtgcttggcacaagggaggtgtaataattgtatgttggaaaccttacagtcaatattctacaatgtactagccaaatgattcatctctttgtggaatccatagatagaaaaacaagattttttgttacttttatctatgggtttaactctgatgaaggaagaagaattctttggcaaaaccttaaggatttggttataaaggatgcttggttggtacttggggatttcaatgagattctttacaaggaagagaggatcagggttagagcaagatataaagaagcaagagagtttcatgaatgtgtggaaatgtgccattgggaagatgtcaaatatatagggaactactttacatggagcaacaaccaatatggagaagatagaatttattctaagattgacaaagtattagcaaatcaagattggctggaatctttccatgctgctgaggttttctttcaaaatgaaggtatatttgatcattctcccgctatactaactatctataatatgccgagtgggaataaaagaccttttagttattctaggatgtggtctaaacatcctaaatttaacgaattggtggctgaaagttgggaaagcgagtaagagaatcaatgatgtatcaagttgtgtctaaactaaggaacttaaagcaggttttaagggctctcaacatgaattattttgctgatgtacctgctactactgtgatagcaaagacagagcttgatttatgccaagaatacttgagaaatgacccccttaatcatgatttacagcagcaagaaattactgctcgaggaaattatgcacaggcactggagaattatcattcttttctgcaacaaaagagcagtctgaattggtttaaagaaggtgacataaattcaagttttttccactcttacttacaggcaagaagaactcaaaatagggtgttatccattacaaacatggaaggagttagagttaaagatcttgagcaggtaattaatgctttcttggatttttacaaacatttattaggcagcaatataacctgcaggaaacaagtgcaacaatgtgtattaagacagggcccgattgtttccaaggaacaaactaaagcattttttagctgagtatacgattgaagaagtgaagaagggaatttttggacatcccaaggaacaaagccccaggacccaatgggtatggtagttttttctttcaagaaaattgggagttagtaggcaaagagacagttgaagcccttatttcctttctgcattccggccaactattaaaggagctaaactccattgacccttgttcccagaagcaattgtccaaacactgtgggggactataggcctattgcatgctgcaatgtgatgtataaggctgctacaaaacttatctgcaatcgactgaggatgatattacaagaattggtagcacataatcaaggagggtttgttcatggaagattcattgagcacaatataatgatatgtcaagacctcatcaggcactatggaaggaagacaaaaaaaagcaaattgcatcataaagctggccttgcagaaggcctatgaaaccattaaatgggatttcattgaagaagttttgcatggattccattttcccccaaggttaattaatttggtaatggcttgtgttcaagctcctcgtttctctttgatgataaatggatcattacatggcttttttgaggccaagtggggtttgaggcagggagatccaatgttgcctctactatttgctctgggaatggaatacctcttgcagataatgaggaagattggtaaaaagaaggactttattttccatgaaaggtgttggggtcttgagctaaatcacttaagcttcgctgatgatgttttattattttgcaatggagatttcaagagcatatactatatgttgcagggactgaagctcttttctcacacattaggcttgttccctaacccttccaaatcgactgtatattgtagtaatatgtctgatgcagatgtgcaaagaatcctcgatgtctcaagattccaaaagcaagacttgccattcaagtacttgggagtgcccatttgcccaaagaggatctctacaacagattgcaaggtattggtggaaaaaatgatggcctaaatcaaaatttagagcacgagaaacctctctttttctggtcgtgttgtgctcatcaattcagttctcatggcaatacactcatacttgtgccaagtaatgttgctgccaaagaaaattgtaagtgaaatagaatctatttgccgtagtttcttatggaatgaacattacacattagcaggtgtgcctacggttgcttaggcttcggtctgccaatcaaaaagctcaggaagattgggatttaggtgcattacggattggaataaggctgtgttgtacaaatatgtttcggctgttgctaagaaggaagacaacctatgcgttaaatgggtacacaacatatacatcaaggatgacaaattggtggacctataagtcttcaactcaagcaagttggtattggagaaaattggtaatggttaaagatcaaatgaaggctttgggtacattaaccatggttcaaggcaagtatatagtggcagccgggcataaagaggtacatgtccaggcgccaagaatagattggaggaagtttgtgtggaattgttttaatattctgaagcatagctttattgtatggctacctatgcttgcaaaatgaagacgaaggaaagattgaaaagatttgtggtaattaacaatgatgactgcctattatgcaacaatggtagtgagacaattgaacacctttactttggctgccagtttttgaaagaatgcttaacataaatcaagcttcggctccactggaagacctcgacagcaactttgaaaggaattagcaagtggataacagaggccaaatgtgacagatttaaaaagagagtatttgttgctgccattgcagctttgatttacttgatttgggccaatcggaacaatggctattggaacggggagattgaaaactgtgatagaattgtgtacaaagtaaaagctgtcattaaaaatagaataatatgtatatgggtaaaaaaatgtaactagtagagaagaatggttgtttaatacattgtaaaacctttgtaaagattatagagtttagaattggaggtcctctacttgaggatgctcttaggctgtacaaattgttgtttggattaatgcacttgttgatttaccaaaaaaatagaacaagctaaatgataagtaaggagaattacttttgaatccctcttcatatttccatctcattggtcgacttttgtacctcacattctcttgaccagatatcacttacactatcaacacactaagtcagtttttgtcgacaccccacttctcatattcaagctctccatcatctccttcattacttggaaggctctcttggccaaggactcctgtactctccctcttcctttcttcattaccgtggtttttcagactcagatttggcatcatgtctaacaactagaagatcaaacactagtttttgcatcttcattggggctaccttatctcttggagaataaagaagcgacccactatttccaaaagctctgcagaagcagagtattgtgcactagcaaccactactggtgaaatcacatggatccaatactcacttaatgatctccatattgaacagacaacacatacattcatctattgtgacaaccatttggaaattcatactgtaaacaaccctaaattccataaacagaccaaacatattgaattagatttctattatttcaaagaaaaaatcaagaactcctccatcaatctcatacaagttagcaataacctacaacacccaaaagcctttactaagcctttaccctctactacacttaccactcacattggtaagatgtctatatatgacatatatagtccatcttgagaggggagggggtgtaatgttaggattatgccctaaaagcaaggaattaattgtaacatattatagaatatacgaaatacaattataagataaatgagtacattaactatagaagtataattaataaatgtttgaaaattccttattcatatggaggaggtataatcttgtaaggatgttcaagagaattaagaatgtctgatatgaataaagtgattcgaaattgagtagagtaaaggaatctttaatatagaactactacgtataatttactatacactatactctagtgtgtgtgtgtgattttgattcagatcacatatgtagatagacatatagtaaatgtattgtaagtaatttgattatacattattggatcgtaatgaaataacatctttcattaatgtgtcgttttccatgaaagagttattcatatcataagaatgatcattagtagattagtcttaatcctgagtatacatgaactcttatttgtgtttattgaggcatttgattcacacgttaaaatttcttagagaagataattcttacaacttttattttgggagcataataacaaaagtgggtgggaacatgttatacaaaaatagaatccaagctttcctaacagatcaaatattatttcccctatagtgttaattctcggagttctaacagttggatcaaaatctataataggttatagattaactgctaacattgaattaatggtacataaggaatcaagagatataattagaagggtaaaacactaattttgacaaactctaattataaattaataattggagggcgaattacttatattgattatatcaatagactactagtaaaaatttaaaaaatataattttttattatcaaagagtgcaattccttatttatagaggagtaataatgaaattaataaactaaattattctaataatgatatcgataataatcaattatttattggagcttcaaaatataggtccatgatccccaagtcacctatatacaacattataccgggaaattttttattagattggtaaatatgagtgagaattaatttctatgagaaataatccttaagggaaaaatagtaatttatggaaattattatttgaataattataacaattataaattgtgtatttgaatagtatttaattatttagtttaatttgacaaaattatattaactagttaaatatactattatcttttaataatattaaagagagaaatttattaatttagttaaacaatatttattttaatcattgtggaataagagattaatgagaattaattaattaccatttattcgcaaaataaataataaatcttatttgtggttaaattaagaaatcaatttcaaatcttaaaatatggcccacacgtgtcggcctagttcaaacgtgtagggtgacatataaagactcatattaattttgtttgattattttaatattaaaataaatcaaataaaattaattaaataactattaattattgaattaaatatattgttggataatctatttaatataaaagataatattaaaataaggatttaactgatttttgttaattagttatatgtgttattccaattttctcccacctaaaatggcatgtccacgttgccaagatcaattccatgtgggagtacaactcgtcaacaataaggctaagtcatccacttaatgcttcaactgacaggaagtccgagtactgagcagggacggagaaataacaaagcaccaccctaagggggttagtcagcctcccctagccggcccaatggctaggacaggctagccaacctctagaaattgtagggtcagtcaccttgcacctggcaggtgcatggctggccagcaggcatttggtgcgcatccttcatctgtggaaagcaagcgaagttacgatttggtcttcaacaacccacaaaaataggggaaatatcagctacttccccattcttgaagggataaacccacttaatgcttataatttcattatgtaaataaggctttattttactatttttaagggatattagttgttaatcttcatgtaagctctactatataaagagcacgagcctaaccctgatttcctaagttctaagtctctaagctctcaagctctaagtttgaaactcaaactctctctcctcttctctctttcacgccctaggcactctctctcacataagatttgccaacttgagtctcacattgtaatctcaagagagccactccagattccacaaatcttgtgatatgagtggtattatcgttggtattaatacaactgaaagaggagtaggtcattacccgctannnnnnggggtcgaacctctataaaatcttgtgtctcttttacttctctattattattgtgtaacacgtagcaagcattagaaataaatatgactatattgtgggttggctaaatttgaggtcaacaatttggttctcattaagaccgagttgttgatttatatgatcaaacaccacagttaacacaaggagcactccgactacaacttcttcctcattgggtatacctcaagacctaatggcaactgatcttgatttttgtgttctagccataattggaatctccataaacccgatggatgtggcaaaccccgctatctcgtcaggcaccataaacctagccaccacgactggttaggtggacactacaaacacgattggtcttactgatcaacctttaccgccaaaggaggaccctccactggtgcctcgtactaaaagaatggctaacgtggagcaacccttggtaccatgactaggtctcgtacccagtattatgttagagaaatagggccaggaattggcaaacctattgtaaacatgggagatgatctcaagttagcaagacttagaaaggctgtcagtcaagtcggccaaattaaagaaccacacattattggttgcgatgtctttgcacaatagagatgcaaatgtttgagatgtatggatgaataagagtacatcctccgatctcaccaagcaaagctagacctccatattagaaaagctagcaacttgataaggcaattcaatgaaataactgttaaaatatgtcaggatcacatcagggatcctctccaagggagactagtcaacatattagggagggtctactgagaaactatccaaccaggttcaaccagagccaggacaaaccttccacgaagatattgtggcgacaacagccagaccccagcagcaagaggtttgatgggctgaccagggatctcaggctcaacaacaccctcgattggccaagctttggttagccatccccttagttgtgcacccttggtcaaccaacagggtgaactcccatcccagagcatttgggagcaagtaacccaaaggccaatttttaattgacaaggtccaggaacaagtggaaacacccaagataaccacttaagaagtgagtccaatcacttcagttaattagatccaccaaactccagcaattggtgttatctacccactgtcaataaacaggatgcaccagacaatcagagaagaacaggcagccagactctacccaacatagggctggccggccatgagcagtttcccaaagtagggttggccagaaaaggcatgtctctctacctaggtgtggccaacaatgacaaacaaccaagcttagggttggtcagccttgagcataccctttctcacggtatggtcggccagtctttggcccattcactgatgcagcccatctaagaagggccaatcacctaggcccctactgcatcggatccttctgtgctagcgcagttgggttaaatgagacacatgatcaagggcctagttggcctgaaacctttaggtctttaatttgataggtcaaggggttcaccattctcaacatacatcaatgccttgcccttgcctaagttcaaaatgccagtatggaagatgaataccgaacgagaggacccactagcacacatcaagtactttgagatgcaacttgatctcccaaagaatactggtgatgtgtagtgtcagatcctcccaacaaccatgtcgaaaaaaactcgatagtggtacttcaagctggcgccaagatgattgaattctttgaatgaattttctcgagaattctacacacatttcttatcctccggactaatacaatcgcagctggaagaccttgtcgaagttaaaagacaacaaggagaacatttaaaggattacatccaaaggttcatggctgaggccaccaaggtctaaggcctaatagaagaaggtcagtatatggccatactgggggcattcttccattgagtgacttcttgaaagatatttggaggatttcgaccaaaaatatgaaggatttccttgacagagctgacgactttatcatgctggaggaagctgtctgtaacgccctaatgctaaggcacgctacagt

SEQ ID NO: 14738 - DNA, 1641 bp, Cannabis sativa
cttgcacggttaaatgtgtattttgtcttagatatttatatgtgatgaaacttggctttgccatttatgttttaatgtttgactttcagcttcgtgagtgaacatattgaaactctagaagaaattgatgttgagtacaaagaattagccatagaatctggtattgaaaattggggccgtgttcctgcattaggatgtgaacccacctttatttcagatttggcagatgctgtgatcgagtccctcccatatgttggagctatggctgtatctaatcttgaagcacgacaggtactttacacactcccaagtctcatccagcacagaatataataacaaaaagtctcttggaaagctagtaaataaaacttggcaaaatccatacaataatttcacgaaaatgcatatattagagccaagcccttgtgtgtttatcaaccctaatttctggtttggattatacctactggtgcagtctttggttccccttggtagtgtggaagagttattagcagcatatgattcgcaacggagagaactaccgcccccagtgacagtgtgggagtggggttggaccaaaagtgcagaaacttggaatgggagagctgctatgcttgcagtgcttgttttgttggtgcttgaagtcaccaccggagagggatttcttcaccaatggggtattttgcccttctttcgttgaatcaaatctcaattaatttctatatatttctttttttactatttttctatgtaaacacaagttattggggagccttgtaaagttttctcttttcagataaaaaatgtctgtattcataccagagacttctttcatacatatatgtattatgttggttacagaatatctaatttaggtagtcttagttgaaccacttgcgttggtcaggaggagacagtatgtattcattagatagtagcagcacatgaatatgtattgaaaagattttgtgttttcttgcacttccaaatatatatgtataattttttcttccctcaaatttatgcaggaccatatgttacttgtccaaatgcagatctattgtttaattgtttaatttcatttctaactactaaatttcatcataaagtatgacctgttggttgacttgactgtttgtcgatgaactattttcacatatttaatatgtcagacctgctaatttacgtatatacctaattcctaaaagaatattagataccaagaagagtaggggggctgcctacgcaaaatttcccaattaatttaaatttagttaaatgtctgatgttcaaattttacaatagatcaactaataagacagctatagaattaagagaattataattattatttttaaataaaaaaatatcatgatttttttttttgaaaataacctgccagaatatattaaaattaagaggaatttggggcgaaattttcttatattttaacttttatacacttaattttcttattttttttttatggcaaaactcttttaagtttacttttctttgtaaatttaaggtgtcagttagatattaccgttatataccaactgtatagattactactgtatcgatttcgagattttactgttacatatataggtgtatacagtggtcatccagttgatattt

SEQ ID NO: 14739 - DNA, 7392 bp, Cannabis sativa
ttacctctgtaaaaggtacacgtgcaaatgtagaaacctcatccatatatgcactaaacagcaggaacgatgcaagtgctgcagatccaattgcaaaccctttagttgttgcttttgtagtgttacctactgcatccaagagatcagtgatctctcgaacactttctggctgaaaggacacatttgttcttatgttagataagccaattaaatgaaaataatatatatcaagagtacatccctctatactaatggaatagataaatttctgtttattacaaattccaaggttacctgctgactcatctctacaattccaccagcattatcagctataggaccaaacatatccatagtaagaacatatgcagcagtgctaagcattcccattgttgctacagctgtaccaaagagcccaccagttggatttccagtttcatctaccagtccagaggtttgacccaaccaaaaggctgagataatagctacactaataacaagaacaggaagagcagttgactccagacccaaactgacaccagcaattatatttgtcccatgacccgtggagctagaaagagctaaagagcgtacaggttcatgcttgtagtcagtgtaatacttggtaatccggacaaaaacataagctgtgatgataccaactagcccacataaggcaaagttaaaccatgcagtaggtgcttgttcagtgtaaagcaaccagcgagtagactgaatgatttgagaaaccacagcattaaaatatatgggaggaggatgaaaatggccagataatattgctactttacaagtgtttcactttctttttttcagttgaataaataatttttagtagaaagcagttcagcagcacactaagatattaaagaaaaataaatatgtttagttgtagatgaggtattaccaggcaaaaggtcagtacagctaacacaatagtgatagaatatcctttctggagaattgccatgggatcttctatagcacctttcgcaccagaatcacgagtaccccgaattgagaaaattccaacagatgatataacaagatcaaatgagtgaacaacaagagggaacaatatgaagcccgttggatctgcacaaatacagaaagtctttaaaataagggccttttatgaaatcggtcaaagtcgacatcctcaagtaaaattaaaaaaagtaaaaaacacattaccttcaattttacaacgtcgagccattgttccccccagtatcatagcactgattatttcagcagcaatactttcaaaaagatcagcacctctagctgcacagtcgcctacattgtccccaacctttcatgtaattattttaaagaccaaagtcaaatcagcaaattgagaacagaaacaattaaacaaaaaacgcaaaaacagaatctgcttggaaaatagttctcgcgtaaggctactatagacattaaaatgttattatacttatgggtatctagtgtatctgaacaattatggaaggatgtctagtttcaaggcaaatttaaaagcaatatatatgaggaaaaggttggagaaggaggaaggtaaaatatgaaacattattcactaagatttcactttcaataacattttcacaaaactcatccaagttccattttcccaattagacgtatcattctttctacatcagcaagtcattcttttttagctgaaatatttttctttaaaagaaaaaagcactcacctacatcccacactcagctcaatctaaaatgccacatgtaccacttgacaaacacacacaaaccactgttacagtgtaactgattgagttgagggtggctttattaatacaatggctccataacaaaaagccaaaatgacaaaactaattaccagatctgcaataacagcaggatttctaggatcatcttcaggaatgccctgctctactttcccaacaaggtcagctccaacatctgctgcttttgtgtatattccaccacccaattgtgcaaacagggcaacaaaagaagctccaaaaccatatccaacaagaagaagaggcactggaaaacaataactcaaagtcaagggcatgttatgtaatagaatagaaatggtaactagaatccagacatatacaagtcaaagaaaacaagtgtgaaaaaaaaaactataatagggataagctaagctaagaccacatgtccatatttcattcgcaaggaaaaccaaaataacatgtgacaagcaagccataatagtgatagcacttgatactagattctagaaagaaagaaacatggagaggcaaattggtatttacaacagtgatctaggtggaacgtgagtgcaattagtcaccactagctcattagtttactatcatactaataacagctaaatgacagtgaaaagtttctaaaaggtaaatagacaatactatcgatttaaatctgctaacatgattgctccaatgatctagaacaaatagtaattaaacacacacagaattccactttgctttaatgatgtaaaatttgcaatatgaatactttgattgaaagatgtaacatgtagcattacaatataatctattccagcagaataggataaataagaattataagagagtaagcaactttatttggagtgataaaataaaatttatgcctagaaaaaagaaagaaaggtgacacctacaatcagtaaccttcattccaccaggtgtatccacccccagccaaacataaaatgtggcatacagaattgctatgccaattacagccataccaacaacaaccatagcagaaaaaccaccagctcgaacagctatctgcacataacattttcccatatgttgaaactctgaaacacttttaagaagtagtcacactgaaaacaaacctgcagcgcctctcttgcagatcttcttgcagcactggatactcgaacattagcacggacagaaacccacatcccaacataccctgcagcacctgagcacaaagctcccaaaagaaatgcagctacggtgatacatgcagaaatatacctacatcagcaattggaaacataaatatttattggcaaagggtttgatggaagaaataagaagagggtgaaaggagagttatattatcacctcccaataccagcagcttcttgttgaggagttatatcgcgaaacaagtatatgcaaaggataattagagctagcaaaaaagccatcttagagatagttccatattgggtcctaaagaaaccttcagctccatcacgtatagcttccgatatctgaaaaaacaaaagaataccaaataagttaggtatttaacccattgattatcgtgaattgagaaaaacaaacagaatgaggccatacttaaaactaattcatttaaagtagatatacctggaccatctcaggaggcccctcatccttggcgagtacccacttagtaagatatattgacaaaagaaagctgacaatacaaactgagaagacaaacagaatgatgggagaagtacgtgcccctacataaaacactgctcctaaccccaagagcaaaattacaaaaagaacgcgagtgtttattccaagtaggactcggaaaatctgtacaaacaaacaagtttcatgaactcaacataagaacccgtgtaacagaaatacccatggggtgcaatgatgacaaagaaaaccacacaaatttttatcaagtgtataacaaagaaagcaaagcttgcatgaggaaaaaaaaagaaagaaagatagatataagtttctggcaaagtaggaatacgtgaaacaaaaatgttgtaagatcactacccatggggtgtaagctttgctacgcatactgggaaatgttcttggcttgtcttggtaagaccctagattgccaccctccaaatcctcacccatgatcattgtatgggctgaatttgcccttcgagctacaggaaaagggttgtactcgccactttggggcaagtcaccccctgaacctggtcgctgaattttgaaaattttctttagccagaaaaattcaagtgcgatttcacctgatgcaagtgtcgaagcactaacacgttaatcaatcagctgccaccctcaataacttaaaaattattatggtaatatgtctccaaagatcttctttgctgagccaattcctacaaaattagaaacagcactctgttgatatcagtaaagaataaaatgactagctaagtttgatagtcaaattttaatgtatcagaattcagaagcaactttcatcatacatgtcatatgacagttaagacttattgctaaaaatgcagaaaacaattcccagtttaaaaaagagtcaccattcagattttgtaaacaatgagcaaaatgttacatccgtaaagatatcaaaataatgtctctctataactcagtatgtgatataagagtcataggaatttaaccataggtattgtacttcaaactttcaatttgttttacaaaatccgtaatggcaaacaataaagttgtgttgagtttcattatgtgaggtctcacagatacatattatctaattgcaagtttacacacgaataactttaatataaaaacacattatggactagtaacttggtttggaaaaacaagaagtgaattaaaaggaattttggtaatttcaaaatatgattgaaaagatgcttaaaaatccttcaaaaaagaaagttctaaacaatatagaaatataaaacaatcgccatcactgaataattcacggataacaatattaaaaacaaaaattcatatgcttttcatttgactttccaagaaaatgcaagagaaaaacgaacaacattaacggatagctcgctcacctgggcatgataaatccaaaaacaaataaaaaggaaacaaacaaaatgaagacatgaatagaaaccaaatcaattccagtttccatacccaaaaagatctgggaaacgaaatccctcggacctcaactacacataagacatcaataatcgttgaccgtatatttctcaaatgtgatagggagagaaaaaaatgaattgcagagagatcaacccaaatcaaaatgagaaatcgtaagggtggaagaagacattaccagcaaataagggtacgaatggatatccctgaccgtacggctcacaaatgctcccctctttcttcctttctttgttttctctttctctctctctctctctcttagaagaaggaaagattttcgtagcagaagcttttttagagagagaaactcgaagactattctcagaaactggaaataataataataggagatttggattcggatgagttaaaatattaaaaataaatagaactatttagttttttttttttttttcttgtcaaaaaaataataaaataaaataaaaacgtgggagtttcgatctgaaaaatattaaaatgaaaatccaattgggtaattatcatatctctactatttatttagcgattcactcttctaaatgtgtcaatttataattaatattaatattattgacattgacataaataatataggatctccattttcacaaattaaaaaaggtgagatttgaatcataatgtggtgcatttctaatgcaagtattttcttttttctttttttttttttgataaataagtaatgcaagtattgattttttccaaaaacaacaaaattccaacctgcattttatctaagttattataaaaagtaaacatattcatttcagtttgagttttttttttttaacaaaatatcagttttctaaatattttacaaaactgttataaagcccttaaaaaaaaataaaaagaaagaaaaaaaaatatttttcacaaaaaaatacgcttccattggtacaagttaggaatatactaatttggaaaaaatacattttagttaatcttttttacaaaataagaccactgatttatttattttaatctatcagctttgtttggaaacaaaagtcactttcacttttaatgaatattttaaataaaataaaagattggatggagggttctgttgatgaaaataattaaattaaaacaggagagaaaaggtgaagaaagttgggagaatatgccaacgcaacttatccaatgtaaataggccacgtcactaattatatattaattgtccaaatctctccttcagaatcattattaataacactagtaaaaatttggcttcgtggatttatattttatttaatgataattaaattataagagtataacaaattttaaattttgatattttttatatatattttaataatataaatcataattttgtaaatttttatacaaatgttatagtaaagaatatattaaaaattgataaattatcacaaaaaaaaaaaaaaatagagatatacaaaagatatttgaatataaatttatatatatataaaaaaaaaaaactctaactactattttaaaatcgttatcattattatatttgtagtcgtcacaatattcaaaatagatgtcatcactaaataaaagaaatataccaaataattattaccaaatattgaataaagctattttagaacgcgccataaaaaaatatatacatatatagatatttttttttgttattttgaaactttagttgtgagatattttttattttttttaataaatatatattctatatattctcaaaataaaaaaaatatataatgagaatatatagagacacgattttgtcttgttagtgtatttaatgggatttattctatgatgtaccatgaccgttagatggattggttatttgatttgaggacatacatgggtatttagggtgaaagaaattggtaaccggttaagtttttgtaataaaaaattaataaatttaaaaaagtgaaaattgacatgaccaccatcagtcatatcaacctcaaccgtcctccactcttcttcttccttcttcactcatcaacatcttctacttcaaacttcttcttctttcttttacattagggcaaaaacttcatttttcattttcattttagcttaggtaaagctcccattttctattttcttcacttcttttcgtgtacatactctgagggagcaagtgtgtggtgtacattattcgtgttctaccatttttgtggttgttacagtcgtgggtgtcgacggttggttctacaagtaagtttctcatgttctacttttcatgcttttcgttcttcgctgtgggtaataaaaaataaaatcttttttgaggtccattttcgtgtactccattaatacaagtggtgtagttttaacagtctcattttctctcaagtacgacattagggattcaagtgacctattatttctctgttcaggtatctctctctctctctct

SEQ ID NO: 14740 - DNA, 6359 bp, Cannabis sativa
  modified_base (3501)..(3502): a, c, t, g, unknown or other
acgtattttcaggttgaaagtgtgtgtaacctctcaaaagtatttggataaacaacattttaaaaatatatttttaattctataaatacaccctattttattattttttttagagaagtctcctccattaatatataaaatatcttataaaattttgaaaaatttaaaataatttacaatataaaaagcagtgtttaaataatctcatacgcatataaaataaaatagtaacgcgtacaacacactatttgaaccatattttcggtatgttaaaatttttcagaatttcaaaattagttcaatttttttttatatatattcgtatacgttatagttatgttatagttttttaagatatcctacaaaattttgagaaattccgaatttacaatataaaaagtactattcaagtagtctatttcacacctgtataaaataaagtagtcacaagtgcaacacactggttgagccctatattcaacgttttgaattttttgaatttctaaaaattttacgggatttcttaaataactataacgtacatgattgtaaaataaaaaattgactaaaatattgttttggataccaaaacaaatagtagtctatcagtgcatcttttttaaaagatgtattgtagaattttcttatatttttttattgttttcttcttggtacatatttttaaaggaatatatatttaaaataaaaataatagcagaataaatacattattttaaaaatgttattaaaaataaaacacaaaatacttgatttatgatgattgttttactaatataagaatgctaagtaataaactctatataagaaaacacttaggattaaataaattatattgtaattaagaagttataattaaatagagacacattagaaaaaaaaaaaaccaaaatactcaaaaaatatcaaatgtaacaacaataacaataaataatctttaataatgtatcataataaaattattttttaataaatataatatttatacatgtattattatttgaaatagaattatttattttatataaataaatttataaattatatatattattaagatataattatattattatacataaaggtttattttcctatttacaagacttaaaaaatttataaataattataatttagatattattcttaattataattagcttaattaatgaaatataattttcttgtaataaatttgagattattttttaatagaatattcttattacataaaatttcttgtgataacatgtttgactatctcaatattaaatatttatattatatttggcacaaaaataattgtgatatatttggctcactatttacaattatgatccaatatataagatataaaataataataaaaaatattaattatattaatggccatctaatattttattaaaaacatacaaaaaaaatattattttttattattttattatttaaataatgataatatggtaaataaagaatgtaaagtttaataaaaaccactgaattataataatttactttaacgtaatgatatatattgtatcgaatttagcacaatttttattatgtgtaaaatgaaatttaacacactttttaaaataccattacaataattatttttctttaagtgttatattaaaatataataatataccatctttttgacattttattagagcgttagaatataatacatctttggataaaagtgtaaatatctattgtgatatgggtgttatatatgacaaaactttatgagcatatatccaaaagttctttcaaagaactgtatgaaattgtttaaaaaaactatatatatgaaatttatcaaaatacattttcagtttatttttatttgattatatatgtttttttctttttacaataaaaatagatttgaacttttaatataaaaaagtattgcagataaaattaaagcctaataattttcaaaaagtaaaagggcaatgaatggacataatagtgtcctatgactcgttacacgcaatataggaattaaaagaaaaagagaaagaaagaaagaaagaaaatctatctaaataaataacatttccaatttcatttgatgatcaaatattaaaggaaaaataatttggaagttaattaactaaacttaattaatgggcaaatgaaagagaactgcaagactaatgcatacactaattatgacaaaattgtgaattcatcaacaaatttactaacccacccactcgtgaccacaaaaatgatacacaggtccacaaacatgactgagactgaccccatcccacatcagcttccaccattttagcctatatactaaatctccataatatatctttatattatatttcttgtatctctgaagagcccaatcttatgaaatgatattaaattttcaccaaaccatatataatcattattgttaagtagcagtgaaccccctcactttatttttcttggtcactattctcctatataatttaatatcaaaacaaccactatagtctttaacccaatcattcaaaaacattgcaaaagtagatcaattcaggccacaatcaaatggcaaaacagtagagtacctcataatgaaacctatatatcctttttagctttatataatattacatatatatggtaaagttagtgtggggtcttaccaatttgagcctgggaaatgaggaggctgtcatggacgacaatgactgttcttgtggcaattactacggttacctctttcacaccttctagaggcttcaagatattctcgaccaaaggtacctctgaggaacaacataatcccaaaacgtcaaagtagcttttctgaaacttcttcgttccttgcttgctgcttgttttaatgtcctcatcagaacccataactcctgagatattttatatcaccgaaataactgcaacaaaaccgtattttagagtataattttattgtcagatctagtttgttttccaaaaggaaaatcaaatgtaatactattacattattaatcaataccatcatcattttctaggaaaagcttcgacaaaataataaagaaatatttgtttgtatttagagggttaaaatgacaaattttgccttggtttttgggaaaatgggtttggtggaaaacatgggaaagaagagttgtgtaatccgagctcaacacgatcttatctcgatggtgtcttattctatgattataaatatacacatatatgcatatatatttgtgtgtttgaagttgttttgtttacctagagagagatataagggagctagacacgcatacataacccaacactatatgcatgactcatatgtagtcataaaattaagaccagttgataattacaaggagaaaaacaagaagagatgaagctaattgtacaaaactttaataaaacacagtcaattaatggataaaaattaaacacgactttcttttttcattaatcagagtgagagagagagagagaganngagagagagagagagagattttgttgtaagggatgataaaacaacctttgtaaagatggaaaaaaagaacaagctagccttcttcagaggctattcaataaatatatgaaggttttgggaaagagagatggagggatgttaagtacgggaatgtggaagagttcaggggtatatataatgcagagggtgacagaaaaggtgatatggtaaatatataaatatatatatgggctatatatgaatatagggagagagaaattaaattcatttctgttgggaataattggaggttgtgcaattgatatgtctctctcgctcaagaaaaatatagtggggaatatgtaaaaataaattaataataataaaataggaatgagaaaatggaatccacatatgaatccacattataattaatgaatgtttctctctcatgtatagactgttaattacatagagtccatatatggaagagaaaaaaaataactgaagtttgattacaagggaattatgtatagactgcctaataattatttaacatttttgtcacttttcgggtttatcgtgttgttctttatcacgctatttcttccatcttttcttcaccgttcttgctatctaacttttctgatgatttttttattattttccttcttttcctttttctttccgcaagcactttattttcttatcctccgtatatgtatgcatgttatacattgttattgtttgccttttttttcttccaattaaaataattgaaaaaaaaagaaagagtttgaagctgtgaaaaaacatcatgaatccaatctcaattagattgctccgtctaagacactactcttttctagtccaaatcatagagtaattatcaattgaccaaattcttaattataattatgtagaaaaagaaattgaattgaaagcaaaagaagcatattagtgtttttctccccaaacccatgatcaagaaaaactttggaattagaggctaaaaggatgaaaaaaattatggggagcactactagatcgtgcgtgcttctaaaatatattactagttcaaatttaattatacccttaacttttacatttactgaacctcctttaaatatagcgacatgtgattgtaaattcttatttgtgtatatatccttcaaattttgacaactattaaattgtagaacatttaaaaaaaataaaaatacttcaatctttttctataatagttcttataacataagaaagagaaaatcatgtcattgttaagaaaattgaaaatgggagaaaaattttaaaaatataaatagtagcatatatatctaaattattgggtttgaaagtagtataaatttaataatttcggcacaagtacccagtattagtaaatgtataatttttctccaattttatatgtataaattcggttagtatcttaaacaggacacatataaagttcagattctaaattgctacgtttggatggaaacatataatatgagttacgttcaaattttcttttaattaattcaaaacggagtctgttcgacaaaactaaacgaatttttttttttacaaatatttggtgcttatgacgttaaaaaaatatttgaatttatgttgcatacaaatttaaaaatttcggtacttatctcgtaattatttatttttcaaactaatgaagctatttaaaaactcaatttttttaacttttttttttaaaaaaaggaattatataatttttaacttaaaaaataatttatatataataaaagttatattaaaaattcaatttcataggaacaagtttaatttttttttcttcaaaaatctaagtttatttaaataaatataatatttcattattttgttttcaggaaaaaattataaatttttattcaatttttaattattaattttttttttatatatgtatgattttgtaccagcaccgactgcccctattgagcaagtgttaccaccagcacctgtgctagtggtgggtaactagtggtttatgatgccgcatagagattccgtgtttgaacggattgtgaagttacaacctccgacttttcttggaggtactgacttaatgaaagctaagcagtggatgagtacaatcacccgtatccttgaccatatcggggtgatgggaacagagagagtgaattgtgcagctttcatgtttcaagatcatgcctgtgtctggtgggatattgtgggatagactcgtgatgtcagtgtgatgacttaggatgagttcaagagtctgtttgaggaaaaattctataacatcgttgtaagtacttcacatatggaagattttgtgaaactaactaaggggaaatgtctgtggctgaatacaatctggaatttgatcgactgtccaagtttactagtgatctggtgcccacagatttcaccaggaaacagaagtatgtgagattactgaatgccacaaccagtcgggacttgaaactaccactactcatgacactttgtacaagaaagtgctagagctagccttaattgctgaggaggctgagcaacatgtaacaaaagagtagacagcaaaggatgccgccacggcatcaaaccctccttctagtggtaatatcagtaaggggactgacagtggtaaccctaatcataaacggaaggctgatgcttctgaaacatgagggggtaatagaatgtttttgggaaatagaggtggccgtcagggacgcggatcttcattctgatgttatcctcagtgtccgaaatgcaagaaacaccatcagggtgaatgtcgggccaagacttgtttgcaatgtggcatggtgggccacttcatccgagattgtcctcaggccaagaa

SEQ ID NO: 14741 - DNA, 4650 bp, Cannabis sativa
tttaaattgaatttttctgggacagatttgtccctgtcgttttgactcgtttcttgagtggtgtagggcaaacttgggatttcaccaagccaaattcctacagtcacgattgagatttccaatcagtgagttgagtcgttgtgataatcattcctattctgaatatggattccaccgagcctctacccgaaaccactatggatttcgccgagaacccaatagcttgagaagccatagttactactggtgaattcaaggttaaattaggtcaatcaaatacatatttaaaacccagagtaaagacaacaattttctcctaaaacataaacattgaactctttccccgtaattgtaaacacatataatcaaaatcctaagaaaatttgcatccacacaaattaaatggacaaattaaacattttctgattatcaaaaaagaaagttgacaaattaaatggactcaaaattaattttttgacagtcccttcaataataagagagcattataatatccatgaaggaagaactgaagccaaaattgatctataactttttgacattctaaaatctaatgaaggaagaaagaaactaatattatttcaaaataaaaaagaaacaggcactgacttaccgaaatctgattttcaactttgattatgaaccttcacgaaggctcaagtgggcgattttgaagaagatgaaggggccgcctgttgatcgccagagagaagaggagcttgtctgactgttcatagcgtggtgccgattgcagagagaagagtggtgccgattgcagagagaagaggagctttgtggtgctgactgccaggaacgaagaaatagaggagaaagaaatggagagagatcgactggtgagaggcgcacagagagagggaatcaatcgtggttgagaggggaatcaagggggagaggagtaccactcatcgtcgattaatgaaagaggagaacgactgtcaaaaatcgccagagcaataaccctaatttctaatttgtagaagagaaacgaagactctctagttggtttcatgattttgggtttaaaataaatccttcaacaacagtttataaaagtcgaaaccactattgtgagtgtttaaaatgactctctattaatattcgacctttataaacagacgcaaaacaccaatatttttttaaaaaattttgatatttcccgtcagttttgttattatcgtctaatagaccacagacacaaataatgtcgtttttagcgtctgtttggaacactcacataaatacaaggcttacttttccgtcggtcaacgaaatgaacagtagcgttgaccgacgtaaatagtgtaatttttagtagtgaggcaaagtgtcgagcacaccgtcatgaacaatgtaagtccaagaaccaggaagaaattgcttccacccaaggctcaactcccagatgaactgactgtaaaactcactgcctattcactccgaacggcggtgatgctggaccccaggttctggagaaccaccactaacctcaagatcacttgaggagctactagaggaatcaactagacactggtccttgaagagaaaaccaagtaaatcttcgtcaatacggttgttacctccccaatagtcactcggtatcatatgcacacaaaatacaaggggaggtgagcaacctgacaaaatgacaaggtttagacaagactctggtcaactgtacccaacagtactattaaataatttcatcgtataaggctcgatatcatcgaagtacagtttcacgtgtaataacttggacaaatgttgagtcttaagttaagcattcaactataatagactcaccatggtgtgtcatacagagttcctaagggaagcttgatgagacataggttgtataggttcacaaagccatgataggattgttgccgaggtcaaaagaggatagaaaactggccacccgcttgggaccaaagccctaggccggccagggttccaaagcattgagagggctggccagggtctcatgacccatgtaagaaccggccaagcatgaacctgctagcttcctagggtaaaccctaaaactagccaacccccatgacaaaatcctagagccggccaggtgttaaataagacccctagggccggtcaaggtgcattttggatcaaaatgtctgttttttcaaaactcaaacgtgttcttcgtgactcaaagagtcaagaatcacaacgaaggtcaaaatcaaatatttttcattaggaaatcacacattatgcgtcctatgcagatcaaaataccaaaaagactacaatctaacgtgggaaccaagaatgtacaaagcatggaaaagcttgaacacaacaatggcaaatccatgaaaacaagtacaaaatgggatttgaaagcttacccactagtgaaaaccttcaaggaagccaataggaagcttagattgtcaaaataaagcgagaatcctgggttttggaagacttgggtgcgtcggcctcaaaggggaagtgaagagctcctttgtttccttttttaaagagagagaatataaagtatggtatgataatatgtttcaccaaataaccttatatagtttcttgtgagcccctctcatttaacacgaaaaatattatcagtttcctatttgggaacgtgaacagtcaaacaagaaaaaatatttcataactgaagttattgtataaaacctgctcggttaagatgccaatagttaagattgaagctaaaaagtccctattcatacaaacattttcacatggacttgagggcaaatgttattccaatttttgcccacatgacgtggcatgtccatgtaggtaagattgatgccacgtgaagtacaacttctcagcaagaaggccaagtcatcatgcataacataacagttgacaaggagttcgaatacttaagcaggacaaagagataacgaactgcccaacttaaggggtctggtcgaacccccctggtcggctctattaccagcataagctggctagcgtcctgaaaaggaaaggttggccatcttttttggtgcctctgcagcttttagcctggacaacacttctagttacgtattgggcttcaacaatccacaaaaataaaaggtaaacttcagttatttacttattcttggggactaattaacatgttatttatttattattttaatgtgtaacaaataggtgatatctcctcattttaagggatatcaatctatcatctcttgtaagctctcttatataaaagcaataaactaaacctaatctctctaagtcttaagttctgagttctaagtgcaaaacacgctctgaaagctctaagttctacaatcctagttctctcactctcttccacacgcccctagtagtgtagaagagactaagtcttcttcatctcaccaacttgagattttcctcttaattcttactattgtaatcttaagaaagctacttcagaatccacaacacttatgatctcagtagtattatctctaatatcaatacaactaaaagggcagtaggtgtaacgccctaatctataggcacgccacatgtgtgattttataaactagtttagtactaatagattaattaattattaaaatttgtgataatattaaaaacttcactaatataaaacactaaaaatggacatcataatgacactaaaattgtgctctagggatccctattataaaagttttacaaaaggactatatacaacgacaagtcaaaatatgaaatcaaaatacacaatagatacagtctaaaacaactcctgacaattgaacacacaagttgataagggtcgatatgtacattgttggagaagatagtcacctcatggttgttctaatttttccttgcccttacctgcatcacagagcacccgtaagtcacaagtattcaacaagaaaagtaacaaaggagaatatgtgaaataactaattatccatctcactattataaaatgattaaataataatattctagagtgtataacatgaccagccatatgcatggaaataaaaagggaccatatattgtattgcctaatcaggcaagcccgtgtcataatttagcatcatacataatataactacatcacctaattaggggagcccatgccacaacctagcaccaatatatcgcatcgtctaatcagacgagcacgtgccatagcctggcactcacatgtcactgttgctcgtacctaataaggtatcgctgacaagttgaaacccaacaacggttttagtctataccataacctagcatttacatgtcactgccgcctgtaccaaataagatatcatcgacaagaagaaacctaacaacggtttcaatctatgtcataacctggcattctcatattactatcgcccgtacctaattaggtatcgccgacaggtatgttgcattacctaatcaggtgagctcgtatatcatatcaatactatcatcacattgtcattgcctaattagacaatcgacaagtacaaaacctgtcatgccatgtggtacattataatcttcttgttgggttttgtaccctaaataaaactcatttcaatataatcagatttaccaattaatataagatcagaaatcgcttttatgttgcat

SEQ ID NO: 14742 - DNA, 6625 bp, Cannabis sativa
tgtaattgtgtatgtctatatgttctggacttaacagattttgtgtatatatatataaattaaaccataaacatgaatataacatgtaagcataaatgttttttaatattttattgttgacaaatcagattagattgtaaaagattttatttagggcataaaatcccaacaggaccatgggagtgggagttggggtggcatcggtcatatttgtggaactgagtaagtctctgatatatttagattgagtgagatatatccctgttgaatttctggtaacttcgaaccccaagaagtagctaatagggcctaaattttttaaggcaaattgagagttcagatcagagatgactttgttgatgagattcatgtcttcccctgtgatgagaatgtcatcaacgtaaacaagaagaagtagaagtttgctgtgtcttcttgtaaaaaacagagacgtgttagccctagaattgtgaaaacctgactaaatcaaatatgttttcagtttgttgaaccaggcccgaggtgcctgtttgagcccatatatgactttgttaagcttgcatacgtgatcaggataatcatcacttttgaatcccggtggttgggtcatatagacacattcatggaacttcccatttaaaaagacattatttatgtcaacctgttggattatcgaatcattgcaggcagcaagtgtgaaaataacacgaatagtagatggtttgacaactggactgtatgtctcaaagtaatccagacctggtgttggctgaaaacctctagcaacaagccatgacttgtatctatccactgaaccatctgagttatacttaatacgatgcacccatttatttgttgctactttcatccctggagaataaggcacgagaatgcaagttttatttctgaccagggcatgaatttcattttgcatggcattgaaccataaaggatcttggagtgcagccttgagagaagttagttcgtgagagactttagatatagttgtaaaggcttttggttttgtgattccattcttagaccttgtgaccattgagtgtgtattttggggaatggctacaggggcattaatttgtaacccagatgatggtaaaggtgtaatgataggtgggggttcatgatcaggttgtggttgaggggaaactatattggtgggagtggtgttattctgagttggaggtacagcaaggcaagtttgaacaggggttggaattggggtttgtgaagctgctgctggtgatggttgtataggaggagatgtatttggcaaggaggagtttttagttttagatgtgtctggattggtgacaggttaaggtatagtgtaaataggctgctggtttgagtgagttgggggttgtgaggttgttggtagggatgaggatgtgaaaagtgttttaaacttgacagttctggcaatatagatgcggccagagggatgcaagcacctgtattccttgtgcatagtattgtattcaagaaataagtattgcgcagttctaaaggcttatgactttgatagggccttaataagggatagcaagcacaaccaaaagcttttaaaaaagaataatctggtttatggtgaaagagtacctcataaggtgttttgagatgcaacacaggtgttggtaacctgttaatggtgtaagtagcagcaacaaaagcctcccaccaaaaacttaaaggcatgtcagcctgtgcaagaagagtgagcccaatatccacaacatgcctatgttttctttctgcacgcccttgttgctggtgtgtgtggggacaagggtgcctaaacttaactcctaactgctgcagcaaaggtttgaggggtctgaactcaccaccccagtcagtttgtaatgcttttattttagtttgaaaactcctctcaacataggcattgaattctttgaagatagtagtaacatcagatttaagtgtcgtagggaaaatccaagtgtatttggagtaatcatcaatgaaactaatataatatttgaagccttccattgaattataaaatgagggaccccatacatccgaatgtattaattgaaatacagcagttgttttaggtacagaactagagaatgtcatgctgtgaagtttgccaacttgacaagcttcacaaaaagaaagatcattacattttattttagaactgagcccatttacaactgttcttagaattttatgtgaggggttcccgagtctccaatgccatagttgagattctgatatagcagtaggtgagtttttggtgcaggtgaaagctcctggtgtggtgtagtaaaggaatttgtggatgtagttgacacaggcaaagcctttgagaggtcaagattgtatagccctcctttaagagtaccccgaaaaagtacttggcccgaagtcttgtccttgatgagaaatgaattagaatcaaaaagcaagatgatgttattatctgttgtaattttggaaatactaagaagatttttagtgatagcaggggcataaagaatatcatttaaagctaaagatttattagaaacattagtggaaactgaagtagaaccaactttagaaataggaatagaagaaccattaccgactgtaattttggctttgcctttgtagtcagtggtatttgaaagctgctgagaatctgaggtcatgtgatgtgtagctccactatcaacataccatctattgtcatctgttgaagtagtggagtcagatatcagagcttgaggattgttgttattcgaacctgtattggatgtaggattagcaggttcgggatcatatctgtgataacacttatatgcaagatgtcgtatcttgccacagatttgacatactggtctgttgcctcgtccacgaccggttgcagcaccacgagaagggccagtggaatttccacgactagtaggttgaccacgaccattgttatgtccacgagatggtgctgaaccccgtccagtaggaacacctctactattgacatgaccaagatttgcttggggaagatctaaagtgggatgctgattttgttcaattcgcatttcttgattttgtaacatatattgaacttcttctagagtaagagcttcagcacgagctgtgaggaagacaacaattgtttcatattcagggccaaccccaccaagaatgtacattgcgagttcttgatcaaaaagacgatgtccagcaactgccagggactcagcaagatttttcattttgagaatatactcgccaatattgagggagcctttcttggtggtttgcattgcaaatcgaagttgaagctctctggctttcgattgagtggcaaacagagcaaaaaaagtgttccataactgggaggcgaattggcactgtagaacatggccaatcatggcttcggacagagagttcatgagccaagacatgatgagagcatcacatctgacccaatgatcgtaatcaggattgagagttcgagtgacgggattgatcgttggtgggcgaggcatagtaccaagaaggatacctttaaggccatgtgcacgaatcgaggggagaacaagggatctccagtaggcataattggttcgaccgagtcgaatattgagcaaaagcagattattggaaatctgaaactgtggtggtggattctcaggagcttgatgttgacgacgaggtggggtggaattttcggcatagtggccaaggtcattttccatcgatgatactatgttgagattgtgaaaagtaagaaacagaagcaagaaaagaaaaagagagaatagaatcaagctcaacctcaaactgaggaagagaggctttgtttatattaatcaagaggaaattacaagaggcagagttagttaaaactaactaacgaaaaaactgttaaaacagttacaagaaagataaaacaattaaactgatacagacaaaggacaaaaaggtgctaacacggttcaaaaaaaaattattactttgagcaaaacaaattgaaaattgcattaacagcattaaaagttacattctatttaagtaacagaatacttttctttgattattatatattatattgcagacaagtaggtagcttactatactaagtgtagaatataatagccaaagtcttctgatagaatcatataataggtatattaagacaacaacatggtgtgttattctcacattttggatggcaacttggactgccgctcttggaatcttgctttggccttgaaaagaattttatgaacttcatcaaaatgaggacttgttgcacttttagtactctcaatacattgctgaactttcttgtaagggccgagtatgcgaatccgatccttttcgtccaatacctgcatagaacaaactcagttgtgccataagttaacattttgacgcagctaccaaaacttagcatagctacaatgcatgaaacacaaaatgcatacaaaagcttgattaataaatctacagttggttcggtaccccaataatcatgtgttttctttttcttcacaacaaaatattttatgaaacagactcctagcctaatcctataatatttgagaaaccaaaaaagaaggaaactgcaaaatcagctgtttgggatacctgtcttgtgtttgtttcacaacattttgagaaaaacatatagtccttactcaccaaaacttttttttttattaaaagaaaaagaagaagaagaatcaaattatattagtaagatttagtgctgtgtgattacctcaagttgcataatttcacaaaccaggcttagatctgctatggatggttgaaggccacctagcaagtactggcctttccccttgagccaaatggtctctagttttgacaaagaggatgaaagaattttctctgcttcagcagctgcttgtggattcggctgaatgccaagtgcaggcccaagaacagtgtataaaacatactttgctgaagcagaagcatcattgagaaaagattaaccctccaaaacagcaccagaataacaacatgtaacagttttcaagtatatggatgtgtatatagtgtgttgaatggaatacaaatcaacaaagtcagaaaacttcaattaaagcgaagtgcaaaaacaccacttgacaaatagaaaaatcaaatgtagatgagtctaaagcacctgcaccgacacgtaagttcgaatgatgccaatccaatactgaattaattttagctctcctgaaaagatcagcaggatacctgaaataatgaacatggaagaatcagaaatgggttgactacgataaaattaatagggaaaaaatgtcacaacttttacaaaagatatatcattcagagatacacaatctgagaaagaaagatgtcattaataaatgaatgttatagtttctgaacttttgttatgcctgtctaaaggtatagcatcagttggacagtgtaatttttaaaaaatgtaaagaaaaccaagaaaataaacacgcatccctttattttctatactacatctattttgattattccactttaattaaattcacaagacttagattttatattttttggtcaacaagtatctacacagcaacagctacaccaagaatccataggcaagtaatctcattcggtaattcaactttgctatggacaattttaaacacgtcttttgaaaacaacaaaaaaggaagaatagcagatattaccagtgatctgggacaccaggatatacacaagcaaggtagatgagaattgcatgactgcaaaagaaatggaaaatggaacagtgttaagcagcaaactgcaaatgtgatgaaatgacagcaatttgaatatatttatattgaacactgaagaaaaaaatgcaacaaaatagagcagaaattaactattcatgttctaaacatggttttaaacatttgtaaggaattcacatataaattatctgtggagtatattaatagcaacaaacatgagtcctcagtcaccatgttcatgtaaatataatgtcaaatcaaacctttttacaagttttttaaaagagaaaaactgaaaatcaaactgtagttaaatcaaacaatataatttagtacaagaaggaactacctttcaaacagcttaaatcttccgtcaacaatagcaggaacttgtcccaaaggatttatttctgaaataagcaaaacacaaaacttgtaaattatagtggaaaaacagcccaagtatcatttatatccaaatttttaactagataaaactacaacgcaatatagtgaaatagattcaactaactacaaaaggtagatatgattattccactacgaaaagaaaatctctactttcagacaattgggtctcccaattccaaatatacataatatatatacctttgaactcgggagtttgatgctggcgcttggataaatccactttgatttcctcgaagtcaatcccatttactctgtacaaataaaaagaaaacacatataaatcataaaaatcataaaaacagagagtttaatttcgaaaaagaagaaatttacttgcagaagattagaatagcacgggatggttgggacattctatcggaatatactttgagcgtcatttttgcttcaatgaa

SEQ ID NO: 14743 - DNA, 3131 bp, Cannabis sativa
ctgaatttcattttgatttgttttatgtaggttgatgattgggatagtgaccctgccgatataggcctatatgacagggatgatgttgattgggatggacaatattcaagtgggaggaaacgaaggtctgaacgtgagggcgttatgattgacatggtccatctggattcattttccaggaggtatcgaaaaccaagaatggaaacacaagaagagattaatcaacgcatgctttcggttgaattggctgtgaaagaagctcttactgccaggggcgaaacacattttactgatcaagagttccctccaagtgatcaatcgttatttgtagatccagttaatccccctcaaaagttacaggtaagtttccgaaaagctttccttttttcattttttagtactttgaatatattttcttaatctcttgttttcatataggttgtttctgattggatgaggcctgcggatatagcaaaggaaagccgagttgatgctcggccatgcttatttaatggggttgccaatccttctgatgtttgtcaggtacagattattttacaacttaacaatgaagtttttcttcgattaacatcttctataaaggatttgttctttgtgttcgaaacagggtcgattgggtgattgctggtttctgagtgctgttgctgttttaaccgaggtttcacgaatatcagaagtaattattactccagaatacaacgacgaagggatctacaccgttcgtttctgtattcagggcgagtgggttcctgttgttattgatgattggattccatgtgaatcgcccggtaagccagcatttgcgacaagcagaaaaggaaatgagctatgggtctctttactagagaaagcgtatgccaaattgcatggctcttacgaagctctagaaggtgggctagttcaggatgctcttgtagatcttaccggaggtgctggtgaagagattgacatgaggagtccacaggctcaaattgatctcgcgagtggtagactatggtctcaattattgcgtttcaaacaagaggggtttctactcggtgctggtagtccaacaggttccgatgtgcatatctcgtctagtggcatcgtgcaagggcatgcctactctctactccaggtgagtaaatctcggtaaaggatactgatatacaaccacttgagtagaactcactctcgaaagctagcctaagagatgaggttgttgcccgagtaataaacgtgggattctaacagattcatttttgttacaattttgtttttcaggtaaaagaggtggacggccacaagctgattcagatacgaaatccatgggccaatgaagtcgaatggaatggcccttggtctgactcatcaccagaatggactgataggatgaagcataagcttaaacatgttccacaggttggtttttgatcctttatatgcttacatttcgatgaattttcgattcgatttcttatcactgacttcatacttttgttaaacagtcaaaagatggcatattctggatgtcttggcaagattttcagattcacttcagatcaatatacgtttgtcgagtttacccaccagagatgcgatactcggttcatggtcaatggcgaggatacagcgcaggcggttgccaagactacgaaacatggcatcaaaatccacagtttcaattacgagctactggtgcagatgcttcctttccaatccatgttttcattacactgactcaggtaatctttccaaccaactttttttcttaaattgtattctcaatttgtttttaactttccccgaaataatatgtttagggcgtgagtttctcgaggacagtggccggtttcagaaactatcaatctagtcacgactcgatgatgttctacatcggattaaggatactcaatactcgtggtcgtcgagctgcttacaacatctacttacacgagtcagttggtggcacagattacgttaactctcgagaaatatcttgcgaaatggtattagagcccgatcctaaaggttacaccatagtcccttctaccatacatcccggagaagaagcaccatttgttctctctgttttcaccaaagcatcagtaactctagaacccttgtagtttgtagtaccaatggcttttcagtttttcttgactcaaaacttcgaattgctcgggctactcatcgaccataaacgctaggcagccacacgagggaaaattcatacaccttatgatcaggtaaacgaaaattcataccgaactttctgcctcgttagagcaataaactaactagttattccctcctcaggctgcttacaccgcgaatttggcaacaaaacaatgacaagcgagttcgctactcatcagctgctgaaactctagttgaacattaccgaacgagtacaaacgccttattcggttatgtttcgcttctcttgctcatgtcaacatcatcatcatcatcattatcctttgctttcgattggcataaggatcgggttctcttggcggctttgtaactgtaaatatagattggtttcttatgaatataggtgtaattgtgtaaaaatgagaactttgaaacaaaaagctatagagattaagttttaattgttaggtaaaatgagaaagagaggggatagtgcagctgtaatggtgtttattggttcagctgcggttttgagagagtgagagggatagtgcagctgtacaaatacaaaatgtttcaatatttttcttcaaaatatgaaactattattttattttcttctattttggttggcatgtttatttctcttttgggtttaattaatgttttgaaagttttatttttggtaaatatgttgaattcaatcattgaattgagaaagactagtatgtgattctaaaataattctaaataattatttaacaattctcatatttccacaaccttaagttataatagtgtaagttttgtagttatttagaggtatatgtaaatttttttaaaaaatgaataattaataatattgtaaataaaatttgggtaaatactattttggatcttctgttttacaaaagttactaattggaccctgtattttgttaaatgacaaaatggatcttgtattttctaaa

SEQ ID NO: 14744 - DNA, 6835 bp, Cannabis sativa
gggggggggggggggaatggggcaacaggatttcactgattagggtcacgcttttcatattgataggagtagggcactcttcattcgttcctattctccatcctttctaaactcttcatccatcaagggagtgggactctttccttatctaatgacaggtggcatgagggagcgagtttgttagctttgagaagggagataatttagaaaagtgtatttccaatatgattggagaaggggagggtgagggaattagtatgacagaaatggagaatttgctctaggaggttgttacgtttccaaaaacgaatcaaataggaacaaattagcagggattataaatttttttctagaatcaatgattatatttgaataatgtcacagagattgaaaaggggtcattaaatgtatgaatttggatttggagctgttgctcttggggagagttggggtccctcgaataccaccatttgtgtatagggttctttgtattgcccactggttttgcaattaatttacacgttctattcggtcaacttgtgtactggtaggttgtgtatgaacttatttgggtcttacaggtctatccttagaacctttgcaatcttctgtaattgctttgcattaataatacagacagactacatatgccctcttcttgtgtacattgttttggtgctgttgtgttagtttttctgataaaatagggatttgataccctccaccttttcacacacaattacacacccagccacttgagctagccccaaatggtgtgttgttgtgtcagtttgggatttgcttgttttgcctttttgttttgagtagtccatcctattgcttggctatccataacaccaaaaaaaaaaaaaaaaacagtagctgctatcattctcaataacttctgcttgagctgatttcatttaatctgaagcagccatacttcttgacacctagccggaacacaccagggaaacttgaactcctttagaactttataccaaatcctgaaagaaaccggactgtgcattgtttcattttcattttgaccttccttggaagagtccttagtgcacattatatgcatttcaatgcatttacatttggtgtccccacacacttccttatttccttttttttttttgctggaacaacatgttcattgattaagaggaaaagatgggtaccacaggagggggtccctccctttggatataaattgcattaaggctagataacctagcactccttgctaaaccatcggctaaactattacacaatctactaatgaaaataaagttacaaacctcaaactcattaatataactacaaacataactagataggctccaaagagaccaacatggcaatctttgtcttgcagattaagaacccaccatgacctttgcatttgaaaatacaataattttgtttagcttcactgttttagcccactgcagacccaaaatgatcgccttcaccttccatggctgaggcagtcgggctgtgatcaactaagatgctccacttctgtagagagtagttagcccagacaacactaaaaccagcagtaccatccttccacgatgcatcaacaaagagcacatgattttcaacctggtggattggagcagggggaaccgagatgggtaaggcaatctgtttagaatccatcgatggattccctgtggagagaaaatttgagaattttcttgaagtagatgagataatggtttccaccttcacctcagtacccctgtagcaagcacttgtttcttaaatcccaaattttcatgaataagcagccatagtatgtcagcatcttatctctcatatctgattgaaaaggcaagcatagattatagaagaattccctcatagaactaccttggatgctgcggctgagcaaagcaaattcaccatcaaactaggcagcacgagctagaggacaatccctaaagatatgcaggcttgtttccaaagattcatagcaaaaaacacacgatttatcatggacaaaacttagtttttccttcgtaggaaggacatcctgcaaaactctttaaaggatcatactgatctaggggtggataacaggtctccagattcatttccaaatgaccataacatcattatacctgctcttttgatcttctatacacgcctatttaatagaaaatactcatgagtctttgtttttccaaactacaacatcctcttccatatgattaagccttgggatttgaaggattttttttcccaattcctcaccaaagaaagggataacaatgacaggattccaatctgtactagcagataagtctgcaactgattgcaaaattgggtttctcactgtacatctctccataagatttttgaactccacaaaattcagccaaggaatccaaggttgtaaccaaagatccattgtgttaccatttccaactaaagtatgagaaccttgttgaataattcttcttgattcaaggatgtttttccaagtggttgtttgagtttttctgagtaattgcccaaaaggatgacttcgggcaatattttttttttcaggcagatacaccatggcttagttgaattgtttcccagaaaccaagccaatttagctaacaatgctctgttcatgtcttcaaaccttctgaatccccagcctaccacttgcttttagttgacagaaactatcccactttttgagagccaaaaatctatccttttccatgttgccactccaatattttctgattaaagcctccatttctcttccacccttgaagacatctattcattttttcattaagcattatgtagtcttctctcttccttctcttaaaaatgaaaggatttccaaggtgtttttattcacgcgaaagctgccttacatcaagagtcttttatagcagagtcctcgaatgtctacgtttcttgagaataggagacttgattttgacctgctacatgattgtccagaccaacacttgtacttctttatacagttcattaatacctgagcctccgcttcattcgctctagcaaatagaatggtgtcgtcaacaaacatcaagtgagaagaagggagagcatccttacaaatcctaatgccatgaacactccccaactgttcttctttaattaataatttggaaagcacttcttgacaaagcagaaacaagaagggatataagtagtccccctgccttaagccacgattgggtttgaatttctttagggggcttccattcaagaggatggaaaaggagacacttgtaacacaagacattatgattttgcaggatctttgatcgaagccatttgcctccaaactgtctaaatgaatggccactccattctatcatatgccttgtgcatatccaattttaaggccattaatccccctcttcctctctttttctgaatacagtgaacaatttcttgtgtaagaatagaggattatgcaatccatcttccagggataaaggtcgattgaaagggagaaaccaatcttccataatcggtctgagacggttagatagaatcttcgtgattatcttatacacaattacataagcttattggcctgaaatcttcaacctttgttgggaactctgttttcggaatgaggcaaatatacgagtagttcatttgatggtgcaattcttgataagtaaagaaatcccttataactccggtggcattctcgcctctaatatcccaatattttctatagaaacagcctgacataccattaggtctgggagcttttaaggggtgcatctgccaaacgacttttatgatttcttcacaagtcggaatagcacaaagcatcgcattctcagtcacccccaatttctccacaaatagatcatcaagctcttgcaaaaattgaggggaagaggaactgaataaatcttggaagtacttgttaaaaacacctcccattgctcgtttgctttcctttcaggttcccttgttgtctttaacgaaccaaatctgaatcctttgtctgcgtatcatcgttaaagcatgaaagaatttaaagtttctatccccctgtttcaaccaaatctctcgagagcgttgtcgccacatactttcctttctcctctagcattctaagagtccgtcttggagtgtagctttcttcttagacaattcaatagagatgtcttggttttggaaaactgctatttccccttccagattttttatattttcatcacaattgccaaaaacttctccattccatttttgcagagctctcttagtattgttcaggttttgaaacatatttattgcatggcaagcttcacagtgtctccaagctttagtgatcacttccttacacgaactctctcgtccaagctttaaaaaatctgaaaggtttgaatccttttgaacgagctaagattgtgtctaacattatagctccatgatccgagactgtgatggggaagttctttacccctgctttaggatacgcagtgttctagtgatgggatcgtatggcacgatccaacctctcccttactaaaccactagaaaatcttttgttgagccatgtgaattttcccccttcgtaacccaaatttattccaccagtgctaaacaaaaaatactccaaaattcacgtatcttttgttctaaccatagaacctccactcttctcatgttgatagagtaaaacatttaaatccccaatcaagatccatggcatatcacagctaagaatcctggatcgaaggaacttccaaaaattctccttttctgtctcgtaaggggtcccatacgccgcaaacaatgtccaaaaccagtcttttagactgtaccaaatcttagcttcaaagttattatgaacaacttttgtaacttgtagtttaaaatcatgttcccacatcaaacaaaaaccacctcattactaatagcagggacacattccaaattagcaaatcccaacctcctagtttatctcaccataatttccttcttcactttcgtttccataagaaatatacagatcggcctataatttctctcccaagcaagcagagcttgggttgccgggtcccttgttaggccctggcaattccaagaaaggaatctcatttcgagagaggggggcttgataagggccgcctcttcgcccaattaaaaatttggatcaatctcaacacatacctccaccatctggttcatctctaattctaggtttttcttcaaattgtcatcttccataatcctttcgctttgccctttgttcttccctaaggcttttctcgatcgagagctcattttcctcttcttctcctcttttttaattgacggttgtgaacctccactacccattttaaatagggtctcttctagaccaagcaagaactcagggagcatcgaggcatcttggtcgaacacttcattgatttcaagatcagggttgaagaaaggggtgaaagtcaaaccagcttttcttttcctgggttgggttgacttatgaattaaatcaaaaacatcactggggtcatgaaaaatgacaggggtgagctcatatttatccacttggattgggcccatcagttcctccactaagcccgattgagaggcatcctttggccaaggaaagtaattgggctcgggatgtttaagtggtgctctagatttataaatagaactatgtgggctttcaatagtctgttggtaagtaggcccaatgtgtggtagaattgaagtgataatcctaggagataagttgaggaatgcctcttttttgtatctattaatcaaaaatattctcatattatattttattaaaatatacctacttttgtgagtgggttgtccaatataccctcattctccacttaagtatttgaactgaatccagtctcttctgtttctggttatacttagaaagaaaccagtaggaattctatgacaagtatccaattcaacctggaacttcaaaaaaccccttctactaatagttttctggtctgccatgtcgtagcccttgtaagttccagctttcgctgccactattggagtatttacaatttttaagtaaggtgtcggcaatcctgtatcttggagccaaaaacagccttactcatgtctacgttataccattccccatcttctggccattcgtggatgataaggagttttccattaatgatccatgttctattctccatgatgttgacgttgtcttcctcatgatcaaataatatcctccatactccttttcgccttgttctgattctccagtttcccttcagtttccagattccagagagaatatcctttagtctatttctaggcactccctttccttcaaagaaactcgccaagacccccgttcttgtaatctcttcgttcagctcaaaatctggttctaactctagagtctaaagactccaaaaaatcttgtctaaatgcctccagctcagtgtcatccgtatttttcaaaggagtttcttgactgtttttttccccttcttcaccaactcccgtttccataatgattactgggctcgtgccagaaagttctgtgtcattctcttgagtcgtgcattggccagcatgcttcacaaggttctgcgtttgaggattattcttctccataataatggatcagacagtacaaacttaaaataataataaagtctaccaaccacctgctataaatcacttcctaatagtaaaaaaaatacttttcgaaaacaaaggagcaactttgcgaattgtagagaatggtgaattgaattgtatgttgtattccataaaatagtatatatttatatacaaagctaggagactaaatgggaaa

SEQ ID NO: 14745 - DNA, 4527 bp, Cannabis sativa
caagctagaagttgaacctttttcccaacttcaagtgatcctatttcatcatcccaaagaacagatttagcaccattaattgttgccattttaagaatggtttcagcaggaagggcagtgggatcagttgtcccttttgcaaatacttcccttcctttattaatcaaggaagcaaggtacatttcatcaactgcaaaacaaggtaaaggtaaaatccacacatatatcacaaaacagtttgagaaatatcaacatgacatgacattgataatttgatgatgataaaataatccacacatatatcacaaaacagtttgagaaatatcaacatgacatgacattgataatttgatgtgataaaattaagctgaatgacaacagcaatccatttaatacagaaagaaggcttatccgagttaagataaattattcatggctaacatgctattcctaatatacgaagttatgaactagctccattttaatcttcatatataatttctgcaatagaaacagaactaatcttcttttttctaacattattgttgatttgcagttgctaatcttagaatctcacaattaaagggaataaaaaagtggtaggaaaaacaaatctggggaaagtgaatatcataggattattgattttactattcttaaaacccatctaaataagctagttgtagtcttttagcttcttttccattataaattcaggcataaacaacaggaacagtttaatgcaaaattcctatacacaactaaaaaatattttatactattcccaacaattacattactcttatttaacgacacattgagaatttttacttgtagaatatccttccctcgttaagtttcataaacaaggagaaaatatgtcttttagtaataaaagaagaagaaaataacatgacataattatggaatgagaaaatgaaaccaatgctcattctattgtttgagggtgccccatctgttcccaaggagacacatatgccagcatcaagcatttctttaacaggtgcaaatccaagcattctcattgctgaagcagggcagtgagacactttgactccaccctttgaaagaaactcaatctgaatgattgtagtggtaatagtacaagtacaacaacacccagaaacatgaattaattttccatgctattatatgaccaaaatattactttatcatgcacaactaacctcctcattgttgacccaaactgtgtgagcagctagcaaattattttgcagaagccctatcttttccaaataacttactgttccatgattagcttttcttttctcaaccacaacttggttctcaaatgctatctctgcaacatgctaaataatgaataagatcattcatcaacttcacctagtatttccttaccagaaaaatatccattactttatgcttgaaagagtcaagatttttcttaacatacatttgaaagatcttgaaaattcagcatactgaactatgtaataacaaaagaacaagaaaagccagaggggccatgaccctccctagccccctcatagatcatatgactaattataaaatgacccaaatttttatttctaaactaatgagcaatgattattttattttttttattgcgtgtttatgtttttttttcccattttcacaaaagatcaatactgattgaaaaaagtcagtaaatgcagatgttattcttccaaccatgtaaactctctattgtgcatgcttggctattttatgagtagcattgctagaaataaacctagaatgaagtgaaatgatgagaaagtatctgtcaataacagcttctgcatcttttttagaaccatctaaatttagaagctaaagactcaactttctaaaccatgttgtgcatcaatggctaagtcttaaagaaaagagtaaaacgttagaaatcaatactctaatgctaaatctcgaattgaaacagaagtttgaattctatagacaaaactttcctaattggacaaacatatcaaaccaatatttaacatgaacactccttagaaatcacaattccttatgtctaaactctaatccaaccccaaaacagattaaacacccaagagggggtagctcaaaatgtggtttggtctcacaaagtctgaagaccgagccctgataatgggcaactacatagcatttgctgtaattgccttatctccaatatattatatgtatagggttaggcagagatgttaattcaaaaacatattgagaaatgagtaatacacataccatgtggattccagttttgagttcttttgcagcgtctctcgtttcaagtaataaacgatcagtggagttcataatctgcctaataccaaaccacactctgatacgcccatcggcagtgttatggtgctttgcataaagctctttctgtgcctgattccttgaagttatagcaaatgtctgaaaatgagtggacccaaataataataataaggtattaaggtcaaacctgaatacattcatcagtagtttgagtggcccatgacggtggcaacccgtccccagcatccatagatgactgagctagacatgcgcgcaggcccattaactccacagccctggccatcccagaaacatgctgcccaccagcctcggcaaagcaagttacctaattcgacatacccatcaaacaaaaaaatcaaatttatatatatatgcagctcaaaagagaggggcttgcgtttgcataccccagagtgaataagctctatgcaacataataaagtagatatatacgaatcttcctcggtcatgttcgactcgtacggccatatccggttgtgtaaccatgtcattaagtcaacatcatcggctatccctctcgctagctgctgagaagtgtggacgtgggtgttgattagtcctaacaaaacccatgagagagaatttggtttagttagttaggaaagagaggaaagtgagagatggagaaagagagagagagggggggagataccagggagtaagatgtgagcgtttagatctataatttgatgagcaagagaagaatattgatgaagaatggaggaagattgaccaagggcgatgatagtgtgatgttggatgacgatgccaccgttgatgaagactctgtcgccggagtccatggtgacgatggtggcattgtggagtatagttagagtgttttccatggcgtccactctcttctactatgtgtttcctcataaaatatttcatcgtcttaatatattatgtttatcataacttatgacactggaaggtttcttgtgtcgtgactgagatttttggaaatccatttaataagagtttgaataaataaatataagatgaagacttttacttatttcgagtgttaattaatcttaacttacaagttaatgtattgtggcgaatagttttacgaattacaatcagatcttacaagttcaaaaatcctaacttcttcgtatattttctcacatagatttttctaacatagagaagaagacaacctaaaaaaaagtgaagtgaatcgtctccttttatgaaggtataagagggtatttataggataagattcagatctgggcatactcgtgacctgctaggggttttgtgtaaaattcggtcactattggggtaaatacatgacttaaggtccactagcaggattgtggctcgtggagcgaaggcatccgtacgactggaggccacacggtctaggacaggtgccttgcgagcgttgttctagtatgcagaggtgtcaggtacgtaccgttagacaaaaggaaggttttccttttggtggtgcgtgtactaacgtgctctgatataggagacaagatctgacacagtgggaccagacgtcaaatggcagccacgtcaccctatgaaggcttacgaaggcgcctctttgaagaccctcttcggatacatcccaatgctcatctggagggcttagtttctttcgtctcggtaaggttgggagccttccggatctagacgagctttcttttagaagtgagccttctcggcttaagatggacttgggcccatcttccgtctagagtgggcctaccttcatggaagggcttgttagggtttatgccttaaaagtaagtatttaatggataatatattatacaatatataaaatacaattataagataaatgaattcattaattatagaagtataattaataaatatctgaaaatcccatatttatatagagtatgtatgatcttgttaagtagtataagagaattaagatcgtacaatatgaatataacaagtcggtagtgtattaaagcatgaaaatctttcgaggagtcatctcgaaaagcgtatgagtgaggacaaagtacgctaaaaagattcatattaattaggatgcagagtcggtagtcattccagagattatcaagaagaaaggatgtgttaataagtagaaatttacaagttattgagatgagtatatattagtgggtggaaataagaaatgctctaattgaa

SEQ ID NO: 14746 - DNA, 6092 bp, Cannabis sativa
  modified_base (5937)..(5938): a, c, t, g, unknown or other
acaatctaatattccatcctcatccctacatccatcctcctttgtttggatcaattggatagcatgtaagcaatcagattcaatacaaaattgccgatatttcctttgaatccccaagagaagcccctccttaatggcatacaactccgcctgcaatggagttaattcctgctgccgtaaggttgcagtagccaccaggacccgaccctccccgttcctcaccacacagccagctcccatacagcgcccacccgctttaacccccccatcaacattaattttgaacgtaccttgtcccggaggagcccaatgcgcaacagaccgcaactgagcatgaacccgttgcgaagattggccttgacagtcgctgagatatttagcacaccactccactatatccgctgcccgtggtatccgccccccatgtttcgtattatttctaatgtaccacagctgccaacataacaccaaaaacatctcaaactccacccgagtacaccccttagccaaccgaattaaaaacgccatgacatcttctttgccaacccgctgcaacttactcttaaaaccactcaatcgccatacctccttattcgaattgcacccccatatagcatgaaacaccgactcccgctctccaccactgcatctaccacagccactgtctacatccgtacccctatacgccactgctgcattcgttggcagccaagaatgcgccattttccaaacaaaatgttttacttttggagggatcttcaacttccacaccatcctccaccattctctaagatgactatcatccgcttgcccaacctccttttgtagctcaagtgccatccgataaccactacgaactgaatactcgccattggtactataatgccatagaaccttatcctccaaccttggattagacaccggtaattgaaggataatttcagcatcgtcatgattgaaaagatgtcgaataaagtcctcatcccactccccatcctgaagtttcaaatcaaccaccttaagctgtggtggaatataaggcttgtcataaactttaaaactccgagggcgaggtaaccaaggatcctccaaaatcctaactgactctccatttccaattctccaccgatacccattaagtattattttcttcccccacactaagctcctccacacaaaagaagcatgtgccccacacttagcatccaacacactctttccaggaaaataactcgcctgcaacaccctactacacaatgacataggctgccgaatacacctccatacttgctttgctagcaacgcttggttaaacatctcaagatccctaaacccaagcccaccttcctccttaggcttacataaatacttccacttacaccaatggattcttgtatgtttttctgtggatccccaccaaaatctggccgccatcctatgcaagctagtgatagtactcttcggaagcctgaagcaactcatagtatacgccggaatagcttgaataatggccttaatcaacacttccttcccggccatagaaaacatagacaccttccatccccgtaacttgttccaaacccgattcttaataacctcaaacacttgcttcttattcctcccgacaagagacggcaaccctaagtatttcccatgattttccaccaccttcatgctcatataacctcccaatgccctcttctcttcgtcccccaccctcttgccaaaacaaatttcagatttgttaaaatttacttcctgtcccgacgcactagcatatttgtccaaaattcttttaaatctatgacaagcattcatagtggcatcaaagaacaccaaactgtcatccgcaaagaacagatgtgacacagacaacccttgcctaccaaaccgaaccccactaagtctcccagcctcctcctcgtggcaaatcaagctagaaaaagcttcagcacagaacagaaataaataaggagataacggatcaccctggcgcaaccctctctgtggtactacacaacctttcacctcaccattaatcaagaaagagaacctcacagaagtgacacaccgcatgatcttctcaacccacacttcactgtaacctaaccgaatcatcatggctcgtaagaagccccactccactttgtcatacgccttggccatatcaagtttcaacgccaactttctcccattttgaaacctgttcttgcgcatacaatgcaatccctcatacccaataatcgcattatcatgaatcaaccttcctttgacaaaagcactttgtgactctgaaataaccatccccaaagaatttcgcatccgattagccaaacatttagagacaattttataaataacattacagagacttatcggtcgaaactcctctactctagttggcttctcgactttcggtataagagcaataatggtttcattaagacactccacattagccccattattcaatatattcaaacaaaccaagattacctccgctcgaagcttatcccagaatttctgatagaacaaggccggtaaaccatcctcccctggagccttagatggattcatttcaagtacagctcgttccacttcatcctccgtaaagttcaacaccaaaacttcattggtcagagcatcaactctcggttgtacaacccccagcacctcctccatgtcttccacttgcaccctagaggtcgtgaagagccccttataatactgttccacaattcgctgaaccactaggctatctgtctgccaaacaccaaatgtatccattaaccccctaatctcatttttcttcctcctagccgaagccttatgatgaaaatatttcgtatttttgtctccccattttagccacatcgcccgacttctctgcctccaatattgttcatctttttccagcaccacatttaattgttgctcaatttgttttaactccctccactgctccggctcttggttcaaagttaactcgtggagcgtcctctttaacctatcaatccgctcattcatttctattttcttcctcttgtgccaactaaacagaactttccccactttaaaagttttttgtttaaaccttcccacagaggcttcggctcttccttctctccaaaaggtagaaacaatatcactacattcctcctcactacaccaagcctcttcaaaatgaaatctacttttccttcttccttgaccacacctttccccactcccctcacatggaatatccactaccaatgccctatgatcggattcccactagtccaatagttgaacatcggccccctcaaattgttgtagccactgaagattacatagagcccggtctaacctctccatgacctggctcgaattatgctcattacaccacgtgaaatcagacttgacagagcaaaaatcaactaattggcactcatcaagaaccttcctaaactcctccatcgctacggaccggcgaactcgacccccactcttttcagacaaactcacaatctcattgaagtcccccacacacagccaaggaccctgcgtttcatggtaaatatctctcaatagttgccatgagaaatgcctttggggcgcctcaggatgcccataaaaacccgtaagagtccatggcaaaaaatccttaccagctatatgagccacaatatgccccggagaactcgacacaacttgcacactcaactcctcttgccacatcaagatcaaacccccactaagaccaattctatcaactatccaaacattagttccaaaatttaacacctcactcaatctcacagcttggcttcgagtaagcttgctctccgccaagaaaagaatacccggtttaaactcacggatatgggattgtaacgctcttaatgtccaagggttcccaatgccttggacattccaacttaatagcttcattgctctcggcggccttgcagagcaaggctcgccgcttcatcattagaacaaggagaaaataaatccacaccagtagaaatactcacctccttaaactcattgtgcttctgcatatcagtctcggccacttcatattcagcattaaaaatgaattcaccagtacctcccactcgattcagactctcagcttgattccccacctcccccaccgctgccgaggttgccaatgagacccctgctgcacacgttttcggtctgttccttgccctgttcttaattgaaatcttccttcgctgcccctgcttcgcaccactccccagatccacggctccactctcaaacccagcaaagccatcacggctacaccccaaatcctccccaactatttgtttccctttctccagcccccgtcgagcccgatccctctcttcttcacaaatcacttttaaatttttcctttttttcatatcagtctcatcgttttctaattcatcaactcccacaggcctcttttgaaaacacttggacccatccctcatgtccactaaagaattattaaagcccaacccattcggcccatcagcacccagcccatgttgacgttcagttctcagtccactctgattatagtccactaccttagcagaaataactgcctccctattttcctggccagtagtcccacgatcagtagtgacctccccattcacacccgctccaataaccgcttctccagccgtggtggacaccgccgctggctccgaacccgtcaccatctccgttctactaacaccattcctatccccatcatttccaaggaaggcctcttcagtatccaccctcacatcaatatctacattgcgatgtagccgactttgctgaaatgcaatgaaacaattaggcattacttcctcctccttgagccacaccccatattttggcactaccaaaccatccacccccctcaccgttatagactcaccattacagtcatattgatcatggccccaagtgccacacttaaaacaaagtaatgggagtctctcaaatttgaactgaacccagtgttgatgaccaccattaggcaagaatcgccccacgaatatactctgttgcaatgggaatcctattcgagccctgacatatccattcagaaacattctttgctcattattccatttcaactcgtgtaatgtcccagccatctcagctagcctaatgacattcttcttggtaaatgccttcaacggaatgcctttcatccgcacccagcagtacatcttgtctaacttggcatcacgccactgtcccgtatcaggccaatcctcaagcatcaaaacaccaccattaaagatccatggttgcttgtccacaacaattctagcatcctctcttgacttcaaggtaacaccaacataaatactatccccttctgcagcaagaactttcacttcccagtcagaaatgcctttccatagtcgagtaaaaatcgaagtaaaacgtctctctttaatctcctgcttcgaaataattctccccacgaccgaccgtcccccaaatgaagcaacagcctcttcattctcttcccagtcctcctcagattcaacacccaaccgacttgtcatagagacaatatcttccacttcatccgattggttcccgatcaccataacagccagcaataaacaccagttaaaactccttcttagtcccaacgactattcgctcagagcagggtcctctcgaccataaccatatatattttgccgaatgagatgattgtacaaaaaaatattaatataactatcatttaatgacaataaattagacttttatcacataaaagatcaaatgaatacataataatactaattgccttgaaatttaaaccgcacaactatttgtatatatatgctataaataaaaaatatccgatattatatatgctataattacaattaaaaattacataaatatactaaataatagaacaagccttaaaanntcaaaataactaatatcatgaaaaaaaatctaatgctagtaaaatattaaatcaaaataaagatattctccaacagatcgctaatattaaaagttataaattgtcattttaaaaaaaattgaaaacacagctataaaaagaagaaaaataataa

SEQ ID NO: 14747 - DNA, 4064 bp, Cannabis sativa
gaatttgaccaaataactacgtatgcatgtggacaagttattcttcaacaatcttagacgaaaatagataatttattcaaaattttgtgctagtaaatagctttgatgcaaaaccgagtttggaagcttgtcatatgttgtaaatagtgtctaatgttatgctcattttaaactccgttctcgctcttttgtgattctccgttttctaccattttcccccgaaagttaggtaacaatacataacaaaagacaagtaattgtagccttgacttgtagatggtatctatgatcttggtgtcttgtcttcctttctgagttgttatttaatgctgcttcaaatattttttcgtatgcggggttacaggacgttgctgtgaagaggttccttgaccaagatatttcaggcgaatcactcgtcgagttcatgaaagaggtagagcctacttcattttccttagtaaactaaacatgcctttcttcatcattaattgcatgttttgtatgaatttgaggtatgatagtgttcgtgtcgataatatctaaaagaatgtcgccttgcatttcgatagtgcataaaacaattatcgttttgaatcatcatacgaccatgctatgattggattacttattgaaatgatcttttttttcttcgttaaatgaaaaaggttcgaataatgaaaagactcagacatcccaatgttgtcctgttcatgggcgctgtgacacgaactccaaatctttcgattgttacggagtttcttccaaggtttgtttgcactttgtctgtcttagctcaatctagttattatataatcctctcttgttatgaagcattgtcagatgaattctttgttattgttgttgactaaatgttattagaccccctgaaaattggtgtaccgatgcattcctttgtgtttttgatgtttgaatagttataatttcaatttttatataattgagtatattataattattgaaggcatactgcaagattttgagaaatttagaagaatttacaatataaaaagtaaggttcgaattgtttatttcgcattgtacagaataaaaaaatcacgcttgtaacagactgcttaagttttattttcggtacgttaaactattttaaatttatcgaaaatttcgatgttttaaataactataatttaggctgtcatataaaaaaattacgcttaaaactatctagatgtcaaaaacatgaaggagatgcatccatacactcgttttgaattttgtatcaatcttgtatattgtatgcgcgctttccccccttttggacgtataatcaactctgtatgataccaatacaacacgagataattttatgcttgttttatggtttatgttttgatctcgatgtcgtgtcctacgacccctcgtgctgatagcttacaatatgtgtttctgttagtctttgagattgttactgatcatgtcatgccaaaatctgaaacataattgtatttcgcagaggtagtttatataggttacttcatcggcctaacaatcaattagatgaacgacggcgtttgagaatggctcttgatgctgtatggttatgttgttcttttcttgtatcctaatttcaatcaaaatctgtttcttatactaaactttgtattcactaatttgtcgttggtgtaaccaactaacttgtcaggctcggggaatgaattatttgcacacgtgctcgccagtgattgtacatcgcgatttgaagtccccgaatcttctcgtcgataagaattgggtagttaaggtagttttctgatttcttttgcaagataatttaacatgttatgttttcaattacccgattttgatgtaacttttgtacctgccattaggtctgtgatttcggactgtctaaaattaagcatagcacatttctctcttcgaggtccactgcaggaacggtaagcctaagccatgcgaccaatttgctcccgctctttctcgttgggaaccgggataatatattttcaattatttaatttaggccatttaagatttttgtccccgaagtattactattaccaaataaaaattctttccgaactattcacagtgctaaaatgggcaatttaaaatgatgataaagctcgggtgaatttttcataggcacatcaaccgtatcagaattttgttagccacgtgtgataaaacttaacaaaagttttatatttcaacactgttagtagttcacgtgaatttttaataggcaaaataatttagagggcatgatttggtaatgttaatagttcggaaagcaaaaatcgtaattatgtttcccattggatgaatggaagtcttgtgacgaaacttgaattcttgaatcgacctgtaaacattttattcattaattttcttgatgaggatcaaatgctggcgaaaagagcctgcaactcagactagctgtcttaatgacacataattcttccttcttttatgtcaggctgaatggatggctcccgaagtgttacgaaacgaaccttccgatgagaagtatgcttcgttgtttcttactttacacggcgtgctttcatttatatattttgaattgaaaaaaatatttggtttgatgtgtaggtgtgatgtttatagcttcggggtaatattatgggaactttctacaatgcaacagccgtggggcggaatgaatccaatgcaagttgttggtgcagttggttttcaacatcgccgtctcgatattccagacgatatggatcctgctattgcggatatcatccgaaaatgttggcaaacgtgagtaaattctcttgaatcattgcatatactagtaatcgattccttgtttttgatcgttaaatattagggtgtgtaatcatttagtaacttgcgttttatctaaatacaagtttagtacagtgtttttaatgatgctaatctcgtactttgaactcaaatttgatcaattaaattttgtcaatacgatcagactgtcttcaattatatgagttctgtgaagccaaatttaattatttaattacatataaccgagaacagtttagtcgtaccaaacatataacaattcaaactcatttcatattttgtagagatccaagatcaagaccgacattttccgagatcatggcagctctgaagccgttacaaaggccgataaacaacagtgcacaaattcctaaacccggtgcatcaatgggacgtgagagagttcatcaacccccacgagtttcggaagaacctaccgactaaaaagaacaatttttttttcttcttttctttttttccttatctgactgaacatgggttttgttccaaccaagtaatgctgagtcaatttgcaggttgtttgggacacaagtgagaaagaaaatgtttgaagatcatatgagataacaaatactcaaaatttgagattgtgattcttttttttgttcctttgtattcttactagggcatccattctcaagggtgtgcttttcaatgtaaaaaattaaaaaaaaaaaaggaaaaaaaaagttcaaatgaattgttgtaatccatgtttggaatttttggtgtctttttaaatatttcttagcaagtaatgggaataatgattgagaaagaaagagagtagtgattttaataagtttaatgttgttgaacttaaaataaataaataaattgtaaacaaattggacttagatgaaatttcttgacgttattcgtaaggaaatttagatgatatactaacttttgctatttttttataaaaatactgttaagcggtattttttacttttttactgtaatttttataagttttatactgcagtatactgtgttaagttttcgctggtgttttcttgttgttctactgttgttttaagttgttctactttgtgttttaatggtgttttaaaaaatacaatatttttaaaaacttttccgtgtgacagtatttttgtaaaaattaactcaaattccagtatttctgtaaatttccctattcatattatatacatatattatgatgttataatgtagacaatttaagatgtgtttttaatactaac

SEQ ID NO: 14748 - DNA, 2368 bp, Cannabis sativa
agaacaactcaaaacaccagtagaacactagtaaaaacttaacacaaagcagaacaactcaaaacaccagtagaacactagtaaaaacttaatgcagtatactgcagtatgaaacttataaaaaatacagtaaaaaagtaaaaaataccgcttggaagtaattttgtaaaaaaatggcaaaagttagtataccatgtaaatttcctttgttttattataaaaacagtaacaaccaaaaacacatattaagaataagaataaataggattttgctctctgaactattacgcagagttttgtccctgaattattttattatttatttattttttggtaaaaaatctccttgaattatagaaattcttatcaatttgtccttttaattgtcttttgtttataggtgttcatggtttggtttggttcgaatttttatttttatttttgtaaaaaccaaatcagaccaattaaatacttaaaccaaatgataccatttcacttaaaaacatatttgtttagtttgaaacagtagttatgtggtttggtttggtttgaactacgagcgaaaattttaaaaccgtgattgaattagagaattataaaaaatcaaattgaccaaattgacaccagattaattcggtctagattaattggggtttagaacctcagattgcagattatatgaacaaacctagttttgttcatctttgcaaacaattttctaatgtaagaaagatcttgtcgccaaactactataattcagaaaatttgtaattattttcatagtttgtggtgaaatttgtaaatttatccgggccgaaattagtcgagtactgggctcttataaacttgggcccaattgttagggcccaagttgaggcaacgttgtggagaatgggtggtagtgaagtgagtccatcaaaatcctggttcgaaaagcacaacggcggcattgctgagctgcaaccctttccagggcttggaccagaacacaagtctcgagccgagtctctttgctgagattttcgtttcatactgtaaaccaatttcatagtggagtcttctacggtaacccaccaacacacttgaagccatgactactcgtatagcgccgggagttggagcaaacttgctcggccaacactccgccgagaggaaccaagatgccactgcttacgttggcaatctcgaccctcaggtcctcttttctcactcttcactttctccgcatttatattctttatctattaattatatatgtatatagccgttctgcttggaagattctagggttttgtcttgaattcaaatttcagtgtttatttctacaattcatgtaggtttcggaggagttactatgggagttattcgttcaagctggccctgttggtatgtcatcatttccttttatttcgaagtaattctatatcattttgatgaaatgggttcttaaagtttgatctaatctttattgagttttcaacctttcaattttttgtaataataataataatggtacttagtctttgcataataggcatccattgtgtgtggctttggttttggaatagattagtactactaacttgtcctgtgtaggaatttaaagggttcattgctttttgttatgtttttttttcagttaatgtgtacgttcccaaagatagagttactaatcttcatcaaggatatggatttgtggaatttcgaagtgaagaagatgcggactacgtgagtgatttcgatactattttgctttatgagattttcaatgcttatgctgagacttgatcaactttcatttatgtatcttgctgtagttaagaaccttgtttttattatgttttcgtgacaattgtacaggcaatcaaggtgcttaatatgattaagctttatgggaagccaatccgtgtcaacaaggtatttgtttttcttttcctccaaaggttacttgggtcttttactttcgtatgaatgtgtagaaaattatgcaacattggtaaattgtatatgtattttttatggctataatagattgtgtgatttgtattgttttaggcatcacaagataaaaagagcttggatgttggagctaacctcttcattggaaaccttgatcctgtaagttagttagacaatatcagaaaaatggattatatatcatcattggcattctcgttttttacagattcttatctttttttctggcaggatgtggatgagaaacttctttatgatacttttagtgcttttggagtcattgtcactaatccaaaggtactgcatttgtcttttgttcatagtggagcttccttttttttttttttcctttttcatgtttcattaaaaagaacataaaatggatagagac

SEQ ID NO: 14749 - DNA, 2116 bp, Cannabis sativa
cacagcaagaagaatgactaaactatgttaagagattttttttccaacaaacctttggtgtgccttaaatatgaagctaacacaacaactatggcaatggagaaacagattgattcaacttatggtgccttagatgtgaagctaacatgtaaaaaacacaccgcaagaacatctcgatctgctgtcatgttgtttcttgtcatttcttctgattatctcctttttcaaatatttaaagaaccagtcaaacagatcgtggccatatgcagttttttgttccacaatatttatttagcagatagaaggaaaagcatgcgcaatcatttacactaattttgtttactcacctaattgtaaaaaaccaggcatcattccaaacaattaattttgtttccataaaatattaatactaacaatgactaaactaaaattttctagctggtctagattacatgaatgattatccccaaaatcattcaaaaccaacaaaggtgaagcaaagttttcattgcagagcataaatggccagagaacttacaataaagaatttcttgctttaatttgagcgcagaaaatgaatagcgccatcttttaagcgtcttacaaatttcatcctcaataggtcttgttatgtcctaatcacagaaatcagaaaaaacatacagctaatgtaagacatttatttagaccatctcatgtggggtaggggggaagagtcatttcttacctgataaaagccagatatcaacttaagggaagaactctcataacacctaaattttgcatgaagtaattaaatggtgaatttgattttattccaactagtaaacagagaacatgaggaacaattaccagttctctagaacctgagcaggcacctcgacaaagtctggatcataacccagtccagaaaatcttgcaaaagatgcacgattgcatacatattgaacctaattcataagaataaaaaatgatgctcaatgttacaaaccatttcaccaaagacattagaacatgccatagtttcaatttattggtaaatcattgaatacaatttgcagtgcttaagtaaaatcagtgaaagaaccagtcccagtactaagaaaagaataaagcttaccacatggccaaactcatggaaaaaattaaccacttcagagaatcgtaacaacccagggtgtccatccacttcctttggaaattgagatattagtaacaccaccgggatctaattacagaagcaggatagacaaattagatataaaatccatttattagaactctaaatatataaagtacccttcaattcatgatacatagtatgtcaactgatcacctaagactaaagcaaaaattaaaataaagatacaagatattgcaaaggaaactctatgacagactaaataagaccatgaacagaaaaggttgttaaagacaaataaggggagatgaggtcgctggtcataagttcataaactattatcgaactcgaaatgttttgtaaccataaagtaaaaaagttataacttatacacatcatcttttcataatgaaaacacaacctggcgtatactgctggatgataatgcaccattttgaagacccacaacacaagtgtgattgtattttccttccctgtttaaataagcaacatcagctcatctccccaaaattttgattaaaacacacatataacaacaaaaggaatactcttgaaccttttgtacatatcaaggtagaaataacccataagttcacttgagcttgaatcaaaaactgaaaatacacgaacatcaggatgccaaatttcagaatcttcaatttcctcaaaccttaaacctgcatttaagatagaaatcatattttcagttacattaaaaacaataaaaatcgaccaagtatcatagagtaagacaaataaacttaccaaataggtcttggactattttaaaaaccccaggcaaaaccaaagtaacaggaaagtattgcttaagagccccaaaatccaaatcaaattcttcctgttggaccttcttgacatagtaaagtaaatcctcaatcccaaatggaagatctccttcctctttcctctgatgtcacataagatccaaatgaa

SEQ ID NO: 14750 - DNA, 8807 bp, Cannabis sativa
tagtaaagtaccacattttgctagacttaaaatcagagaaaaacctatagatatttggataaaaggcatggccatcaatcaagattgccagggaattaacatgcacatatacacacaaacccgaatgagattgaattagagacctacaaactaagccaacccaaaacttgataaactgatttagcttgattcataggtctaagaaacttggaacatgaacacaatcaatttataggttcagtcagttcaagtacctgtgactcccttgcaggtcttgatagactcgaaaatttggcttttcacaacataaacaaattatcgaaagaaaaggttgaataaataatactttaaagaaaagaaaaaatatcaaacctactaacttgaatgtgctaccagtaacaagctaaaaggcggttctttacaacttttgcaatgatactacttttcagaactgactaccaccatgactagtaatttcctattcatgtctataagatgaaaaaggaaaaaaaaaactaaaatatttgtctttgaccataaatattgccacctctttcagaattgcctgtacagattcttgtggtttcttccccatgtggcttattttgatacaagaatagacaaatgatagtgaaacatcaggatttaaacttgtgcttgaaaataagctaaatgttcaagctcaaaggagaatgttcgctatgtcccaagaaggacccaagctagtaagtctgtcctttgtacagtttgcaatttaacaaggttacctatgagcggttgtatgcggcattggatatggcatgggacccatgttcattggagcaccaggaactacagttccggctacaggtgctctaacaccatacgccatttgtggaggggcaggaagatttactggggtgccaactgctgatacaaggggccctattggttgtccaatagatggtgcgccatacattccaacccctgggggcccaggtggaggttgagcaggttgcttggatggttttccagagggccctccggcagaaccattcgcttgaccagtgattggtccttgaggtccagcaatctcgccactgccaacactcgttatatcgtgaatactagatcgcctcctgtctttgttcatagaattcaaacgtatgaagtacttctgtgcatgacttgcaacttgggtaggtgttctcgtgacaacaaagttgcgtgatatactacgccaatcccctttcccatatttatccaaacccagcagaaataatctgtatgtcaagtagagaaaacatcattagaatgtcacacttaagcattgaatgtctcgttggtttggttttgtttcaaatatttttaaatgtttttgatatagcacttgttgtacaacatcattctacagtgtcaatattgaccgattcgaaactctcaaaggaaaccatccacaaagtagttccatctcttgaaatacatcaactaagttatgaaacaggcaatagtgagaaacaagcaaacatatatgtagaagaattatgtcgcagctaaatgatataaacattacaaagaaaaattcaactaacatacagtctatttgaattccaagcatatcctaccacaatgacaactcccatcttatccatatccaatacttgagtaaacaccttattatcttctttcttttcttgttacatctattatatacagacattgctatgctagagatttatctatcaaactctagttataagttcactcaatacacttaaactttgatatggagcaaccaaaacccgcataaaattttcacaacagccaaggctcaaaactatgcaacaaatccattgataaaactaggagaaacaataacatcattcttatttagatgcttttacaatgaaaatgaatatgagcaaagcatacaagtgataatttatcatataagcatagcatacatgtaaatggttatcatattagagcatctacaaccatgctatctacacattgtgcttagtcaaaatagttgattatgtaacatctttctaaccccagcgactccctatactattagctgtttgcttgaataacactatccaaacaaaggaaaccagacaatcctgaaaagaaccactgttattatttcttcaaacctattccaaaagaaaaggaaaaaaaataaataaacaaacaaacaactagtgttttgcttaaggaaagaggataacttgaattagaggtggggatccaatcaaatccaacatttttcctctaatccgatccaatctaatcgaatccaattagtatcgattttttaattggatttcaattcaacacttaattgttaatattaactaaaaaacatttacaaaaagaaatacataaaaactaaactatcctaattttttttaatcaggtgtaataagatatataagaaattaataaacaagtaaaaattaaatattgttttattatatataaataaatatagtattttttttaatatataatatatgtaattagattggatcaaatcggtttttaattggattttgaaagtatcatctaataactgattcaatccaattaaaaatccaactattcacatccagtccaattcaattgattgttcaactttttgtaattggattgaattggttcggtataatttatttagtttagatcctacgtttgaataacaaaactccttaaataccaaatcttaaaaccctaacgctatgtttggcatgagtgattttttggtggatatagaggttggaaggaagggacagatacattgaagaaaagatagaaacaaaaaaaaggcacccccattgccaacaaaactcaatcaacattttggaaagatgagggaaacaaacgaaacaaaagttttcaaataccataattacccttcaaactggttaatagataaatatttaaaagagtattgattgtgacacaacttttaataatattatactcggcaatgcgacatgtttataaccgccaaaaaatatcagcgatggccaccataaaaacataggtggcataaaattgttttacacaagtgtgtaaattttgagtactaaaaaaattgcccctaaagtcactcattatttcaattaactatctcatatctacttcaaatacgaaacaacattaaaaaaaaagctactatacctcctccttaccaaccttctcttataccaaacatagcctagaaattgctacagtccaagaaaccagctcaaatagatttgactattttttttccaggaaatccacaacgacatgcatacttccaagtgcagttaagtaaatgggggctttgatggcctcaatgttctatcatttcttctccttaaaatccctacacttctagaccctttttgccatttctatataagtttgttcgtgtctaagctaaaaattaaaggatcagccacaaaaacatcaaacatccaaacaaaaaatttaggtcagtaacacttgctacttaactttctatcgaaatccaggtgcagatgtcttttcttactctcaaagcataatgtctcttttctgtctgattaatacctcaatctatcagtagtgaaattcaaaaatgtaaagaatccactttattggaataaaagtattttaataaaataatttccacccactgaggaaaagaacaacgaaattatgatgtcacattcacactcccgaacctatcatgtaaattgatacaaaatcattcaattgtgtttagcacatttaaacaaatgaccccacttttcgtaattaatgacacaagaaatagatatacgaggtaatggaaataactagaaagaacagaaaaaatctgaaatcccagaatttcacaagacagccagccaaagtattgcgcttattgattgaattgattctatagttcaaaacaaatacttgttatgttatgcctctcatctataacttctacttaataaatttgttctccaaatcattttgatataaaaaatttagaatgaggcatgttccctgcaatgggagatagagcatcaccacagcaatatacagttaaacagtaaagtttggatgtataatgttcagttataactaaatgagtaatgaaagctaagggaaagtaaaaaagacttgaaaggtcttgtttgattcataaactttgtaaattgtaatgtttcctattctatttatgtagtctgactgccatgctgtagaaagtatatattatttggtcaaaagtccaagatgataacactgataaagagacaattattagctagtcattaaaagcacttaagagctctatgatatctatgccttcatcaagcactgcaacctaactacctatcattaagccttcatcaagacaattattagcatgtgattcaaatcacaaatccaaaaggctatctaacaattactgtttcacaaaacacaataccacacagcagttcactgtataacctttgagcttagtgactaaacactaaattattgagatgtgactgttgaagctgatgtaataaaaagcaagcactgaaacttaactacctcttatcaccagatagtacttcctttaactagaaagcaacttagtataaattagtggtatgggggggaaaaaacttatgaccctaaaccagaaaaggggaacttttaacccagtaagatacagttggtgtaaactctatataaggcaataagaacacaaagacaatcatatccttcaaaaagagtaaatgactttttcaatagttttacataattttctagataccatgccatataacatatttgaatctagaacaataaatttacctgtgctcttcctctgtccacgcaatccctttacgacgttcctgatctgatctagctttacttccatggttagattcgctgttaaattgcccactatgtccccctttcttactagctccttcatcaccaacatggctcgatgaaccctctgaagaagaattgtaggaaggtagaggaacacagccagattcaatctggttaacatcttcaaccaagagctcatagtgatgttgaatttcctctgctgttttccctggtacatcagccgctatcttctcccaccgatctggacaatcctcaggatgagttgccaaggaattctcaaatgctttatcctgctctcgagtccatgaggaggtactaaccccttcatctacagtcatctagccttagttatattcactagctggtgtagtacccacagaaagaaaagggaaactctgcccaagtgctcaataatttatgttaaacccaattctaaaacctcgagttgtctgaaatcgtgctaggaaattggatctaaataaatccaatactgggtattgttgagaacaaaatttatagctggctaaattgtgggaggcagaattttactgaatggaaacaaccagaaccagaagatgccagagtagattaaccagagatcacttccaatgaaaaacacaaagcatggtaaagtatgtgaaggtttcaatggtgatttgctccataattcaaaatttggcttcttgtgaattgctgacctatagatgaaccaaaaggcaacaaagttctgttaggccatgagaaatatctgaaaaccataaaaataaaaaggatgggtgcaataaatgacagtttaaaatgaataaaaggaaaattaattttgggtgagggtaaaaatctgtggaacggtaattagggtttcagattgtgaaatgtgatgatagagaccattgagaaatcaaacaaagatgaaaacaataattagaacaaatactgccattactattctaaaaaagaaaagcaaagaaaaaaaaaatatcagtatctactggttcactgataagtacagttctaaccgtgaaggcccacaaaaattaattctttccatttcaaccacaatttgtagtatttacagtctcttcatacatacaatacatgtagacatatacataggctctcaactggtaaaagcaaaatcatgccagttacaaactaaatttctaagtaaaacaaagagcatgagtaatgaatataatcaagtaatataatgaaaaggattagctagtgtcaatttgaataaaatcaggaacttaaaagcatttatggcagcactaaatttagggcaaaaatctaatatcccagccatattatgaaatccgtactgaaataagttcacttcatttccaaccaaacacaaaacttaaataggaaggtaaaacaaagaaaagattatttggtatccagccatagtaattaaagagaaaaaaaaaatacccaccaggcctattcatgttggttttcatacccctgagctatgaagtgaaaaaaaacaacgacctagtttagtaattccccaattttcatgtcttgttttggaacaaacccatcaaaagcggcacgaaattgataaaaggaaaaaagaaatgctttttcacctaaattcctatcaagactatgacagtttagccaatcatcagtgtaagtttcctattacaaaactcttatgttaacacattgaattaagggattaagtaaatcctaaccttgagtaaacaagatcttactccaccccccactctcttgtttgtctctatctatctagatataaatatatactcactataaaaagtagaagagagaagatttaaactcaatcacaaacagccaagttaaaattaatagtgcaaacctcaaaagatcaaaggaaaattagttgagaatatcagtaagaacaaattgagatactcagaagtgaaacaaaactaaagaaatcaagaaaataatagcaaaaaaaaacctttaagagaaaacaaatttgggattaggaaaaaacccaaaataaagaaacaaataaaaattgagaaagggtagacatagaaattatggctgatgttgatgggttatcctgaaaatatcacaaagaaggtgcagagatgggtcaaattggtcccatctccaacaactacttgcaacaaaaaacggacagctgggattgaaaaaggcttcaacccaagttgccaaacactggaatctgaaagaaaaccccattaatatctgacacataaaaccatcaaccaaaaatatagaaaaaagaaaaaaagttaatggtgggcgtgcacagacaattgagtccctctttcaaattcttttcttttcttttcttttcctttattttctttccatccaaacaaacaaaaccccatattttgcattagatgtcaggatatgagataactatgttcagttgcagaggaaaggaaacgaaattcacccgaacagaataacataaatacataaataagtgacatgggtttatccggaaacaatcacctttttttccctctatcatatcatctgctgtgcactgaggcaatcatgcccttttcattttgtgttgctgtctttctctttattcttcagttctcatagtctttgtactagtagaaattatcacccggaccagagaaatacatagattgataattgattctttcacttgtttatcttagagtttttatataataataataataattcttcttattattattataattgttattattattattataagccccaattattcacttcatttatactccttatccaattttcttctctctttctttttcttttttttttccttaaaaacaaaaaatatgtgtatattttcaccttaattcccctaattcttttttatcaaattaattctcctaattttactaaaacagtatctattcttagatttttatcgaatcttgttattaatacggttgaatttgttaaaaacgacaaccttgtattttacttgaatggagatgtaaaatattcaagtaagtaacccttttttctttgggttacagtagcaatttcgggttaaaaatatcaactaagagtgaaagtgactagctcatgccaatatgccatactaataaaaaatttcaacaaaattatgttatgcaatcataaaaaaggtttgtttccttctttgatatatataaaaaaaataaaatataatggaattaatcacagaaaatttggtgtgtgtttgagaagttgccacgcttgaaagtgaaccaataatgatgcaacaaatcagagctagttaaagggttcacggagttgagaaaaaggcataataagcacatgataactctgaatctaccataaatatttaatgtattatttgcctctaactctaagcataagcatgacaagtttgaacgctttattaaattagtcaaacattatgattacataataactcatcattatcacacttaaattgtacaattaaatcaaacattcaatagataataataaaaacactctaaagtgtcatctcatgtaacctaagtacgtactttagttgttttgtagaaacactaatagtattttttttgcagcacaatatttttttattattattttttatataaatcaagcataattaatacaaccaactctaaaagatttttacatcacatactgaaatttttaattttttttaccttttaactgtgtagaatttttttcaaaaatactgtattttgtgttaagttttcactgttgttccagggttattttttagttgttccactattatttaattgttctgttttgttgttttacgattattttataaaaagatagtatttttgtaaaaaaaattcatttaacagtaaaattgtaaatttttacctaatttctagtatttttgtaaaaacttcaaaaaaatagaagaaaaattttatttacaccccaaaaatttttaaaaacaactcatt

SEQ ID NO: 14751 - DNA, 10630 bp, Cannabis sativa
  modified_base (3338)..(3343): a, c, t, g, unknown or other
tgacattccaacacctccaattccctcttcctctattagtgtaattaatattgtttgataaaaattgtaatggatacaaattatgtatagaaaccaaattagtgttcctgtgtttataatatgcttttgtatattatataaatatgctggtttcaatagtaatgactagctaatttgcacacatatatgtaaaatttataaatatactagctgtttatcattcagcataattttttaatctaattttgttttattgtgtaaatgttaaaatacatgaaacattcaattcaataagtgcactacacagtaaaatttgatacaagaaatgaccagttaatttcatattaaatctggtgtgactgtgagtgacgatgaatcttcaatgaagctattccctggctctggttttttaacatgccggtccttcattgaatttcttacactgataactcggttccactcccctgcacttgcatacatgtttgcaagaagaacatagtcactgctgtgatctgggtctaaccttaaaagatgttttctcacctcctttccaagcttcacatcaccatgagttcgacaagctgcgagaagagttctccatatgattgcattgcattcaattggcatacttataatgaattggtaagcctcttccaacaacccggctcgccccaagatatcaaccatacatccatagtgtttcattgttggtttgatgttgtagtctttagtcataatatcaaagtattttctaccttcgctgaccaacctaccatggctacaagcagacaaaactcccaagaaacttacattgtccggtctctcaacttctaacatttcggaaaacaatgacaatgccttgtctacatgaccatgattggcaagtgcgagaatcatcgtgttccatgatatcaaattccgcctcttcatcatcatgttgttgaatgtttcatacgcttcttcaacagctccgcacttggaatacatgtgaacaagtgaatttgatactgaggtgatatcgcgaaaaccagttctcttaatataagaatgaatccatctcccgaaatctaaggctcccaatgcagaacatgctgagagagtcacaataaatgtagcctcgtcgggttgtgtaccactcttgagcattctcaaaaaatgttccaaaccttccttgtgtttttcgcagtagacatagctatcaagaactgtgttccaagaaactaaatctggattgggcatttcatcaaacagtttgactgcattttgaatatctctaaacataccatacatatgaatgagagtgttcctcacaaagacatgagaatccaaaccatgttttaaacaagaacaatgaatctgcttgctcaaaatatctgatctcaattgctcagaaaccttaactaagaaagcacatgtgaaactatcaacctttccacctttttcttgcattttcttatacaattcaaatgcccttttgggctgattagtcttgccaaatcctctaatcatagtattccaaagaaatccatctgggttttctacactatccaaaaccaataaggcataatccaaatccctgccttggccaaccgaacaaaactcaacgatcttgcccataacaaagaggtcttgttgaaacccagctcgaataatgtgtccatgaatttggttcaaatgtttcatggtggaacagagcttgaaaagggacatgacccattgaagtttctcaaaaacagtgccatttctactgtgaaaagcacaagatttcagtttcgaattttggcgggtaataaggtgagcaatgctcaaaacaaccaactgaaaagttgtcttcttggtcctgatcatggtatggtattctcaatctcaaacatttctctttaatgtattatgctgcaaataataataattgatacaattaatagtggaactttacatatgaaataatttgatggattgattaaaacgaataaacctagtttaatctttatttatcttaagtgattatcacaaacaaacattttgctattagaaaaatgtcatagaacagactatttaattttaatcgaaaaaaaaaaaagactaaaccggaataaaatcacaaaaagattggaagaattcctaacggtttttttagtatctaaatctaaataaacttatggagatattattggggctacatagacctatcgtcttcaaattttatcgctttccaacaacaaaaatacatcgagcctatattaagctgcatcgaattaggctaaaaattcaaatttttctcaaaacacatatcaaaccattgtgacgttaaatttaacacaaacttaaataaacatattaataattttatatattttaactctaaatcatgcacataaaaaaaaaaaaaaaaaaaagcaatacaatggagaagctgtggttgatagagaaattattaagtatgtgggtcgttaggttcacggtggtcattagattcgtgagtcgttgggtttgtgatcgcagtgcttatggagagaaaggaccggagttgtggtatgtgggtcgagttcttagagtgagttcaaagagcaagagggagaaggaaagaagagagagggtaggtgtatgaaatagagggatagaattgattttataaaatgttagtctataataacttaaatttagaaaaataattttaatcaatataaagcgaaatttctttataataactatttaatatttaaaataagtcaaaatttttattttgcttatatttttagttataaataaaaatgaaaacttaattaaatgaggtaagagtaaagaccgttacaaaaaaaaattatttttacactttaaaaaattctttttttgtatttttatgggatttcacacagaaatttctatagcaactaacgtaacaatctaaatcacgacgaaaatccgtttagcaactcacataaaaattatcagagaaaccattaaaacaacccaaaccgtaaattttgaaaaaaaaaatagcatatgaaataatttcaaaaaaaaaaaaaaacgtgtttcttctgcatttttattttaaaattaacgataaataaaattggataaaaagacaaaatacaaaaaagcctataaataagatacaataaatttatttatttgaaatggataaaaaaagaataattgcataaggcaccaatttttataaaaaaaaaaaaaaaaaaattacattttatgaataacttttaaataacatcaaaacaacaataaaaaataacatgcagataataaaaaatcaacaacaaattaacatcaatataacataaaagaatcctattttctgtaaataaaattacaaaaannnnnnaaatatttaaaattctataaaaccctatgtttataattttttttttttttttcatctgggaaattatcccctttttctttagttacgtgtattgacctattgatagggaaaaaaaaaaagaatgaccatacaaaaagacaaaatagatgaattaaaactaaagatgtaggttgagctttatagaaatgctatttgattttattctagccagctgttcattctttttgctagcaagttgacttttcttttagcttgtttgtccatacatatgtaacaattctttttagcttatttattgtatatcagtgccaccaatgaatcagtccatgaagagttatttcttcttcacagcataatatatagttacataaacaaaactctcagaactctatacaccaaaaatgggagcattaacattagttttcttcattcttatagtgactaaagtctctatagtatttgctcaacaaagagacaacaaaatcagcttaggctcatctctcactccaaataccaataactcatattggttatcaaaaactggcaagtttgcatttggcttctacaaaatacaaaacaatggctttgcagttggaatttggtttgagaaaataaaccagaaaacagttgtatggacagccaatagggacagccctccattgtccattgatgatacactgcttctaaacagtgaaggaagacttgttttgctagataaacaaggccagcaaaagtccatcattgccaattccactgagcttgcagcctcagcttccatgctcgattcggggaattttgtcctccacaactcaaattcaaccatcatttggcaaagctttgcttatcctacaaatacccttttgccaaggcagcctcttgtggctggaaaccagttagtctcatctgtttccgagacgaatcgctcctcaggaagatttcggctattgctgcatactaatggagagttggggcaataccctgcagtgtatcaaggtggatctttggctgagcagcagtactggagttcagacactgaaggagaacatttgagtctgaatcttgattcaaatggccattatacttagtcaattccacaggttttaatgtaatgaatgttgttgaagctagaagtctagttatgtgtcgtttgacaattgatgttgatggaatacttagattgtactctcatgatatggctcagaacagcagttggttagttgtatggagttcaactagcaataagtgtgctcctattggtttatgtggcttaaattcatattgtgagcttgttgatcaagagccagtctgtttgtgtcttcctggtttagactacattgatcagagcaagaggacttcaggctgcaaaaggaattcaacaatggaggactgtcgtaaggaggtttcgatagtcgaattggatgggatgagatgggaaccagactcttatgcagtcatgccattggtggacaaggaaacttgtgaaaagagctgcttgagagattgtacttgtcaaattgctttttctaatagtgaagggtgttacaagttcaagtttcccttgagattttccaaagtggggagaaaaggctttgacataacaataatcaaggtccataatggaagcttcactaatgaagactcagatcaaggaatcaaacaaggtggaagtggaagaagaaaggaaatcttgatcattggctttgcttgtttaagtttttctttaagtgtcctactattttctctgttccttctctgcagaaaccgttacaagccttatgacaaagttcctcataatgcaatagctgatgaagaactctctcagaggtcatttacttaccgcgaactcgagcttgcaaccaatggctttgctgaaaaattgggcaagggtgcttttgggacagtcttcaaaggaaaattgtcatgtggggagaaaaccattgcagtgaaaagactagagaaagttacagccgaaggagaagttgagtttcgcaacgaaatgagatccatagcaagaactcaccatcgaaacttgcttcgtttgcttggcttctgccatgaaggctccaacaggctgctagtttatgacttcatggttaatggttctcttgcaaatttcctctacaactctgaggtgaagcctagctggaatgaaagagtttgcatagctcaagggatagccagaggactcttatatcttcatgaagaatgtgagaatcaaatcattcattgtgacataaatcccaacaacatattgatagacgaaaaccattgtgctaagatcgcggattttggattggctaagctgttgatgcctgatcaaacaaggacaatgactggtattaaaggaactagaggatttgttgctccagagtggtacaagaacatggctataacagcgaaagccgatgtttacagctttggaattgttctgttggttgtcatatgttgtcgtccacatgttgatgtcaatgtgcctgagaatgaagccatcttggtagactgggtttatgagtgttttcaggctaatgaagtgggaaatctagtgcaagatgaacaagtagacgagcatgaattcgaaaaaatggtgaaaattggactgtggtgtgtccaagaagatccaacaattcgtccaggaatgaagaaagttatggccatgtttgaagggtctgcagacattcttgttcctcccatgttcacctcttacagcagtacctcacacatcttaaccagttaattttttttcaaacatccaatcatgtgtactatatttttgtttccatttaagttcctttttacatgtcaaatgggttgtggatttcttttttctttcttttgaaaactgtcaaaaataaagtacgaattcataatagccttacattactggtttgtggcatttgtgtttattaaatggtcagttttgattcagaaccttttaaagtcttgttttttatttagtcttcaagtaataacttgttttcttgtatttgtatgactatttgagaaaaagatggttaatttaataaattaaatattggaattcaagataaagtattgtcaaaagatgcaaaaaaaaattataattcatgtgaaattttgtttaaaatgtgtgtttgacctaccccaataacaccctatccttggctttagctaagcctaaattacattaatgtttctaattatattttattacaaaaatatgatgctagattttagtatatatacatgctgagcctttcctcaagaccgggttttgctccaccaaaattaattagatttatttttgtcctaatagcaaataaaataattattagttttgttagaattctataatcaacaaatgtttttacattttccaatgtttcattatcttaaacagtctgtgttctgatctgtcttatgttgaaagtcaaaaatctttcattcttccttattataaaacaatagcagccatgtaatggttcactactatgaaagaaccaatttttaattgcatttttataaaatatactacaagctgtatggacactactagtttaggaattttcttcgatgtaaagatattatttgatgttatcaatagtgatggctttattttccttttcaatgatgaaaggtcccatgattgaatgtggagaccaagtctctacatcatgggagtgatacttaaaacgaattagtaaaaactcaaaaggcattgaaactaaaaatggaagcttttatagttttgttctttcttctcatgactaacatttctatgataacttgtcaaaaaaatgataccaaaatcagcttaggctcttctctcaatcccaatatgactaactcatattggttatcaagttctggtcagtttgcatttggtttctacaaaacacaaaacaatggctatgaagttggaatttggtttgagaaaataaaccagaaaacggttacatggacagctaaccgggatggacctccaatttccaatgatgttttacttattttaaggagtgaaggaagacttgttttgcaagatgaacaaggcctgcaaaaggcgctcattgcaaattcatctcagccagctgcatcagcatccatgctcgattcgggcaattttgtcctctacaactcaaattcaaccatcatttggcagagttttgatcatcctacagatacccttttgccaggacagagcttagttgctggaaaccagcttgtttcagccgtgtcaaagacgaatcactccacaggaagatttcggcttcagttgcagacaagtggaaatctcgggcagtacttggcaacttttcaaggtggattcttgcctgagcaagagtactggacttcagatactgaaggagacaacttaagtctgaatcttgattctaatggtcaattataccttgtcaactctactggtttcaacattaaaaatgttattgaaggtagaagcttagttatgtgtcgtttgacaatagatgtagatggaatatttagattgtactctcataatttggttcagaacagcagctggtttgttgagtggtcttcaactaccaatctttgtgctccaattggattatgtggcatcaattcatattgtcagcttataaatcaagaacctgtttgtctttgtcttcctggtttagattacattgataaaaaccagaagactttaggctgcaacagaaattcaaccatagaaggctgtgacaaggtggtttctatagctgaattagacggtttgagatgggaaccggacacttacgaattcctctcactggttgacaaggatacttgtaaacaaagctgtttgaatgagtgtaattgccaagctgctttctctaacagaaatggttgctacaaacaaaagtttcccttgagatttgccaaagctgggcgaataggtttcgatacaaccataatcaaggtccataatggaagcaacagcttcatcaatacagatgctggcacaagtaaacatgtcaagaaagagcatagaattgatacattgatcattggacttacttgtacaagtttttcccttatcatcatattgttttctctattctttctttgcagaaactatttcaggcctagtgaaaacgagcttgattcaaagaatgataaagaagtactctcactgaagtcatttacctaccaccaactcgaacttgcaaccaatggattcaatgagcaattgggcagaggtgcttttgggacagtcttcaaaggaatattgccatatggagacagagccattgctgtgaaaagactagagaaagttgcagccgaaggagaagttgagtttcgcaatgaaatgaggtccataggaagaactcaccatcgaaacttgcttcgtttgcttggcttctgccatgaaggctccaacaggctgctagtttatgacttcatgagtaatggttctcttgcaaattttctctacaaatctgaggtgaagccaagctggaatgaaagagtttgtatagctcaaggaatagccagaggactcttgtatcttcatgaagaatgtgagaatcaaatcattcattgtgacataaatcccaacaacatattaatagacgaaaaccattgtgctaagatcgcggattttggattggctaagctgctgatgcctgatcaaacaaggacaatgactggtattagagggacaagaggatttgttgcaccagagtggcataagaacatggctataacagctaaagccgatgtttacagctttggaattgttctgttggtgatcacatgttgtcgtccacatgttgatgtgaatgttcctgagaaagaagccatcttggtggactgggtttgtgagtgtttcaaggctaatgaagtaaggaatctagtgcaagatgaagaagtgaacatgttggagtttgaaaaaattgtgaaaattggagtgtggtgtatacaagaagagccttcaattcgtcctggaatgaagaaagttgtgtccatgtttgaagggtctgtggatattcctgtcccacccagtttatcttcttatggaagtgattcaaattcacaactcttacatggctaattcacttttgagtttgattttaattttttacttgtgtcatattaataattgttttaacaattaaacttctttttctccaacaaccatccaacctttttggtcatgtcatgtgtatacacctctatgctaattttttgcataatttaaattactaataaatgttatattgactctcaaaaagataaagaaaaataccacttttattaattaattaattaaatttacctctaattttatatttaattgaaatatacctctttttatatgtattgtacccaaaataccatgacataagagagtatcttaaagtgactaggcaaaattggtacaatatttaaaaaaagaaataaaaatgatagactttaaaaaataggctaaaaataaaagaggacaatataaaaagagtatagaatgtaattttctcaaaagtatattggatattttttctatttagcaagagatcgataaaaaaaaaagttaataaatcatatttcaacaaccctttcattattgttgctagctaaatagtggaaagttgcaagctaactagttaaaaaggtgggcatgttaatgtagtcgtcatttgcctggtgtgctaaagtatgaatgaattaattctccacattttgattgagtgtcctttagccaaagtttgttaacaacgggttgatggggctatttccaacctttcggtcatagatttgtcaggatgattttatcaactggtcataggatttttgaagattttggtttgtcatgttgcgatgatttgttggtctctttggaaagcaagaaattgacttgtttggcaaagtaaaaattctgctgcaaattgagtggtggtttctgtattgtctaactttaatcaatggatgatcgctcactaaaattctgcaaacacaatgaattccagttcgtgtgttcatgtgaaacattggtcggtttccagtattgatatgattaaagtcaatgtagatgcctctatcacgtctgggcctttttattttgggattgaaaggttggcccgtcatcatcatagagttgtcctttatcattgctctaaacaattgcatgatcatgcctctctttttttggcgaaggcaattgggttgaaagaaactttgagctggatcaaagaacaggacctagatcaagttgttgttgagtcggattgtaaaagcatcattgatgctctgtatagttcgactcagttattatctcattttggtttagttattttt

SEQ ID NO: 14752 - DNA, 4495 bp, Cannabis sativa
tagaacatgttttttaaaaatattttcactttttcaattttaaaaacacaaaactgattaaaaaagtgttaccaaacggcacctacatttttatcttgttagaaaaacaatgtataaaggttcctttaatttagattaggaatcatataaatacatattcaaatatagtgtaataagtgctcatgattattctgaaaatattagtgataaaattaggactattcatcattgttatagtgtgaaattttcgtctagatatatgagttccaacctcgtaagaaattgatacgtggactcagttcctaatgaaaaatgataatgtgttaatgatatagctatctagagctaatctcgcatgattcaaacttgcgagaggatgcaaccgggacatagtctagtcgcatactatgcctggcatagtcaaaagataagcggaatcaagagaagttaatactgtccgcgtatatctcctatatatgatgagcaagtatatctctcatttgacaagtaaagatcgcttctttacataggtttgatccgaatgactagtgttcgacgattctaataaactcgcatgttctaagttgtcaacgtatgatttctaaatatgcgatcaaggatgattataaacattccttaaaacaagtagtctcaaaggcctgctatgtgagtctaacaccacagagccttcgagctcacatgtttggaatatgaatagacgatatgtgacttcctaagtcgtacacgttgccataattaagacaagaattaatagatgaaactattcttatatttattcctttaagtgtttatcttaattaagttgtgaagttattataataacagtctaatttaatcaattatgtaatattaatcgacatctactttctatataaatgggggatccaaatcaaataagctaagttgaaactattgcacaaagtggactaagcatgccgaactctgattgaaccattataattctcttgtctactttatatttttgttcttgttcctgtccatttcttagcttaaattttaagtacttgttgttctaggtgagtactcatataactgttggtgagtgttcttgttttgctcaaatactcacactttttagtgttgtctaaatttcttcaataatattttgcgatgtctgtgggaatgatttttatagcatttctgagattttggacgagaatcgatgtggatacagaatagaaaaacacaaacaacaacaatgaaagtatcaacattgacactatcaatgttccgcttattggtggaagaaccactccaattgacgctgttgttggaggagtagggtgtactaccacgaccccctcaatctgctttctctattttcaggccacgttggataaacttcaatgccgacggccactgtgggccattttccaccaataacacctgcccacgtcgccgagggtatcattcaattgaaaatcacacaatatgtggcgatccaagaacagatgcatgcattgtaggcaaaaattgcaggaaaggatcagactcttacccaacgttcgccacgagtccgaacacaatgtcacatggatgatcaggtaactaacgacactaggcattgtaatgaccgtactaatatttattgtaatcacaggaaacacttagctaggtgaaaacaacctagatgtgctcgacttgaatcagcttattcataaccctacatgtggcaaaggtcctgctattcctaaatcaaaccagcaatctagccagagggaggaaaggtcacaggaaggggaggataactacagatgtaatctacacagtcgtgcataaccgcatcccgaggaaaacgatcgtgagtctcagtcttcctcctcgagatctaacaattattatcctagaatttattcaaggtcaggttcagtttggacgaggcttggaggaaggtatcatgtgcatatgcagatcgcctcaatgaagcgtttctagcttgttcccatactctaagaaatcacaatgtagaggaggaaccctgtgatccttctttggccgatcaaggtatccccctctgtggatagccccctgcaaacatgaacaatgtagcaaataccaacaatccaccactcacacatgcagcggtggctgccccactctctagcaaccaagtcgcaccagctaacaatcctattctacaaggaggaattgattaagaaaaccttatgcaagctctgagaatggtcgagtagcagagaaagcccatttacaaattacatggaacatctcctttcacaaaggaggtgtgacaaactcaacttcgaaaaggcttcagactctttgagttattgaaatgaaaaggcgcgactaaccccattgattatcttggtaaatttaacactagtatagaggctgaccgggtaactggctaagtatcgaatactcaccgcaacttttgaggaaaatgtgcacgacaagttcagtcagttgctagaagcaacgatctcaacatggaaaacattcgtagatctatttttgacctatttccaggcgacaaggacttataaattttcctacacaaatttagaaaatatcaagcaagagaaaagatgagactttgtaggattatttcaaacattttaatgccaaagtaacaaaagtagagaaggcccccaaatttttgatggtttgtatgcttattataggggtatggaaaataactgatttttggaaggaattacaagcacgacatcctgatacgttagtcaagttctttgccatggcataagcccataaaagaattgaaaactaaatggcagacctcgagaacgccaaagaaaaataatggtctctagtttctagggcgcgatcaaggagtttgcgatgcaaaagcttgagaggacgcagcccaagtcgtagctcaacgagacgccgaagcctaaaactgcaaagtccccaaataggaaggaaagttcaccaaagtgcaagggaagccctcaatttgataattgtacatagttgaatgttcctcgcgaccacatatatgctattgaagaacataaaggcgtctttagaagattagctccaattaggggcaactacatccaaaagagactcgcaaaaatactgtaagtatcacaaagatattggccatactaccctcaaatgctggtttttgtaggatgagtttgaagagttgattcgctgaggatatttcagtcaatataagaaggacggagaggaaaatccccaagcgactggagcaaataacataaaagaggcaagtggctttagggcacctcacaacattttaaccatcattggtagaccccatgttggtggggacttgaagaaagctcaagatgatatgcaaaggaatccaaggagaagccattgccaaatgtgaacaacttaagtgacagaccaatgaaattgttcaaaaaggagtgcgatgatatcactttcatggaaagtgatacgagatgggtgcaccacccccacacagatgcattagtaatagtcacaaatattggaggtgataatgtacatcgtgttatcgtgggtaatggtagttctgtcaaccttttgaatctacaggcatttaatagtagatgggaactatacgagaaggatttaaagccagtaacctcaaacatctatgggttccttggattcacaattgagttaaaaggaatgattaagttgcctataatgcttggtgaagcatctatagcagcgaagtccatggtggacttcacagtaattgatcaatattcaacgtacaatgcggtgataggccacccaatcttaaaggaaacgaagattgtggtatcaatctaccgcctaacgatgaaattccctacacccgcatgtgtaggattagtgagaggagtccattcagactcacaggaatgttacaacactacgatatccagaattgaggatgttccacatttagagaagccaatcttaatcctaaagtccttaattagacaaacgcagcacaagccactgaagaacttagatggttttgcatggaagcattcaaacatgtttagaatattgcctgagatcatatctcaccgactgaacattgatctcaatgtgcaaggattatgacaaaagtgccgtaaaatggaccctgcaaagtaccaatcggtgaaagaagttgacagcctactcgcatgcagtttcatcaaagaatcatttcacccaaattggttagcttataaggttgtcttaatcccaaagcctaacggctcatggcgcacaaccaattttacaaacttaaaataaagcttgtccaaaagatagatttccttttccacattgaccaacttgtccatgcacccgcaagtcatgagctagtcaacttcatgcacacgtactcggggtacaaccaaatcttgatgtacgagccaaactaggagcatacctcctttattacagaccgaggtttgtactgttataaagtaatgccttttagtgtgataaatgcaggtgcaacatatca

SEQ ID NO: 14753 - DNA, 4249 bp, Cannabis sativa
  modified_base (3930)..(3946): a, c, t, g, unknown or other
  modified_base (4097)..(4112): a, c, t, g, unknown or other
  modified_base (4224)..(4224): a, c, t, g, unknown or other
cgtctaagtagttgccaagagtgtttcctttgagaatgatcgggatctctatagaaacccgtaaaacgccaagtaagatcctcatccgtattaatccaagcatcaatgtggtaagcattaaaagaattcaattgaaccgtaaaaggagtcttccataagagagccaaccccccactttttcctttggcatccacacagaaacagccctcataccccagccgaatgcgaattgactccatataggagctttttgatcgagtttctgagagaaaaacaagaccaggattgtaatctttcacatgagtggctaaagttgtcactgtccaagggttgccaagcccctggacattccaaattagggaattcattgttctcggtgaccctgctcaacagagttcgccgcttctgtattctcttcagaggttgaatcctttgacatggaaacttcccctgtgaatgtgttatccctgtatcccgataccatcttgccattgttctggtttttcccgtcctccccactatcatgtgtctttgtttgacgattccctttccttgttacaaacttccttcttttttcccgtgtccctttctgcttgttattactgcctccatcgtagcttattggaacctcaaaaagattgttttctagccccgtgttaccaaattcagcctccatggttcttgctttacatgtcctaccccccatgtgattcatgtatgtctcagtatgatcatcttctcccaatcttttgcgtagtccacgattcccctgttccattggcaaatctattgtcttctccttgttcatctcattcatcatcataggagagggaataacattggtggtcaaattggtattattaatatttaacatattatgtttataattattgatattagaattcatattattggtacctccttgcgatttgataattaagagtgagtccctttcctctgcaattctcttttctgccatttggggaggatagctattgctatttccttgaattccttcaggatgggattgattggtctcagtgttgtttttgatagcagtccttcccgtcgagtcaattttgagccaagaaccataattcggcctttctaccccatcttcttgaatcccagttgctcgagggtcagtgcattggcgcatctcgtggccaattcttctacaattgaagcacatgtatggaagtctgtcatattggaactgaagccaaattcgccgtccttcatgaggaaagaggtagcctaggaatattttggattgaatggagttctggattttaaatttgaagaatctattgatagcaattttattgacatccgcttcttgaacttcaagaatctcccctgccattccaaccaatctggccatatttgatttagttattgctttaattgggaggttaagcacacgacctgtaatggtatatgagtagagaaccgtttcccaatcctctggtatacccttcatccgttccaaaatcaggaatcccgcatttaatacccatggatttttccgcagtatcctttccaatgaagagttcgtcttgtaggaaagaaccaagaagatggtcgtagcagtggttttcttgatttttaggtcccgaactgtttcccccaaatttcatagtcgacacagtatgttctttagcaaagaacgtctgaaaggtttcattgtgcaaagccttccaataaggcaagacttgcctatgtcttcttccccttcctcattaatttcccatccttcttcatctgtaaccttcaatttgcttgtgcgagagagaagttcctccatttgatctatgcttgctgagcacatcttttgattaggcccttccgaagagagcatgggagaacaccagacgcaggagaatcgccttcgagagagagaatcaaccacatggtatttctttcttatctatgatgatttatctcatatttttaatttttttaaaaaaaaaattgtcatattttgtgcaattaaatttgcatgttatgtatatatcaacaaatatatatatttttttaaataacccctttaaaaaagtttttttgttgataaaaatttaaggtgataaaattgtaaataaaacataaaaaagataatatttttgaaaattctcctttttttaacttattgggtagcataattgcatacccaagtttatcatttcttaagtcaacccattaagttaggtaggcacctacacaataaattttaacttgtaccaagttgttcagaaaatttggcagtttccaatttaaattccatttagttattcgtctatgaactcaaaaagacaaaaacatcgatcattctcaacaggaaaaaaaaaataaaaaaaaaatataaaacattaatttacgattgcgttctgacggtttttagaaataataataattatatgtatcccatttttccatctaaagaaaaaaaaaaatatttacaattattagagggaattacttcaaaagattttccatttaaattttctttcaatgaaaaaaaaagccaatcaatatctatcatttagggaaagaaaaagtaagaatcatgcatccaaaatataaaggaaagaattgatcatatatttcaagttgtcaaaatccaaatccacaaaatccaaaaatctagccttattattttctatttttcttagagacaataataatttgaaaaaaaaaaatgatagaaacttgttacacaaaatgatcatattcattaacatcaaagtttatcagtgataacaaatccaatattactatacaatttcacttgatcattcctatcagccaaagaaggaatttcgacctttttcgaagccatctcagcctgacacaaatcagcgtcgtcgccagccacctttatgtcataattagccgtcataacatcttcatcgagttcctcgagtgcactcgagaatgatagcaccatggctttataggaagaagcacattgctcaagtacttcttgttgaccgctaccacttcccttcttgatctcgtcgttgatgaaattgaggcttcctttcgcgtttgatattgataattgaaccgatatcttggcaagagctttgagacttgttgcggtttttgatcttggatcggattcaagagctgccaagcattttgtgttgtctagggtttttttgcaaattttgtcaaccaaaatatttgatggtgatgatgtttgtgcttttgttgatgatgaaaataagaataagaaaaataaaagggaaagggaaagtgttgttggaatttttagtgttttggaatccattttgaatatattgtgtagtttagaagttagttgtttttgtttgttatatgtatttttttaaggtttttgatgtatttatagtagttggaatatgattgtttttttttttgtttttttttttttggtgtgtgtggattagaatgaggttcaattttctttctagataagacaataaaaatggattagagaaaatgggaaaaaaatctttaaacaaattaattaagggaattttcttttaaaagaatttatattatatggaattttaatattggatatgttgtccacattaatgagtgaaaagaatggaaatatttcatttttaacaactgagttatatacatacctattaagaataagattcaaatattttaattattgtagggaatattttagcaagatctagatttcttaacaagtatgttgattaatatcttaaatataaatatctctaagacaatgaaattaaacacataagagtttaaaaaatcttacattggttgcaacggaataatgactcattccgctcaatctctaacccttgttcctttttgtcatagagtattatcaagatttgagcctagatctctttctctccttcaagcaggttaccacggtcttactcactatgattgagtacnnnnnnnnnnnnnnnnnggcatgacactctatcactaaggctcgagtatgaagaataatgaaggatgcttgaaaactgtatagaagatgtctctcatctactagttgtctgatagagaaaactaagtttgatttggttgaaggcaataattggatgagatgagagcannnnnnnnnnnnnnnngtgtttcaactagggcttagggttgaattatatagatcaaaaaagaataaaatattgggcaataatgacacataatggccagccattaagtggaccattctctagttacaantttgccactttatttcaaccactta

SEQ ID NO: 14754 - DNA, 6843 bp, Cannabis sativa
  modified_base (1124)..(1125): a, c, t, g, unknown or other
aaataataatttttagtacttaatatttaaaataaaaagttttagaaattacatagtataattacactcaattttcgtaggagtgtaattgtgtggttagtcaaacacacaaaactttataattaccttcaattaccaattgtaattttttgttggccttcctaacgtaccttaaaactcacattttatttttcagtttaattacttgattcaaaatttttaaaatatttataaaaataaaatactataatatttttctcaattgaaatttattctttacgtatgaacctactgatattggctcccaactatataatcctggctccgctcctgactattgatataatttattattggatcacaaatattttttataaataatataaaaaatcgttaaccaatcatagcatgccacaatattgagaaagttcagtcctaagtataaacgagcgagacctgtgctcaaggcccactgacccaaggacaagagcaaaaaaatatttcttttaaaattatacatatttttttttactagttataaaaataccataacttattttaaataaaggcccaaatttttttcctatgacctactaaaatttagaactgaatctaatatttagcaccttaaaatagtaaataaattgaaaaatacttattttttatatccattaatcaaaaatactttcatattctattttattaaaatatacccacttttatgagtgagttctccaatatacctttactttctacttatgtcaaacatatgatttaaattaacttaaggagtataatgtggacatcatctataaaaatgagtatatcttgaaaataaaaataaaaattaaaacaaataaaataaaatggatatactatatattttcctccttaaaatacctaatcaaatcataattaataattattcaaaaacacaaaacacaaaactcttccttttattaggagaatgatggtttattattctctttattttattttattttattaaaataaaataatgagaagaaaaaaaataatgttaagtggaatcttttagagaaaaagacactcttctctattttcttccctcatctcatcccattcccatctctctctctctctcnntctctctctctctctcatcactctcactactctctctttctctctctataaaaatccactctgggcagactaaaaacagacccagaaacaaagctagagagagagagtgagcttcaacaacaacaatggtggtttcatctacaactcaatgcctctctctggttttactacttcttctcttcactactatcttagcagaagatggtatgttctcttcttcttcttctttctctctttttattttttattattattattacttttaaaattgttgatttttgccaaatatttgagatctgatatacaaatttccaatattcttttattattattattaaagaaatttagattaacacgtgtcaactcaaacccatgtgagaaaatctcttttattattatgtttttatttgtattttggttttaattttccaacattgatatgggtattgattttgcttaatattggtacaaaatatgataagaaaaaaaatatacaagtgtaaaaagaaatgcccaaaattttaaggtttgttaaatttaatgtgactataattaaaattcattttggaaaaaaaagacaatgatgaattctctttattcttcaaggctatatggacccactacaattgagtggttcatgctaatcttgtttgaacattaatgtgtttttttttttaatgaaaataataatggtgtgaattaaatttacttgtaatataggaaagcttcttctattgtgggtctatgaaatctgattttctacattattgaaaaaaaaaaaattaatgagacatatgtttattggtagagaaataataagggtaatcgtgagggtacttgtgaacactttttattatgaagtgtaatattattatggttgtaatttaatatcgaattttacttattttattttaatattgtagtaattaagtattagatctcttataataataaaataacttttaaaaaatattgttaactaatcgtaaatagaagctatctatttaagggtatgcttaattagggctaattcacttgataattgactcaaccaataaatggtgttttctattatttagagataaatgccaatgacccttttcctatttcttcttcaaaatgagtaaagtgtgtgctttttctcaaatacaataaacaaagtagaaattttgggtccatacatactagctttggtaccctttttcttttcccctattctattattttatgattaggtaaaaaaaaatgtacttattagtgggaaacaaacaattttcccgccagatcaaatagtcatattattacttttttttatttttcttcttttttctctattttaacaaaagggcacagtccttttcccacaaaggacagtagcccttaaaatagacttataattgaaccttttttatttcttggttaccatcccaatttccagctagaatccctaaaaaaagcaccactagtaaaataaaaataaaatccactttttttttctttctacttttttcttcacattagtcaaacttgggaagactaaaagaattgggcccactaattcggtggaattgggcccacacggagaactgggcctctgggtcatgttttatttagattagacccatcttcttttgatatctctttttttgtccttttgcaaaaagagtaaatattgtttagtattacattatttatttatttatttttaattttagctatatattttttttttcatttgaggtcactacatggataaggttctttatctatatacaagttgttcttataactttttcttgcaattttgtgaggcctaaaatttatatatttatattttggatcattattggttgatttttatttggaatttagattttttttaattactaagaagctcgaaattaattataaaatcatattggaagtgatgatttttgtgggattcacgtgtgatattgagtagtgtgccaatataattttttttattattattattattaatgaaagtgatacatagtactaagtctaagaatttaacgatatagtatttattaatggaaggaattgatatggtttgaaattttaataatgtattttttgtgtgacaactcgacattcaactttatttttttttaagaaaaaaaatgcattcattaataatgaaaattaaatgtttatgttaaattattttttatatatttcgaataaatgcactttattttctgaaaagtacttatgtaaacatgatgggttgtcaagatgaaaaatgtgggattttgtgttataaattacaattatttttgacatgtgaacttcttacaaatttaggtttgtattaattatatgtacatgatattttaaaaatattataaattgaaattgtaaaaattaaattattattttctacatgaaatgaaacaattcattaagaaaataaaagtggtgttggtatcgatagtgaagtgttgccatgatctctattctctataaaaaatttcaattttagtgggtcatattgtctcattgtttgcctttatgaaatcatatatgtctatcttttttcttacaaatattttgagtgaataaaaactcaaaattttacttttttttaatttggaaaaaataaataaaataattgtgggttaaaagagaatacactaatttttttagccacataattaattattgaatgtagtaaaattataatttttatttagtttcgtcgttacagattttgtcttaaacaggacacatgtaaggtcactaaacgaaaacatgtagtatcagttattttccaattaataaatttacaaacggaatttgtaatgacaaaaattatagttttttaaatattaggtatttatgctactaaaaaaactcatcgagtttatactggttataaattcaaaattttaagtgtttatgacgtaattatctctttgtattattataaattttgacattatgtttaagaaaaataaactctatttacaataaaatttattattttctaataaaagtagtatttttgtaaaatcaaattataaagtggtatttaaaatgggcttttttatgataccaacaggcccaataccaaacggagacttcgagacgatcccaacaggtggtttcccaagtggcgaatcggtagttgatgggcccacaacgatcccaaattggagatcaaacggcaccgttgagatggtagaatcagggcaaaaacagggtgggatgatcctcatcgtaccacaaggtagacacgcagtgagacttggtaacgatgctgagatcagacaagatctaaaggtggagaaaggatcaatctattcggttacttttagtgcggctcgcacgtgtgcacagctggagtcacttaatgtgtccgtgccacctgcgtcgcagacaatagatcttcagactttgtacaacgtggaagggtgggacccatatgctgtggcttttgaagctgactcggatgagttgactttggtctttactaatcagggtatggaggatgacccaacttgtgggcccattattgatgatattgctattaagaagctatttacaccagataggcccaaaggtaaattctcaattttattaaaaaaaaaagtaattaaagtttcatttttaacggtaataatagttaaattatggttttagaaattcggtaggtaattgatcattaagtattaagtcaatggtcacgtaacatttcctgattagttcatgtcattaaatttttattttttatttaaaaataatttaaatatactaataagaaaataacacacttgtcatttaacaatataatttaagtattattaccgacaaaaacttaatttaaatatttatttgtaactttaagtatttaccttataaattattcaaatatatatattttttaaaattatctatggtttattataaaagaaatggtgatggtttattaattaatttatttggttaagcatattttttggttagacaatttgttatctgtttgagggagtctacataccgttaattcattagtaattctaataactacataaaaaaaattgggtttaatttcatgagaaatgtcaaatttaataggtattaaaaaaaattaaaaattaagtttagaaaagttagaaatatgttcattgctaaccattaaaagtcaatttttttttaaaaaaaaaaagtcttcttctttttctcttttttgggggtttgttttccaattttgaaatagatcttttgagaaattttttagagattatttaatgttaaaaaatttagttttgaaatagatttacctagaaaattatttttgtataaagaagaaaaaatgagcttagataaaattctttaaaaaatatctttgagtttgatgaattggtaacaaaaatcatgaaatggaactcttagaggttaagaattctgaaaaaatataattacaaaaatttataattttgtaataattgaatttttttgttattatttcttttatatttttaagtcatagtaaaaaagaaaagcatattatgaaggttggacttgcgagtagagtttgttcccattgttgggtcaaggctcataatcccaagtatagctattatgataagttgttctttgtttttacactaaggacaaaattaaagtgaatttttcaaactatttatagtttgaaaatgtggacaaaatgaacatcaattgatgacattgttcaatcaataatcttttttcttttggttggaatatatgtattataagattaactttatatgctttttttaaaaaaatttcttaattggttcaattccttaataaagtgtcatatgacccttgaacttgacacatttgttttcatgttaaaaacaactctcaaaattcaaagttactaactttgtcaaccattttttcacacttgggtgttgtagataatgcaatggtgaatggagactttgaagaaggtccatggatgcctaaaaacgtttcgcttggagtacttcttcccacgaatttagacgaagagatttcgtcgctacccggttggaatgtggagtcaaatagggctgtgaggtacattgattccgaccattacagtgtcccagaaggcaagcgcgccattgagttgctctctggcaaagaaggtataatatcccaaatggttgagacttcgccgaacaagatctatagcttgagcttcgctataggccatgccggggacaagtgcaaggagcctcttgctgtcatggctttcgctggagaccaagcgcaaaacattcactacatgcgcgaatccaactcaactttccaagtcgctagtctcaacttcactgctaaggctgaaaggacgaggatcgcgttctatagcgtgtattacaacacgaggagcgacgacgggagctcgttgtgtggccctgtgttggatgacattagggttatggcttctagctctcgtcgaaatgtgtttgggggtttcgggttaaggcttgtggttgccatttgggtgtttttttatgtgttggtttaaggggttttatagatataatagatatatatagtgtactgtattgtatggtatattttgctttctaatttttggtatgagaatgagatatgagtagtaagtgttaagcaaaaattttcacatttaacatattaaaataaatgcaaaacacaatttcacctatgccaaaattatagcataagagtttattaatt

SEQ ID NO: 14755 - DNA, 2526 bp, Cannabis sativa
aaaaaactattttaacagtctatacctagggacatcatttccacaagcttttgcaaccaaaactaatcctgaaacagcacttctagctgcattagcccttctagactgggaactctctctgcaagcatgaaggtacagtcgagaaaggcgcctagctggtgcgtgtaccttactcatagaacttccatgctcagcaattacagaataaagagaagcctcaattgcagcagcttccctcaactctccttcaagcattttcactctgttctccaactgctgcatcttactttctaaaatggcacttctagtgtctcttggaaacaccttaggatcttttctttccttaagtctgaggctacccatgccgctttgtgcatcaccttgaacaccggtttccctactctctgcagactgactgctaacaaccaatccattcctagaaggatctgctctaacagattttacatgttttaatctttcaatattcagaatactttctttcactccaagattttccctgcttggagatgatgtatcacttcccaatgatagctttctggtaacatcttgtgcatattcatcttctttcaaagagctttcctcggttaactgctgtccttcatccttaatcttttcctcctcttttccttctctgtcatcccttgttccattcgcctccaagaaatctctaccgatttccttctgtccgttattatttccattaacttcggagttaccattggatgtcagttgctcaactgcctggggtttcccatttgtaaaattacttcttccattagcggcattcccgtgaatatcttgagctaaatattcacgatcaatgcttcttattctagtgtcaggattctcttccacattttcattcaccaaagatgaagaggaatgaacacgttcaacactttttaggattttcgcagaacttgaaactggagagtgggacacagaagcatgattatttagtggacttcccatatcagaagataagtccatggacgacgagcgagaagaacttcgcctcacatttccacttggcgagttctgtcgtactagacttgatttttcaagctgtagttttgaggatccagtaggcttcttgttactcccatcagtgccctcagtcattgtgtctattccattctgcaaaatgttcaaaacaggtcatatgaacaacaaaatcatatggaaattctctgtttctctctctccctcacacatacacacacacacacacaagcaccaaagacagtggcagtcacagtagcactaaagtaatattgttaaaactaagcaaagagagcagagaggaaaaactaattgaaaaatacctcttcattacgaggatgtaaccccccattagaagaagctgcaacagatgagtgagaagaaacatcatcatcagtaaaagaagcaatttcagcttcttcagcatattcttcattcatcaaggctgaaactgattctccacccacattttccattgacatagcccttgataagctctccctggatgaagtcctactgcgagccttcacaacagactgaagtgtaatgtataaaacaggttgatttgtattcttaaagctcctcttacagttcattggagtactaacactcaagcattctttaggcacaccatattctgctaaatctataatggcagaagctagtaactggcctttaacggtcctatctcttcgaggttcatacaagttgagctctaaacaattcttctgaaatacatctccatccccacctttaacagacatgtccctaagtagagtcacaggtagcctgaaagattcattgaattcaatttttccctcgaaaacaatagacccaattgatgggacaacagcattagttgagcctgagcaccggtcaccgttttcccattgaatcaacacagatttaagtgatctaagcgactgtgatgggggccagggcttaatctcctgaatatgaacaaggtaatcaatctgaacagaagagctcctcctggtcttcgtcctcaagcctaggaccatggttgcaccaacagaagtgttaccctaaattactatgcagctcagcaatgtcaataacaagcaccctcaaaaacccacaacaaacctgtgattcagttacagaaaactaggattagaattactccatgcttatggaatatcatagcaaagaatcaaagatacgaaagccactagctttcagcacactcagacatgaaatgaagataataaaagtttaaaaaaaaaaacaaaaaacaaaaaaatgcttcaaaatcacaaactgaactcattataacaccatatatacaaacatagacacatagaacaaatacacgaataagaaggaaatgcagaagtgatcagcaactgtataatcctaaataattactttacaagcactcagatccatacacacaatgaaacaaaagaaatcaaaagcaatcaatttcaaactcgaagcaagcaaaattaggacaatgcaagctcaaaagcaacatggcaa

SEQ ID NO: 14756 - DNA, 4311 bp, Cannabis sativa
tctttacttaagtctagcatataatttacattaacttaagggatataataagtagggatgtacatcgatcgatatgggtggtctatatattttctaacacaatctaaagttcgggtaactaaaatttaagtgaaacccgcccaatttaaaataataaaaaaaaaaattataaaccgaccaacagtttgggccgtttggtcgggttaacctgcccaaaccgtccaaactttttttttagtttcaaagttaataaaaattaaaaagaaaaattaaaaatatcaaattccaccaaagcacaaaagttcttaaatctaataatttcaatagttcagagagaatttttaaccgccaaaatttagaaagaaaaattactaattagcgaaacgattaccccaacccaacctcgcccacgcaggaaatgaagtcacatcaccatgaagtgaacttcacaatttatcaaaaaaaaaattaaaagtgtagcaagtatgccttttacacatttttaaattgtgattttaaggtagtaaaaccccccaatttttctaatcatactttcgaaagctatagtaaatgcaacataaactatcatattacaaaacaagtcgacgtgtaatgacacttgtaaactggggttattacacctaccagccatagtgttgccttggtagtatcagctccttcttctatttctaattcttgtatgtgaaagtgagacagtgaaacataactaccactccagtaaaccctctatggagtctggttttttcaactagaaactgttccaacttcacaatctaaaaactaataaaaactttctcaacccaaacccacttctgatctatcttttctgctatccagtttcctgtgtgtatagatatcaaggtaaagttgacacctttatctctttctaattcaacaaaattttacttctttcggtcgagatttctcaatggtgaaggaaaatgggggtaatctttaccggaatagaaaaaaacggtgggaaattttttaagatggggctctggatttcttgtccatggctgatctattatattttccaggcattatgagtaaagtgggtgtttaacatttttatggaactgggtattttagaaatcccctgcccctgtataattcttgtcggttttgttattttctgttaattttattgtgattcataatttaaatgtttataatgagtgagaactagcgaaatagttcttgtatttgttagggatttatgtatgggcagttatatgaacaataattctttggtgttcttaatgtagtgtcgaaggtaaggtgtttctgttttgggtgaacgtcttgacaaagtaattagatttaatataattgtagctgaatcatttgtttctctttgcttttaagcaatttcaattcggttttggggttcgttgatatgggtttacaactttacaggcactcgttttgattcttaagttatcgattgtttacaactatgagatgaagatgttcttttcttctcatctagggttctgttaaaactcacttggattgttgtttcgtgtctagtacgtgaattgcctcattcaatttgcaattctttttggttttcatataattttcatgatcaactttcaaatgagtttttttcccctttctttctcttatttgggtttcaaacattagcatatattttctatatttattagtaaaagcatgtttatctctcttagcaggtgctttggaggaggcaaaaagggaaagctgagaatactaaatactgatttgtctctgtgaaacatggatcaaagtactcaaattctactgcattcttatattgctgttttttttttttcttattggcaattacttttgtgcaattgatagtagctgttgtatctttatgaattgtatttggacatacattttcaatcttgattcttgtttgggatgctgcttgctcctaatttcttttgtctgtgaaatggttattatgtctacagaaagtttagttgtctccaacattattgatatgagactttacaacaatgagttccgtccaacctgttccttagaggattatcagcaatgagttgtcagcttagattacaggatagctagaatcgaaaattccttgtatttttatttgcatttcaaactaatttgtgaaaaatgatctttaaatgctactttggaatcaagagtggaccatttccatataaagtttgtataatagcacttctccattttgttatgaaatctatttttagataaaatgtatggtttagtttctgaaggtggtctcttgaacttcagagatttcaacagatgtagtggagcatagacggggcaagtattctaggattcaagacgcagaggatccacagctgagcctgtttgacaaaccccttccttgttgtggttgtggaattggatggttttcgtgagttccacttttccttgctatcttctctgacatatcaacacactctcactatctgtctatgtctgacttataacatttttcttctgcagttttctacttggatttgtatttccattgatgtggtactatgcaacattcctctactttcgaaactattatcagagagacccgagagagagagctggacttgctgcttcagcgatagctgtaagttttacactaaacaagtaaattttcaccattcattagtttgccatggataccttgtagcctttgaagaagcaaacagtgcttaaagaagctttccaaattggtgcatcataagatcctaagtcatatgctatgcaagactcttatgaaataatttttcctcgtgataagcattttacttcccattaaaattttgagtaatccccattctgattgtttatactcgggtttgttggaattatgatgaagggtgtgtttgctctatcttcttggtttaataactaatctaatgattgttgatgcaggctttggtatgtacaatcgcagtgacaattgcggtactagttgttgttttataatccttgtcaatatgatgccacttggctcgtatatacatatttcagcttcctcaatgaagcttaaaactaatggtaagatcaagatcaagctttctttgcttacatacattaccaggcccaagaaaataatattgttatctcagtttcagtagcatttatgtcatcaaaagtagtgtagtatttggatattctttcacactctggagaaactgccaatgctcagttcccattcactgggattttacatgcaagtcagtttggagtccaagcattaaacataaagctttttgtaaatcgtattgcagataaatctggagtcacttgtatattttggaagcaattggaaaagggtgatttcaatctttttacacaaaattattatagcctgtgaatcaggttcttgtctgtttataaaaatagtatagttatgtacagagaaaatgaaatgaaatgtataagtgtgaaactgagtaaaatgtaattgtgaaaaagggtgctggtataatgatatatgaaatgaaccaaatttggcatgaatgaagtgatggttcactttttagtatcatgcaactttttcttgtaacataaactttattctctagtatattccttaaaatccattggcatttccattggcataagagacttttactccagcttaaaagctaatcacaaactgttagtcagagaaaagtgtggatttgagataacatgggggcattttcatgattttgagataattaattatactaatctcaaccttggattcctaaatattcatattcgaataactccctgttagcaaaaagaattaactcccactatgaaaaataaaacataaaatactattaaaagacagctatactaattcaagttataatcgtacatgaaaaaagtatatatttccttaatatatccttttttttttatgtatgtatcttatataactgtacacagcaaatacttctccgtttttcttttctggggaaaatgtaaaaggtagagaatgacattttcataaatgaaacaatcttagtgagttttttgtaaaaatctgggcaacagccctattttgcggaaaatagagagcctgggccgggctgtccagaaaacatgacaattgggcctaactaggcccaccttctacaggtgtcccttttctctttttctgtaaaataagaataaccccaatcccttcttcctcaattcctctctctcaccccatttccgatccgatcactctcttcctcggcacagcaaccactgctcaccacaaaccggcttcctcaaacacacgatctcgggggatcc

SEQ ID NO: 14757 - DNA, 21565 bp, Cannabis sativa
  modified_base (5662)..(5668): a, c, t, g, unknown or other
acgaattctattttttcagcaacttttacacacacaaaatatacattacatgtttacaaatttaataaaattcaataattcaatagtataattatatttacttactttaaatataaactgcgactcttttcaatataatttttccttgaaaagaaataccgacatgtgatgttattaatgagatgatagattatcaaaaggtgcatttactatatttatatgtatcaaaattctggatttgttatcatgagattgccaacgggcctcaagaaattaaatatgtaagatttcaacaaaattgggtatgagatatatacaatgaataaataatatacatgataacttgaaaagaatgataataatcaggctaagtcaaaaatgaagaacctacagcatgtgtagacaagctatcatgaggccgactcatagggtaagagatgcaatctcagtctcaccacgcaccaatcgaacatttttagccgaactgagtgagtttactccttcgaatactgcattaactcaaaccactgcaaccatcgaccacaaaaacatttcagactatataccccaaaaatttggaacaaaatcaaatgtaactaaactgagaaatatattacctgtcttaataagtcagcaagtgttctggggagtgcctcaatatttcttagaacaatatagtaagggaaaggaaaagaatccatgtacttgggataaggcggtccatctttccaagatattatttcctgaaatcccagaaaacaaactttaataatagaaccccttttgcaattaacataatttatttagtctcttcatccctaataatataattatcaagtctttgactaatggaataactagtagcaaaggtaattaccgggatatccataatagagtcttgtggactatcgagtatcaaaaatgcaaccatacgcttcctactcaaaaaatgtctgacctggcgccgcagtttctcctacagatattaatttgattaacgatcagacaaaaaaaaaaaacaaataaaaagatttgaacagttggagaaggaaagcatcagtaccttctcagttaaccgtccatctgcaataattaaaacaagctgctgtagtggattctgaccagatgggagtcttgctttaacaactgctgaatccagctttttatgtaaatacgtcaacagatcaagcactggctgatcagcaattgtattttcttgcttgaatgtgaaattggagacaatctgagatatacaacaaagacgacgataaaataacatacacacctttgaaaaccagaaagcagtaaaaattggtaaaaagcaaatggaaattttgagtttaaagcaatttatgctcaccttgaccccagcctctccagtaaagggctgaccgaaatcatgaagtaacctgatattacccttctttccgaaacttgctacagctagatcccccatttccagttgagacatggcacggcatactgcaaccaaagcttcaagggcaacattcccacaacaattctcagacatgctacgggaatcatctactgcaatgacaacttgatagtcacgcttgtttggccgagtccttctgagccatattttatccctccgaaaatgacttgctatatatggaataacctgctcataaaaaagcattaaatatttaataactagggcatagcaaagaaaaagtacaaaagtctgtaaagttcagtatgtttaccttcttcatgtttatccgtttgccagtcttgtaatcaccttggagcttactagccagtgttggctccataacaagtcgcaactgctcagctagctcctgagacaaccttgttgtgagcaactcatatcttctccatagagcagtagagttagctacagaatcaatagaagtatcctcaggatcttgggcttttcccaactcctcatcatttattgagagcttattgagctgatctaccccgtcattgaagaaagcctttctgacagacaccaaaccatcagataagcctgctaaggcattatcatcataagcttgaacttcatcagattctaccataggagtcacctccatttctgagggagtcattttatcctcaatcttacttttagaaaaagaagaaccattcttcacagggtgaggttcagaattctcctcctcaatttccatttctgttgtgtcatctttatttgcggttggttcattttcattggttttgttgctattgacattagtgtctatctgctctgttgttgcaagacctaatgcttgggatgttcccatttcagactcagggacatatccaaactcatctgcattatcatcgtggatttcatccagagcttcagtttcatctgccacgagatcaacaaatactttcactctttctttccactccttgtatggatcaccacgactgcgattaggatttggttggcttttctgcactgaggacgtctcattggaaggtaattgggtctgtggttgatctccagtctctcgcttactgtttgataactcagaatccattttatccagctcagaggtattgctggatggtaaacctctggaaggagcaagtccgctatgagtgtcattgctgtttgaccagtttgattctggtaccatattatttgaatctgactcttgcaaatccccattgggttgagattgtgattctgagttggggacattgttaccaagattgtccgaaatccccagtccagacatttcactcttggatccagatgtattcgtctcagcattctgttcctgatccttatctagttcctccatttcagaactcatatccaggtctcccgtttctgcatcttccattgcttcatcatctggacaaggattctcttcctcacagtttccagtatcagtaagttcctcctgctcttcaggacctgcatcttctacagaatctacaacatcctctttatccaggtccatttcttcttccaaactctgctccaagtcatcaggcttcaaacctgtagaatctgcaaatgcttcttctttgtccaagttggcatcatctatgtcatccccatcatcatcacaaagatcgtcctcttttccagtctcaccatctagtttatcagcatcttcaggattgagctccccatcttcgtccgctgtcggagaagaatcatccttggctctaagctcacgggagcttttatcagcatctttaactgaaggccctgattcatatttctcagttgaattatttggattttcatcctcctccttattccacagtttctcatcaactacttcactatcaactccagtttctcccattgtagattctagttgctcctcctctccatcgtcatccatatcttcttcagaatcctcactgacatcagataatttaccatcaaaatcttgctccatttcaatacctttatcattcttattggggacttcaccagaagcatcttgttcttcattttgctacaaaaacacaaaaggaaagttgaaaaacattttagcaccatgttagataaataattagaacataaaaaatttagagcatatatattttccaacttgattataccttatcagatgccccaagaagctgatcttcatcagttatctgatcactgacatcattcttcccttcaccctctcccattcctgttccacttgcatcttgaaatgaatcacatgaagcatcatcgacttgatcttcattgcagatgccaaagccttttgaatacaaagaagccagaacatctgcaagcacacaaatcacagcagaaacctaccacacaagtacaagatgatgttaaaaacatgcagcgaagtacaaatttcaatggtcacataaataatgttcaagagtgggaggtaggaatagactaactgttttatgcatgtctagctgttcttgcaacagaccatcaccgaaatttgacataagatccaaaaacaagtgcaggtgctcaagttgagcataaacattgtaacacttatccccgaactgattcagcagttttttctgagcaaagaagatcagatccattatcaggtatttagaaagataattagtgtatatatatatatttattgcagaggacaagccagttaaacttacagcacaagatatgacccgtagaagttggctacataaatgttcgaagctcaaattcatagctaatgactcaaatagaaatctccaagaggtgatactcccaagtgactcatctgctacgctataattttccattgcctccttaatatgctcaaatgcacttttaatagcaagaagaaattcagcttcaagttcagaaaagattctgtcggatgtgtactcttcgtgtatctcacttgaagcattttcaattttctcttttgttgccaatttgaattcctcttccactatttttccctacaaaatttcataattcaaaagtaaatttaatctcaatggaccccaaatcaaatctgcaagttattgtcaactttacactgaagcactcaacaaaatccaagcgtaagaaacatgcaaaataccttctttagcacttcctgaaaatgcccgagcaaagttgttttaacagagcttctatttgcatcctccctatgcatggcgagatgattttcaaaatccataagtaaacgaaagttatttgctaccacttcttccgtatcttttgaaataactaaaagatcaggagaagcaggcagtttagtaatatctctatcttggccaagaagagtattatccagcaattcctgtccaaaaaataaaatgaaatcaataaagagcaaggactatgtgtataaagtgatctgaaatgatggatgagaaaagtacacctttgaattcttaaaacaaggaaagaatttctcaaccaaagcaagcactccttgtgacgcagctttcaccgtgtcacatgtttccaaatgtgtgttgtcaaatgttctcagcaacaacaactcatcatatgatatagaacacaaactatcaaatattttctgcaatattaagaaagtattattatcttacaaaagaaaaaaagaaccaaaacataaatcaattggatcaaggtaggaacatactttctgctgccacatgcacctgaagatgacatcttggttttggacaatacaaaacatggtgcgagttccaccatcagtagtggtgcagttcgaaaacaagtttttcagaatagaaatgcaatctttaaaacgcttcaaattcttagcgaaaacaacagcagcattatgctgcttttgttgtatttcaataagctggtggagaaaagagcctgacctatcaacctataataaaaattaaaaccttaatacaacttagctaatttttccttgaacgaaatatatacagtatttgcaattacaatggggaacacacctggtcacgagtgatatctttgtggcagttgaggcaaatctgctgtaggagcagcacagatgctacactcttaaagtaattttcagtagttgcagcccattcagaaacaaacttattattagcagaagcagcattagaggcttcatgcgtcagtccattttgtcccggcaacaaatgcaaaaattcatgcaaaggctcgaggaaccaccaagatttagcttgatcctacatagatgcaagcatgagagagagagagagagannnnnnnagagagagagagaaagggagagagcagtatcatgaacagaaataagcaacttataaaaagtacccaaatcttagatttacctctgtaaacacaggtttatgtctagacagtccagtgctttctaaaagcttcagaagttcagacaaagctcttcttttctgttgacccttgtttgcttcgttccagagttcatcacaatcaacagcaattctagaaattctgttcagcttgcacaatacagcactccaagcatccttgtatgaaagactagtggcaagggaagtcgagcatcgtctaattatacctgcaaccatttcaatatagtttaggctatgcaaaaatttatgattacatcagataaaaaaaaatctaacagaaacagtaaagtctgctagtaaaaagaattagaaaaagccgttacctttaagtggtaaatcagtcttcggactttttgaagcaccatttgatttctcaccttcagatagtaactcaagcttcaaacttttagaagcaccatctgctttctttctccaatcatcataccatataaaccttataaaataatcatcgtgtaagaattctgatcccaactaaaaagaatagaacataacaaaccaataaagcagaaacacaaacctgtcatcatcatcgggcaggatcgcatcagaagcacaactactgaccaacttttcactatgtgctgcttgaaattttccttttttctgctctgcatccttgttaataaaaagcatcacaggctgttgcagaaaatcctgcaataacaaattaaggtcacgattacaaactctacatattttaattaagctggtaattacaggtacctgcacaataatctaaaactagtttttcatttggtttcttcaacaaagagtttagagatttccgttcattttattctagctaggaggggcatcccagtcctcaatctatagttctctgtgtcgttcttagtttcttataaaatatatttacaaatgttaggcagcatcgtcatctagaccttcatagcttagaaaaattaagaatctgatcctttgggaatttgcaataaactctaccaacatttgaaattgtattactcacatcatacttctgtatgagcttcttaaatctctgcctcgtcttctttgagttattaatgccccatgaacatagtttcggaagttgcttcagctcctcctttataccttttctggtatgttctatgtgctcagaaactctgaagggaaaaataatatcaccaatttatatatactgtcatggagaaatataaagaactataaagaagagactcaccgtggtaaaaattgcacataaaagccaaaaacgttgtatagaatcttcagattttccatcacaaacgagctgcaagatttgttaacaattaatataactcttcacgaaaattcatcagtcgaaatatttaacaaataagcatagcaaagatgactttcaaatgattatttactatactttgacgcaacaataattagataaagcagagatcccaccttgaataaaagtttacacatgaacccatatgtgtctgaccaaggaaagcaaagagaagctgaaggcgtcttctaaattcaccaatgctggatgtttggataaaatcctccaagctgaacattatgtagtggtcaacagcaactcaagaaagtgattaaataaaatcatttgaaagacaaaccttacaatcacagtcaagttctgaacataccttaggatattattattcataccagaactgctctgcttcaaaagaattggataaagaggaaaccacaactgaatttaagagagaaaaattaggaaccagattaatatagtataaataaataaaaaagtcacagcatctctagaattttcagagatctaaagttaaaaagtgaacataaagaaaaagaaggtcaacataagtgactcatgattcagatagtcttatagtaagttcgatcaataacacagtcgccgagcagagtaccaggtatgagaaagacaatgaaagtccatataaacttctagtcctttcaagaataatcattgcagaagttttaaccaaaaatttgaataaaaaatccaaggaagaaaaagatatacacaccaaatctcaaatagagaatcactgataaacatcttcaatatatggcttaaggggaaagaaaattaaaaaataataaataaataaataaataaactaagagaatgaagccttaatcaaactggcccattgataaacgtccctaaattccttgagagcaggcaaccatgactttcctaaatctaccttaaacagtttattaggaaagtacacaatagactatgttaacatagctaccatcctcccaagaaaatcaagcttctcaaatcaatgttgtcttcaagctcacaaaaataaaacagtgatttacctttcctgcgttgtgatcatattgatgcaacacctcatcaagcaaaactggccacgacccaaactccaacttttgccatgactccaccagaatacgaatatcctccagttgatctaaaggaaccaataaataaataaataaataaataaacaggcaccaaatcctaccacctttccagttaagaacatcacgatttatttagttagtcacaccattcttaccaaagattggaaattttgaaccattttcttgaagtaactgaagactattaactagaagttgcaatcctgtcagcaccttcacaaaagaaaaagagagaatcaatttattttgataagcaaaagctccagcatcaagtattcatatggaactgcttctgtagtctgacacagatagaaacatactgtaaaagctttcaaattagtacacttcaatgtcctagtaaaaactataattcccaatacgcattaaatatatatatataaaaaaaaaaaaaccttagccagtggtgtggtcactggaatattcaagaactatgattcccaatatgcagtaaaaatttaaaaaaaaaaaaataccttagccagtggtgtggtcactggaatattcaagagcgccaaaatcacatttaagatcttccgaagttcatgatgatcttcccattcttttaaaagagaataaagtcgctcttgtaaaagctggagtaatttcaccattttcgacatctccaaagcatttgaatcctactccaaaaaaaacgaaaaattaaagttaactcaaacagaacaaatgtatttcataaacaataaaaaataaaaaaccagcagttgctaaaccttatagaagttatatctgcaggcagccttgtgagatggaacaaacttctgcttgtgctccaaacaaagacgtagtaaatgctctggagctaaacgggcatccaaattgcacaacaatgaaccttctaagcctgaaaatacaaagttgtgagtaaacagtaataaggacaagaaaaagaaaaaatacatgggatacattaaaaagaaaatcacctctaacaatccttgtcccaatggtgtacgagtcaatgaaggaaagaaatcgatcttcgtcagagatttgataagcacccgactggaaagaagaaaaatatgtaaatagcaaataatcatcatgatcatcatagacaaaatcaaacatcaatgaaatctatgtatccatataatggacattgtaccatcaacattatcatatttctacatataattagataaacagaaattttgaactaaagaaattgaaattcccacttaaaatttatcataacaagttcagtacatgagcctcatttttataagagacatagcaaatacagtataataacaggcattagacaaatgctcatattatcatcaaaatttaaatacatattcagctatatttccgagagctcacatttataataaggctatttatcccaaaaagctggttgtgaatatggactacattgttcaaaacggattcctccaagggattacattcttcatctgaattatcttgttcattagaagcatcctcctgctaaatataagtttatttagcacataagagaaaattctcatgactaaatagatgaaaaagaaagaaagatgtaagcagcaactacataaaaattctcattaccttttcaacatgttgatcatcagacacagattccttccattcggaaaagaattccttcatctcggaagaactcccaccttcaaaagacttctcaagattcgatatatcaagttcgaaaatactagcaatcttaaatgcacgagtcctgaacttgtactgctgagattgttcttctctagttttagcttgttgaaatttcatggacgtccaaaaatctgtgagctttccaaaagaactatccaagatctgatttataatgcaatcaaattatcaacacaactgaattgtgagataccagcccaacagtaatttaaatggtgaagtaaaatataccataaaggatgcagagtcaatcatctgtgtacaagatacaaagtgtgctgtccggaaaagaatattctgatacagagaagcctccaggtgtgtacgagagatctgtcacatgtatataggatttaatcaatgaaacttgtaattaatgagatttgtacttagcttaactaagttatataataaaataaaaattaccgtttcattagtagtaacagcatcacatgaaaaagaaactagctcttttagtacgtccatatcagcagcacagaaatctgctgagacttctactttgtaaggtggaaactcaggcagctctctattcagattgatagatacagtttgtggagaagaagccaaaggaaatctcataaatgtataaatcgaatcctgccaggtccccaaagtcagttactgagataacaagaaagaagaaattactttagcaaaacaacaatattctggtacataccgtaaccacatttattttgcatggattaactctacttgagctacttttttcttttatggtactcaaagcttttttctgcatgagactagaaacaactaaggagaaacccaacttcatttcatatactgcaacttggacaggttgtacaaaatcaatgtattctgggtagtcgtctgataacttttcaatgaaagcagtcgctgtattctggaagatgggattaaaaaaataagataagatacattaacggaataaagtacaaatataaaaatataagcatcagcctaagttaatgaagcttaaatgcttcacaatattcaatatacagttaattagaaaatcaaggaaaattacctgccagttataccctttgtcaggaatctgctctaagctcatggtgtcaatatcactccataaaaactctgatgatttggataaggcatgcgcaagaaactcattgcaccgatgttttaagtttttaaactttctatagtcggagcgaaacacaatctaaagcccaaataaaagcatagtggtcatttatcattagattaaaaagatgagacaaaagacaaaatatgagattcatacaaatagtctatattttttcaacatctatcttacatcaaatatgcaagtggaaataatgccatataatattaagccaatcaatatattaaggaaatcattaaggagttactagcatctgtaccacgtggactaactaacatatgatcgtctctggtcatgcagcatgcaaaagaaggaaagcatgattcttacagaagcaatcatctaataacaaaaaaaaattagaacatttttatagaacctttctttgcagtcttctcttttccttttcaaggtttcccaaagtttgcacttgttttttatcagcttctcttgttgaaagccatccagctaaagagttgcattcccgtcgcacctgtttttggagaaaaaaggaagaggaatcattgaaacatcttaactcatacgaagactacttggtgatggcaaagggaaagctaaacttttagtaacagtttgtgtaggaaatgttggtagatccaatcagataataactaagattatcttggtgaatctggtcactatgatcgaaatttttgagacattagttgtgtatgatgtacactatttagtatctattgtgaaaataattgttattataagaaactgaacttgtattatggaggttattacatgagcaaagtcagataaagtacaataaaccagatgaaaacagtaacttgcatatatgtgtgtgtgttaaaaagaattagaaaaaaaaacccaagattacaggaggagaacaaaagatacctgaatttcaagattacaggaggatatcttgtcagacagctgtgaatccttataatggtatttcatagctggatccaaatcatcacagcaaagcaatagattcaaacgtaaaaccccaaggcgtagccaagcacggccagcattagagatgcagtctgtaaatgtaagcacaatcaatatgaagcattaaaataagaggagaaattgaagatgaatcttatctagaaaatatcctaggttcaaaagaagattcatgtctatatggaacttgtaagatcttttttttaaaaaaaaaaggattaagcactcatttttcaacaaggcaaatagaaaatactatgacaaccataaagccacaatttcaaactgtaaagataataaaaatataatcaccagtggataagcaatcacgatatagctccatgagcagtggtgcaataaacttctccaatgacattttcagcccattatggcttgaagacagaataagggatctgagggactggagcttttcaagcttcagacttccattctatcacaccagagaaaagtacagtgtatagaagtaaataagtagaccagatatcaataaatcaaaaaggcagtaaattcttcagagtacaatgaaatgcatatatcattaaccaagacataagtactttagcagcaaccccttaatatgtaaggaagaataagaaataaattaagagagcaggagaatgatactagttcctggtggtgactaatttatttaagtaactaaagaataattagaaccaaaatgaccagcaaagtgaaacatcaaaagctactctcacacctacaacactgaaaagaaagaagtacaaaactatggacagaaaattacatcggggacttccaatattcaaaaaaagaaaaaaatagaacggaaaaatgcagtgacaacattaacaatctttagccaaaacacagccaacaacttgattattttccacccaaaacacaaaaacaaataaaatgaaacaaataataaacataaaaactataattggtctatctctagtttaaaaaactactttgcacgttcagttttagatgataaaaataaatctacttgcgaccaggtgtcaataatgaaatgaacgccacatctcaaggcatcaaacaactcaatctactcctcgtggataattattagtatgacttcacgcccattattacttatttatacccctttcaatcaaagcaaaattagctaccatgcctagattacactagattaaaaagaatcaaaatagcttccattacacattcaacttcaaactgcatggcattatccacaagaatgaaatccacatgtttgaatccttacctcaatcatacttgttcggagatcacagagattagactttatttgttcgaaaacaacagcatcaaaagctttctggtgtgcaactataatctatacaaaagaaaaaataaataaataaataacacacaacaaaacttaaaaaaataagagtatggaacagtaaatctattttaaacacaaaagcataacaacctgctcaaaaagatctcgaacagcagataaaagaaaagtaggcaagtccgatccaggtaaaaggcttcgccagagattacatgatgcaactttgagctttaaagagcccgaaaaataatctttgatagctgtggtactttgcctgaaccaaaagagaatatcaaacaaaatatcaacatttatatttaagaaaccaaataagaacatatatatagtaactaacagcataaagttcatacagatgctatacttctcacaaaaacatgacagtgcttgtaatgacattacatagaggttcttttcttcatcttaactttttattgttattttctaaactagatcattgcctaacccaacaatatattttcttcatccaacatctaaacttgactagagagcatttttacattaagaaaatatcttacaatatttggaaaactgtattcatcattacaggctgaaacagcatctcaggcaacgaaatacattttttctgggaagcatcgggtattggaatatcttctgtttggaaagaatcgggaactggaattccttgagatgaaaactcctgcatcacaacaacaaaccataatacacaaattattaactcattcccatccccttaatgagataacgaaaataaaattcctataggagacacagaatacatctagctactcataccttgatagaaatcgggcaataaatccataaaaactgatgccacctaaaccacatctcaagcacaaaggtcgcaacctttgcattaactgcaaatcaatttcaggtgttagaacataaagatggatataggaaaacttagaatagaaatgcattgacctgcatcaactgaggtccatgtatcaagtattgataacattttttgatgtggcaaaaacatttgcgggggccttgatgagaagactaacgaaaagttcaaggtagccttcaggcgattagatacgctagtccaatcctgacaaaaaaaaacaacatttaaaaaatgaaatacaaacaccattgcttaaagagctgctgcaggtaacaataaactgaaatcaacattacaagaatttacattttgagcaacctactacaagattcaaaaatggtaaaacatatttcatcttaagatcaaatagtacaatatgttctagagttaacagggggtgaatgcaagcataaagctcctgcccaccatcttccacttaacacgactaccacacttgggaactatctaataactgttagatttataaactgacagatggctaacacagactgaaaagatagctaaaatgacagataaattagtttatatctttcagcaacatgcagataattttccaacagaattgtaatgtactctattctgatactaagtcagcgtgtcacttggaactaaatcaagttgtgatgaaatgcataaaatagttggaaatactcataataccacagattataaatgataaatttaacatggagaaatacgagtacaagagacaatattactcagttaaaattaggaataaatttcaccaggaaaaaatcattatgaatcaacatgaaatgataaaaatatcagaaaaaaatatcaaagatgtctcgtagctttcaaataattaaggatcacaagaacccattactccacctaggtaaaactaataaaattatttttttaatcaatacagcaggacttgtattattaataagagaaataaaacaaaagatatgggagtatgagaaacttactacccatatgataaacaatgaaacagaaaataaaaaataaacattaagtagacctttaccagctgtaactcccttgaatcagccaaatgggcggatgatagctcctgaagcagctccatatccaagtagaagcttgtagtgtcaacaaaaggaagagtgcaccgccagctatcaaaaccggatttttgacacaatatctcattggagaatgaacaaaaagtagatgaatttgctccagaaacatcaagcttgttatgctgcaagtgcttctctaaatttgattttgcttgttcaaaccatttcccaagcttttgcataaactaagtatacattgcacctatatgtgttagttaaaagaagaaagaaaccctttttttttcaaatgcgaaacttgcagcaaaagaagctgcacagcttttactgctacgaaatgaagggaactcacctcagacatttcatccagatgcatgacaacatggagctcctcctcataacagtacaacatggaaacacctagaaattaaaatgttacaaataaaataataataattattacaatgtgctgtaaaagataagaaacattcacccataaaaagattgagaacattaaacaccaaactaaaaggccaaaaaaaaaattggtaaaaaaaaaacaaaatctaccttccattacaaggaaacgaagtgtggaattcgatgatgcaacagtttcaatccaacgatgatccactgaaaaataaccatcaacccagaaaactttgaagcatattatttattttagatagtaagaaaagtaaacataacttaaaatatagcttacctggttttaatgatctttcccttaacgaccttgtctctgttggccagcatgactcgcaaaatttcagaagctcttgctgcttcgcaaataaaagagcagatgacggcaaatttggatgaccaccataaacccacaataaggatttctctgaatgaaatcgccaagaataaaccttttccagcttcttactctcgtcctacggaaaagaaaataaactgatcaagctctcattccattacagaaagagaaagagaagaaaaacacaacttaccagcaaccgattaaatgcttctgaacaaattcctttcaattttgcagcatttctcagcaacaaacgccaagaaattagcagctttcccatgtcttcttcagtgttctttgacctttctccattacttgaatatttttcaatattattccagaaatctatgtggttctccagaacattagaaaacatttgaataagaatatcaaatgatggagactcaacaagcatgaaagatggatcaacaagcttcttgaggaagtcctcctcaaaactccgcagtaattccagtaatggcttgaaaccacgaattaccttgttgtcaaagtttttgcactcatcacctagctgtctataggtaagcttcaaaggacccacacatttaatagcattacacaggaactttgtgttttcactacttggcaagacctcatcaaccaactcagttgatagaattggtgttggaaacttttcaacatcatctattagatatggagtacacttaaggtagcagtcgaccatatacttccaaataggatgcttcataaccccttcaactaaattagagaactcagataagacatggcaccgagagctaaacgttctaaaccatagaagatacaaccttagatcatcctcattggactgttctattacccattcggcagcaaacaacaactttgatttggccaattcaacatcagaactgctagagcttgaagtagtcaaatttggatcacaaggtaacataatttgatgtagcttcttcacatccatcaggacaggttctccatagtcactagcagttgaattctggtacaaagcacagccttcctctcttactttgcatgacaaatactgagctgccaagaaggaaagatacatgcaattttgctttacggtactttctcttgggtacaaaacaaaatctctcaacttcagaggcattggccatcctccaggcacacacagaggtgaatccaacaaggaagagtcagaaaatccagcaatagataagtaagtatcttttgcatgacaaacaatattcccattagcctcaccaagtgatgatatataaacatactcccaactcaactgaaggctccagataggctgattaccatccattaaaagttgctgaaacaactggacccaacgggaaagctcaagatatgttattgaaatattgaagcgtaagccttcctttctagcataaaggtgtgatttggccattacttgcaccaaactttcagtgggaataccagacaaggaaaggaatctgtgtacatctttaagttcaaattcatcacaaccaaaaccaatggattgatcgggtagccaacaaggctgcatcaaaaatatttcaattcctctgtttcgcatagctcgagaaacttcaccgtaagttggattaaccgtgaggaacatacgaaagttagggtggggatggagaataactggtttgccatcaacaataccacactcattgattgtaatcgatcccaatggctcaaccaaggagtttatcctatcaagaacctatacagaatattccatggaaagaaaaagatgacttagtaagttattatagttatgtacagaaaaacatttcataatgcaatatatattacagatgaatgtaagagaaaagaagaaaagaagtaccgttggattacaacaattcgcattctcaagtacaatccactctccacggtctatcgccttcactagctgcccagaaacccattcaaattttgctgaaaacaaccttttctgaagacactctcgtaacttggaaactatccttgtggctctgtcaagttctctgctagaccaggatagtgatagagcgctttcttccataaccaatttgagttgttctataatctcatccagcagagtaagagaattggcaagcctttttctatcttcctcaatactagaagtaaagcatgacaaaacgtcatgatttatactggctaagaaaaaaaaccatttggagataaaccccccttcacttattaaagtattctgcaagtactccaagcttgaaccgcaatattcattcatatagcactctactagactaacaacaaagcgaaaattccggatggcattatattgctcaaaacatccaagtatttcagagatatccgtaccagatgatagatgtaattcatttagtacattgccagtgagctctgctagcaacctaatcaaggaggtcttaccggatgacgttgggccaactaaaatacacagccattgatgcttcatacattgtgccacagcttccaaactttgacgaactgctggcaaaacttttagtgaatcactagaaactttagatgactgaacacccttcctttcaatggaagtattgccaactatcaagtattgtgaattgagttggactcgtggcgaaggatttatatatggctttactttgaaaatctcctcgtatagatgtagcacttgtctgcggtcgtcttctgtgcgcattctttgaaggtaaacagtgttaaggaagcaatactcttttgacttgtccggtgcacctaattggaaaaaggaaaatgagaatcaagaatcttagaacaaagattatcgtctagaaacaaataacttatcccaaaaaaaataatagggggagggcattcaaaccatatataatttcacatgatcggaacacatctcgtagattgaactcccaaggagaaccttcctgagcaaatttatgatgcaacatggtgtcctcatacaaccgtttattaaataaaatcaaatttttaagcagtgaactaggtatatttggaaaacgtaaactacagattgaatcgtagtcttcttcaaccaactcatcaacataaacctgaaacaagagacagatcatttataaccagtgaattgctaagcatgcgcttaatgacaacttaaattcaacgctaagcttataaaaggtaccttagtaaaacggttgagaaaagatttaggaaggccctttctgccacacccttgataagaaggattttgacacgcaaagattctaaaggatgatggacacttgaatgtaagaccaagctctgggataaacacctccgctcgatgatccaaaatagcattcagaccctgataaaaatacaccttgtaaatccacaaaaaaaaaaacagaaaaaaaaaacctggggcaatgttcttactagagaaaaattcagaaggcttcagccgtacctctaatacagattgcggagcaagattaagctcatcaagcaatacccagcaaccttcctttaaagcctgcaatattagcatgcaagaaagaagacaatattatatcatgcccagagtaaactaagtcaattgatctttcaagagataaggccattttacttgtaacaagattccatctgaccaagcaaacttcattccatcatcactctcaacaggtaagtctgaccccaacaagtccattaaatcagtctacacataagcataataaactgtattaattgcacagatgaggatttaaaacaaccataaaaaagcatcaacacagattactaaaaaattaaaaagaccataggatgattgaagattacagacctgctcagaaaagtttatccgtacaactttgtgcccatgaagtttgcccaaggcaacaattaaactagtcttcccaacacctggactaccttccaggagaactggagtgcatatgtcaaacaatattgttctttattaatattttgtttattaatgcaccaagacacaaaataacaacttagattaaagcaaccatacgtaagcaccaaaaatgaaggaataccaggttttgagagctgcatagcacgcattacacgcaacgcatttctgcaagtggttggtgccgaaaacttaaattcattatcttcacagcattcagaacctatagccatagcatttctgtcagaggataccatagctaattgactatgcataagacttgcaaaaatagtataagattcatcataagaaagatgtgaagtctgtgtactataaacatctaaatgaacactcaatggaagaaaatgattacactaaaaacatgacaagatcatggagagcaacaaattaccttcttgaatatagaaagaatcagctccaaacatattgtcacatagggaaacatcaccaattgtattaagttctccccagccataattttgcattcttgaaagttttgagtacattgaattagccttgtccacctataagcaacatcaaaagaaaaaaggtagatcgctttaatgaatccagagttcataattgcagaatgagtgtaacctattgagtattatgcatgcctatatatatttcttatatactagcagtttgaatttccttcaagtagcatcccaaagattcaagaatgaaaagacaaaagaatatttttataaaacatgggagaaaaagggcaaggtgttggaagtataaatggtcatgaatgtagatacaacagatactaccatcgaggaaaagatatcacattcaaatattaatgataaaaaaaaaccttcatttgttccaaaagaaaagacaaacattgcttcctcaactctccagcatctgttttggctattccactccctgcgcaaaataaataaataaattatcaaacaacaaaaaaattatattgaaaataaaaaagagatattaattgcaacaattaccaggacctttgtttttatttaatgaattagctttaaaattaaaatatagtagggtggagcacaccacaaactaagcacaattatttgacaaaaatatggaattgagtgaagctaaacaaagaaggcacctaagcttaatccgtcaagcaaaacaaggaacactccatgaatgcatgcatactcagctcctaatctgcttcctgtcacattaacaaattcaacccaggaaagcaaatctctgatagtgagcattctcccaatctgtaaatggctgaaccactgcaaaccaaaaaaatatagcaaaccacaggtcaacaaaatcagtagactggcagacaataatgcaattaaaacattgaatgtcagaaaacacagtaactagcaaagacaagcttacattggaagaactgaagaacatgatgtatgaacacacaaatactctaaaagactttacccacttaaaaaagtatatattaaattggacgcagaaaaaaaatcttcatcagttttcaatatttgtcaaaatgaaaataatatttcaata

SEQ ID NO: 14758 - DNA, 6348 bp, Cannabis sativa
  modified_base (5277)..(5280): a, c, t, g, unknown or other
aagaatttagggggggcgggggggaatatcctcaggttttcattaatcaagccataaactctttccatgaccacaatggtgtgtgcttgacagaagatcaaattattaaccatggataaaccagcatttgtaatgtgatagcttttaatgcatcatgaaaaaagtacagaccattgatcataagttcataacacactctgtaacagaagatatctgccaaattaagaaagtacaaactaacaccacaaaagaaattacaggattagacatggatgaatatgggatcataattttaatgcggaagagagaacaaaagtggcaccttaacccttaatgaaaaaagaagtgcagagacaagtcactatgccaatgccacatgaatctgctaatagagcatgtgatcacagtatgttaaaaagagaccactgctttagctcagaagttttgattttagttacttctagattctctaggaagagaggtccagcagattttatcagccctatgatttgactatatgtaaataagaaccccttgaatcattatgcagatattaatgaggaagtacccagcaaaagaagctgcatagcgtacataaggttcaacctctgacacggatgttaatttccaccttacaacttgagcaatatccaggcacacccttttacccagcacaatttgtaaggcagatgtaataggatctcgagctccagtggtactgaaaaagaaaaatcaagcaatatagtcatttgaagtttaatttagttccaaatcattgcaaaaatataatagcaattcactcaatcaagtgtcatttgtcaatttaccagttatcatactttttgtttctgcaagcttcattggtatgttagcgcttgggtaatctagattttatttcctcttgacaaatttctatcaattttaaattatgctctaacatattaaagttaataaatagagaaatgtaagaactcatttcatgttttatgacaaggtctatagcccaaacagaatcaacaaaaaacaaagtaatacctgagaaaaaagtctagactttgacaaaatatcacactattatgatatctatcttttaaatggaatatcccatattttgactaatgcacatgcttttgctaaggaaagctaagagatgtgaagaaagacaatgtaggaggaatacacaatatcaacaaatcctaaaaccttaaatgttaattataattgatagttatgttgaacggacagaggacaaatcataaatcacaaatccatgctttgatatgcaatgcatacgaaaaaaaaaaaaaaaagaaaataccacatcacaatggcatcagttgaacctgcaggaattattccaaatctaaatcgttcatttgggaggagcaaatcagggtcttggtctgccaggtttaagaaggtgcaaggaaaaaagaaataaagatattggatttaagcattacttaagaaaaagatttcaaaatgtatatgtgtaggaaaagaaaaaagaaaacaaggttagaatatgcattatatatttgaatactttcactgtaagaaacaagtgcagtttgtaattcagattttatctaacctgtgctgcaggatgcatcttgacttcctgtaatatcatatataactattaatgtgttagataaaagtcgaatccaatgcttgattaatacggaaacatagttttaatgcaaatgacagtttcacagccccagaccattatgttttgaacttgggagaagaggagactggtcttcattctgagaaggttcagcaactacctcgttcagatcattaacaccagaactatcaagaactccattagaatgaggaaaatctgaaggagctggggggaatggggctttatgtctagatttaaggaacccattaagaatttcattgaagaaaccatcaccaccctgaaatcaaaacaattggaaaactaattataaggttaaggaaccgataatcaataggaatttgaggataaaaatctggaaaaccagaaagttttaaaatatctgtactaccagaaatttgtttactgtatttttggatcaagggtactagtaaaaatcacacattgagatggagatacaagcagtcacatggaagattattacttacaacagtaacaactccatcatacagattcagttcattgtttgaagtagattgcatcacatcaaatgcctgccctgccctttgtgtcacaatcacctatggaaaaggagaaaggtaaaatcttttaaaggaaaagatgtagaaccaaataaactatagttagtttagtatgacaatccactgggcctttttatcctgattactctattagggaattttttttttttgaaagcattctattagggaaaattgataaccatttaaagaggcatatgattctgttatcccatcagctagcagaaaaacttgggggactttaacattcaataagaaccatcttaaaagcctaaattctgcgactgcattaaacataaggaaactcaaaatcacttttcctgtgatcttctgaaatttcaagattgtaaatttgaaggattttaagtatctgaatactgaaacaagaaacagttgattcagtaactggtcatagcttacacaatagggattgtcaaaatccctgcaaaaaaagcaacgtcttctccaattgaattgaatggttaaatgtcataaactatcgtggattatgaaagacccggagattgatagtaaaatagtaatagatggtatatgggtaattggggtagtggataagctggaaaagatagtatatataagaaagtaggaataatgcgagaggggcatgttgagtgacattttgtaagagctttgctctagggagagttgaggtctcttgaacacctcattgttctcatgtggtctttcagatttgcctattttctacttccttaaaccatcaatttgtctcagttttagcctaatttttttgctagtgatttgaggatctctacttggagtctatcagattcccacatacaatattagaagaaatattgatcatgattgcaaaccttcttgggaaaaagagaaaaaaaaaaaggctaggttttacctttgttttcactttagcacgtgagaatataggagccaccatttcccagattctgtagccattgccctttccactccttggatgaatgaaaacctgtcatacagagctgaaaaagatgaatatcctggagaaagcacaacataaaattctaggccatgtcgatttactaaacataccataagattctttggcctctctacttccagttttatagcatcattaatttgattcgcccacatttgacatatttgcatatccttgtgaccaaacgtataaacagccaaggcccatacagaaggctgagtctttgacctttcaaaaccatgcactgtaaagcggtacatctgcatcaatgtgaaaatagtgccttggaaaacataatgactatagatagaagaagactaccttaagtcgaacaatagaacaaacctcagagttctgaaccaaaatacttgctccatgaacaataccataattgataaactcagcagcatatacatcactgaacttgatctcagttgcaaactttgaacccaatgttatgcccaaacaagttgtctcattctgttccatcaaaacattatagttaacataaaaagttaaaaaggagaaaatatcaaattatgctatacaaaatctatgacacaacagaaaaatgggaactttgaacagaaaagcagctcaattacatcagtccggctaatcaactatcggaactcgaaggcaaactccaagttaacgataatttaatcagattaataaataataattctatcaaataatagatttccttgaatcccaaataaggtgattccgaagcaagccaaagttaatacaataacgatagactttacaatacaaacatgtgtatatatagctgcgaacatatacaaatatatgtatttatatatatatatatatatatgtgtgggtgtattcattgtagagttatctagtgaaaatcatagttaattgaagaaaatgccgcgaacaaaactaagaaagaaaagttaaacttacataatctgaagatccaaggagtttccaagataacccatctgagttaaaggtgagactgacttccccaacatgatccaacaagacggtcgagctcagagacgacgtttcaccaacaaacgcatcatgttcatgtggctgctgggatatgttaattggtctactactactactaccgccatctccgtcaccgtcatgttccatctctcaattcaaacccaaatttcttatttagcatcactctctgaaaagtgaaatctgaattaaagaattctgtaaaaggggtttcgtcgggtcaaaatctgattttgaataatctcatgacccattcaataaataaataaataggacatttgggtgtaacaagacaattgtgtcagttaaataacgacaatgacatcaaatctaaatcagaatctctctactgtaatactgaacaaaattcacgtatgaaccaattaaaagaaagatggaatgtggaatgagctgaaaatggtgactttttacccaagaaatgaaggagatttcttttggaacagaatagtaaaatatttgaaggaatgagaatgataatagaaaagtaaatgaaatttaaaatgtataaaaaaaaaatgggtgtctagacttttgataccttctatttaatttttctaaataaaagttaagtacttgtatctttaatatattttgtattttgtattttaaaattttatgaattttaaattcaaatttaattatttgattacatataactgaaatttgtttggttaaattaattaaatttgactttaaaatgctaaatatatacaatttaaaaatatgagataccaattgagttttttttttctttttgaaataaaatcatcatctttattaattgtaatccatagtgattacatgattaaaatctggagtaacatcattactcctgataacacaatcgccaactaaataggatgctcgagctaagaagtgagcaacactatttgcagaacgtctaataaaattgacagaaacatctctcaaatcatttaacatcatcttacaatcagaaataacactttcaaagtatgaaaccataggaagagaactacgtaacgcttgcaccactgtaaaactatcattttcaatgacaacctccttccaatcctttnnnntaatccaactcagcgcctccttaacacccaaggcttccaccatttcgagttgcagcactcctgaacgatagcagctaaacgcctctaccaacacaccactttcgtctctaattacccccgcgaagctataagttccattctctgaaaaaatggcatcatcaacattaatcttcaaggtattaacagctggtttgatccatgtttcatctccatctacatctgtaaggaaagcagcagtgggaatcatagttgtatcttgagcccgagtccaatctgtgaggagggctttagctaaatgaacaacgctctcaaccgtgggaattttctcagaccaaactaattcattacgatgcctccatatcacccaacacgtcattgcatcttgccttcgtttttcctcatctacctgctgtaaaatatttgttttagtagtgtctcaaagttaaaagttgatctaaattccaatcacaatataagatgatgatgatgtaaaatttatatggcaataaataaatttcttttatatttacttattatttttaatattttattattaaatttaattattatatattagagcactcctaataattcttttaaaataaaaattcttaattttttttaaaaacaatagagcaaaaaagcattccaacaaatgaactcctctattttaaagtattgttgtttttataaaaactaggcaatgataccacttagaaacatttttttatgttgtaaaaaataaaatttacagttaatatattataaaagaaaaaaaatattaattaattaatatgttataatctataaaaaaataaaaattataattttaatgtattaaaatattaagtcacattattaaattaaattattattattaaaaaaataataacataaatattaaatttaaagaattaaattgtaattaattaattatcttttattagcaaataatataaaaaatagagaaaataaaataaatttaaaataataagagaatagagaacataaaatacaatgtgttaacgaagattttcgttaaccaaatttaagcctcacaatattgat

SEQ ID NO: 14759 - DNA, 3303 bp, Cannabis sativa
atggcagcctccaagaaatttcattaccaaagaaggcttgagtatgccttatctcaggtgtgtttctcaccctaaatctaaacaaataatgaaggaaattcatgaaggattttggggggaccacactgggggtcctagtttgtctaaaaagattttaagactagggtacttctggcccactatgaggaaagaatgcatagactacatgagaaaatgtgaccttttccagagatttggaaacatctcgaaggcccctccaaatgaattcgcattatgacaagtgcttggctatttgtagtaggaggcattgacctcatcgggtctttcccaatgggaaggggcggagttaaacatgcaatagtcgatatggaatatttcacaaagtagaagctaagccaatgaactcgatcactgctaaaaagaccctagattttgtggttaaaaaaattatttgtcgatatggactacccgacatgatagtctcagacaatggcaaacagaattaacagtgacatattcacataattctacaaaacatgtagagtcatcaaaagcttcttcgcggttgcaaggccacaagtaaacagtcaagtggaggttgtgaataaaatattataggtcacacccaagaagaaactccatgcttgtaagaacaattggcctaaagaattgccgcaagtactctgggcatactcaaccaccataaacgacaactggacactctcttttctcaatggtatacgaatgtgaagcaatggtcctagtagctagagagtattattccctcccatagatggacgacctacgacccaaccacttatcagtcattgctacaagaattactggatttcgtagaagagattcaggaggagtcacaaatacgtctcgccgcataccaaagaaaagtagaaaaacactttaattccaaggtcaaaaatagaatgttctcagcaagagacttggttttgagaagggtctttcccactttgtaagacctcagagtgggggtgttgggcccaaactgggagggaccttataaaatcgaagactaaataggctttgggacctataaacttaaacgaatggatgggtccctgatctggagagcatggaatgttgatcatctctgaaaatactatcagtagttaagagtttggtatttaatttcatcttcaatttttagttaaaggaaccttttgcaagttaattatgaatgctattatccttttcaattgtaaagacaagttctacaagtgactcaaaaagagtaatctatttcagtcacttggggtagtgtataaatgtaattaaaatgcataaaaatcctaaagaagaacattatcaagaaggaagcatgaattagaagcataaattaaaaagaacaatggggataggccaataaaaatgtctacacaattaaaaaagattagaaaaattacagtaaaaactccaaatcaaaaggtacttttttcagacaaatgccctaagcttgcagaggaagacgggggcgtagtttctctgccaacttggcatccaacctcttattcttctccaaaaagaaggccaagatagctttaggattagaaagggagtcaagacgaggctcaaacggttggacctcaatcacatgaaaacaccatcttcatagtgtttgacacaatgcttgcacgtactggggccaaaaaggacggcttggtagatctttcagcctcctttttggctaaatcctagaattcgtagagatccttgagctcgacaaacatatttgcaacagctcaaagattgtccttatgtagctcttcgagcttaagcaattttgacttaagattctcaatctctttttgggcctgacgcatgtctgtgtgatcatgatgagtttgagcttcttgaagagtagactttgcctcatttgcagccttctggtcctattccttcagtgccttctttgctagaaattcatcattgagcacctcccgttgctcctcggcctccttgagcttactgagcacctcggtaatgccaccttgagccacaacagcatatccttagtctattaaagtcttggacaaccagccaaattcaacaataatctgttcattttaaacaccatagttaacaaaataaaatagttagtaaacaagtcgcatgatgtgcaacgacttattgaggttagtgccacactcatatcctaaatctggtagagtgggctggatgaagcgcacacaacaaatcttttcgtagggagttgtactaagtcagaggcaaaatgactcatcattttttacgcaaagggagccaaggaagatcccaggaagttggagaaccagattatcatgggttccaagttcaagtctcaaacctgaaaagcgtactccccacggagaggaccatcgtaattgtccatcaactatatatttcctcaaagcccccgcttttgcatttcccttagtctggtcatcaacagcgaaattgcgcttggctattcagagttgcaagtgaacatcatcagggtggacaagagtcaaaggaatggactggatacctagaaaaacaattgctttagaagaaatccccgagtcatcaatactctgagaaggcagcataacgaaacatagtaattgtaacttaaattatataagacgtgatatttaattataccaacagcaattttattacataaaaaaatattaactatcactaatacttttagcatttctcttaaaaaaaaaaaaggaaagtcaattttttgtttaagatttcaggaaaacgtgggagcaggaaggacccagatgaggatgtgagggtgtaattaatttgttaggtttatgtttatgtttatgtgtaggtaattaatattgttaggttgacatttatgatattgctcaacgttcgtcataggatattgtggaagaggtcttctctccatattactttaccatatttataaaatttgacaactcctttcatgatcagtatgaaaatcaaaactctatcttcacttttaatttttattttattttatttattgttttttctcacatcattaattctttactcgtccaatcgtcttcatcttcatcttattattattattgagcattgttacagtggtggtcaacaccatgaattattatatgtgagacttgctataaaattatacaaataataatatggggattgggatagattctatgaatacacatattcttcacaaatttataattaatggtcgagaatagaataaattaatattaattagtaattacacaaaataacaagcagaatatatatatatatatatat

SEQ ID NO: 14760 - DNA, 5372 bp, Cannabis sativa
tatgtgggttgggtccgatgggttatgtggtggtccgatgggtgggggtccgatggtgttgtgagttgaagtttgagattgaaggttatgtgggtcgaggcggtgggagttctctcggtcggatcggggctgtgggtctccgtcggagttgtctccgtcggaggagggggtcgtctcgtagtcggagtgggggtgagggggctgggtcagctcgtactatgtggtgagggggttgagggttcggttgggttgagggttattcttgggttttttatataagtgtcatatatgttttattttgaaatgtattggtttaagaataaaatattagagtttttaacgtatagttttttaaatttcccttattattttgctaggtatattataattaaactaatttttaaataaaaaataaaaatttaattacatagacctattatgaattgtcacaagttattaacttacaaataatatcaagtacttactgaaatttcaaaaatataatttaatattatcattataaaaaagaaaatatttatctacaattaaaaattaaatttaaatatttatgtaattatatcataaattattcttcatttaaattttataaaattgttttaattacatcatcatataaataatatttaacattcacactaaataataaaatatcaataccaaaattaacttggggatacaatcacatgatggaatatgtccgaagatatttttttaatattttttaaaataatattcgttataattacaatatcatctctgtaaacttttaaatttttttgaatactttacagtattaaacggtaaacacaaagttttcaaaattctagtttactacatttattcaaaaattattaaacttatttttgacattataaattattagaaaattttcaaaaatttactaaaataacattctaactataataaattaaaataatatcttctaacactgaaagattgtaatataaaattgacaataacactaatcacaacttgaaatatcataattacgagataacgttactttctataataaattaaataagtgagagccgatattaaatttcttctacaaacgaatataaacagaaaatatggtagaaatatgttagaagagaacacagttgcaacgccgccgttttgtacctcttcttcctcagctctgccataagcatgggaggatctgaaaccagtaaggagcttatgcagttggagcacaagaatccctccacttcacctctaggtcttttctctttctctcattcactctctttatccctttccttactctattattattacactctctgaaagaaagaaaactaactctgatgaaaagcccaccattgctcctgccccccgaatgtacttgctaaatttcctatcttttggttatgaataatagtttatttatttatgttggaaatgaacctatcttagtttatgatctctgaattgttttggtctgtctgtaaaatttgttgttgtttattttctttcttttttctcatattttaatggcattgtgaaattttaactagtgagagtaggtttcaatggagggaatgaatcaaattttaagatttagaagtgtagaaatagaattagtaattttggatttcttttcttatatgagcttgttaagattcatgaagtgcctttcatagtcaatgaaaaattgcagcttgatccacaggttggcatgctaatcttacatttgaagcaagatttggtgtataacaggcaattctaagagctatgatattgaattactagattgaaatgaatctcaagttattgaaatggtatctctttctgcaattctctctttgtataaatctatttgacctttgttaaatgttatgtgaataataaagatccattcttttaccaattgcttatataataatgcttcaataaggattggctttcttgacttaaactaatcaatttacaggacttgatcttcaaacccctgatgctgtggctgctgctgaaactggactgtgggtagaacgagaagatgagagccatctgcaagccgcgttgcgtgcagccgccttccattctacaacgctgtttgtcggggaagattttggtgtcttgtaatgaactggaatcattgtcatcctcctccctggtcgagaacttcaccagatattgctaccagagacaactgccagcggccatgggagctctggaagccatgcaacgccgcggagtttgggctaattcgattacttactcggagctcattaagtgctgcttggcttgtggggctgttgaacagggtaagcttgttcacaaacaccttttctcaaatgggtatcagccaaagacttttgtactcaatgttctgattagtatgtatgttaaatttggtatattggaggaagcactggaagtgttcaacttaatacctgaaagaaatgttgtttcttggacaacaatgatagcagcttactctaatgctaaactcaatcacagggctttggagttattggtattgatgcttagagatggtttgaggccaaatatgttcacctactcctctgttctgagagcatgtgtggatttatggattcttaaacagcttcattctagtataatcaaagttgggttggtgtctgatgtttttgttcgtagtgctctaattgatatttactcaaaatggggtgaggttcaaaatgctttaggtgtttttaatgagatggtgactggagatttgattgtttggaactccatcattgggggtttctcacaaaacagctttggggatgaagctttgaatctgtttaagaacatgaaaatggcaggttttgtggctgaccaatcgacactgacaagtgttttgagagcatgtacagggttagcgcttttggaattaggtagacaagttcatgttcatgtgttgaagtttgatcaggatctaattttgaacaatgcagttcttgatatgtattgcaagtgtggtagctttgaagatgcaaacagtttgttccataggatgaaagagaaggatgtaatctcctggagcaccatgattgcagggttagctcaaaacggtttcagccaagaggcgttgaagttattcgagatgatgaaagtttcagggcccaaaccaaactacattacaattcttggagtcttgtttgcctgtagccatgccggtcttgtagaagatggttggtactattttcgatcaatgaagcagctattcgggatagagcccacaaaggagcattacggttgcatcattgatcttcttggtagggctggaaagcttaatgaagcagtaaatttagttcatgaaatgaagggtgaagctgatgccgttacatggagaactttgctcggtgcttgtagggttcaccggaatgtagacctagccatacacgcagccaagcaaatactaaaactggatcccaaagatgctggagcctatattctgctatccaatatctatgcgaattctcagagatggactgatgttactgaagttagaaggagcatgagagccataggagtaaggaaagagccgggatgtagctggatcgaagttaacaaacagattcatgcttttactatgggagataactcacatccattgatagacgccattaataagcgcctaaaccagttgattaaaagattaaaagaactgggatatgttccagacactaattttgttttacaagatcttgaaggggaacaaagtgaagattcacttcgttatcatagcgaaaaattggcaattgtcttcggtttgatgtccttgccaaaagagaaggttattcgtgttaggaaaaacatcaggatatgtggagactgtcatgtctttgcgaagctcttgtcgaatcgagaggaaagaagtattgtgatacgggatcccattcgataccatcattttcaaaatggcaagtgttcttgtggagattactggtagaagaagagtctgcaacattttggtagcttatggtcaatgtttatagtagacaacaagtacaattaattgttcattactggcaaagatgtgtgttgaattgaatgacaaaaataaattatacataataatataatcaaagttcaaatattgtattataataagtgaagaagagagaacagtaaaaactatttactgaggaaatattacggtaagatcaagtttcatcaatatattttaagaggtttgctcttattttcttcttttgactctcttaaaaatcatatttgatttgatttttgtgttctttagtctactttgagttacattaagtctcaaaagtgacaaatagttatggaggatatgataatgataaatattaagtgaaatggttaactaacatttttatctcttttttctccaactattgaaattgttgagttaaaggattttcgtctaattttactaatgaaatactaacgtaaataaaagtttaggaaatacaatttggtactcatcaaagttcgatagtcatgatcacttgaggctagctcaagtggccgtaaaaggtattggggtgtgtgtaagggttggggatctcattctcatgggatcgaatctcaattctcatgggatcgaatctcaaatgtgtaactcaaacaatgtatatatacaaacaaaatctaaaaaaatttgaacttaaaaatgtaaatattttacaaaaattagtatttcatctaattatcccattatttttttcctacaaataacatctggtcagtacatcagtgtcattagtgtaggcataacactgtaaatcaacaactcttacataacattcttaagatgaggaataagccattgttactctctcacaactcatccttgatgctctcatttctttcaggcttggcaaaagatgcataagctttgataatggattcatagatggtgattcctttgaggtactcagctttgttcaaaaactgtaagccattaagtaatgatatcatgagctcacaaataaaatgacatacaccaacaccaaacaattgagaccataatggattggattctcacctcattgtggtcgtgaagaagaataggagtattggcaatgggagagaagccaatagcaggcaggccttgcacccgaaagtatcgagcatctgtcgtccccatcatgatctgtggcttatcaagttttccattggctttctttatagcttcttctaacagagtccaccacgggttcgaactgtcagttgcagtgagaactggtcttccaaatttatcaagaacagcaactttttgtttgaactgattatgacataaaaggcaagtgtagaaaacttgaaagcatgccctttaggctgaaaagaccaaacaaagaaaagatccaacaagt

SEQ ID NO: 14761 - DNA, 3266 bp, Cannabis sativa
catgatatttatcgtatagtaccacgatcaattctatgtttccttagtttttcttttttcttttcttttaatgtacagtacaagtttatatgttgtttatgttaatttagcacaatatggtctaaataatagtaaaacatttcctagatatacgtacaatataatatatataatggaactttgtgtctactactatttaaattaaaatatatatataaaaaaaattcaatatttaattacatacactagctaataaacgtacttgaagagcatttctcatatatacatgttactggtcgatgataattcagctagcaaagaaaataataaggatgataagtactagaaaacaacgtgtgatggtggtgccatgtccagcccaaggccatgtgaaacccctcgtactcttttctcacaagcttgcccaacatggctttagaatcactttcgtttacaccgacttcgatcacaaccgaatctcgactgccatgaaagacgacgaggacgatgatgatgacaatactattgagtttgtgtcaatcccagatgggttgaggccagaagacgatagaggtgatctaggcaatttatgtaaagcaaacttggagactattcctgcagagcttgaaaaactcattacaaccataaatggtagttcgaataattacgaaaacaatattagttgtttggtttctgatgtttatttaggatgtgctatggaagttgctactaagttgggtattaaaggagcagtattctgtccttcctctgctgctcttcttgtccatgccaggtatataccaaacatggtaagccaagggatcatggatgagtctgatggtacgtacctctgcattaatttaagacttttctctcttttttttggcaagaaaagtattcattaggacttaattagaaaatggtatatgaatgaaattcagatccggtgtctagattttccgataagcggtattttgcaaataatgttattaaaattaaagtgatttttgttaatatttttgttttttattttttttaatcaaaaataaaatttttgtttttaaaaagtttttgaaaaacaaaaatgagttttgtttttaattttaaaaagcagaaaataaaagtgttctataaaatttatttttattttattttattttatttaagttgagtctaaatttaggatcgaatttgagttcgaatcaaaggtggagttcaatgctagagccatgagggaatttaagttcgggtcgggtccgagtctaaaagattgaataagaaaaaaaaattgttttaaaaatattaaagtgattttttttttttttaaaaaaaaatttgattctcaatttagtaacacttttattttctaatttttaatcacaaaataaaagtaaaaattttatttttgaaaaataaaaatgtatttcgtaaccacttttatttatctgtgtctaaaggtaaccattgatcagaacaaactcgaactgtttcacttgttcccacttgctttctgaacccttttttaaccacatctcttacttctaaagtgctcctcggtataaaacttggatttgaaccaagctcaacataaaaaaagctcacgatttgggtaatatcgagatttcaaaaaaaaatgtttttctaacatagccaaattaaagtctgttaggctttgaaatcccaaactacccagaatttttaatttagtcattcgcccccaactcatccaaaattaattcctttagcttgacgagatgaagatttctactaaaacttagccatcacttcttcaatctccctacacatacttaggggtaatagaaacacgctcatagcatacatagggagcttgaactatattttttgaacaaattctcctaagtcgtcttccaactcacccatttattattttttgcattttgtcttttaaaaagcccaacacaaaaaaatttttatcccaaaatacttggcaaacccaaataaaattggtgccatcagcttcttgagttctcatcaaagaataaatctcatgcttcactataggttaaatattcagactaaaaaaacagaagatttagccaaatttacctactgtcccaacatctcataccacttcgatcatatgtcttgcttatgtcgagttttactgccaaatactccatcttcaaacttgtcttgcactttaaatagtgcattacctcttaagacacaataatattatcaaatatatagtcttcctggtatgaatgtactctaatgatccgagataacatgtgccattatacccttcgtccgattaaccaacacctcgccaacacccgatataacacactacacatcgagatcggtcttaagtcactcattaacataagattttttttctttaaaataagaataatatttattttgttaaatcctcttggaaggctaccagagacacaaaaaaaaaaaaatccataatcattttcacaacatcagctcctacagtatctcaatatcgttggtagaatctaaggctcatgcactctagtccacgtgcattgttaggatgcatctagaaaaatgcttgtttgacctcaactgtcaaaggagaaagtaagaacccattttgaacagtaaaacctttttcctccacccaagaaatcatcccatcacccaccacttcaaaagtagtaattaagtaaattctgaaaatagtttaccataacttctgagaggccactgtcccaacccacccatacaccattatcatttttcaagcgacttacaatattgtttcatcttcttgcactctctttctgagttagcaactcaaacaagtgtctctactcttcctcatacaatctaactgaaccctcatcacgattagattttaacttctaatattttccttgcatttatcaattcactactaaaaaaaggccacatgcgactgttcaaaacagtcagatataatatttcctgtcagctcctaaaaatattgatgcatataccaccaatgaaaaatgatacggtaacagtcgatattgagcatgattgactgtttataactgacagaaaaaagaggggaagaaataggcgactattctaaatagtcactaacaatttagccatcgatcggttttaaacgacatatccaaaaacaaaagaattatagatctaagatatatctcagatccaccaccaactataaccaaaaaaatgttcgaacaacagattcaaagacagatctaaaacaaacaaaactccaattaatcaatatacaa

SEQ ID NO: 14762 - DNA, 4059 bp, Cannabis sativa
ttaattgtttatgttagcttttatatctcaattaattatcgtttttttttttaattttttgtgattgtgagttcttccttggaccctgatactgatatagctatgtgtagttgctttttaagtgtctaacaagggttatattgcatatgggtgcccatgacatacggttgtaaaaccctgaacatattttgagcgcattgatctcttttggaaggaaataggtatctggaaaactcatagttcattctaccccctgattttgcagttcctgatttagagccatatatctctctccacctgcaattgggtaggcagtgcttcacatgtatgtaattttaatattctctatctatcagttcaatgagtatcaatttgctatttctatgttgataccgagacattacaattcttttatttttctataatgaactatctgaaatgattagtcttaactttagtacaccattttggacttgtttagacacatttaggcttttcactattgattgtggaactctaaatcatttatatgtttcctgaagtaaggatataatttgagcaattatgtaatggtactatgtagattctatttaatttgtgttttaataagttttctatttgatgtacagactgtagttcatattgaatatagttacccccatattatctctactattttttcaaaaacccacaacatgatatgtaagattgaattcattaatcattattgttttgctctacagattaatgctgtcttgagctaactatttcattaggcccgctccaattttatcgaagttgttccaatggcacttatttcaagcaaggtgtcaagcaactcaacatcaacgaagattgcaactctttctaaatcacatggaattcaaaaatcatttgttaagtcaatgcaacaaaataaattacaatttacaagtcaatcaggtgaaccaacacaactaggccaccaatgtttgtcaacaaaaatattttgttttcccaatggtactttgtggcacagaaatggaaaaccatcgagcttcactgtttcgcgaagaccctccatgttatgcaggtcgagtggccctcaaaactctagaagaaaaggaggtcttagaacttgtgatgatcatgaaataagtaggtaagattaaataatctttacggtccatgaagaaatgctgatatgcttaagagtttaattattaaaactctgtctttgtttcttgaactacagttatagctgacacttttgtttacaatatttcattagctctagagaacgtaaataccaaggggctcatttatgcttttgggatgggtaatttctaacttgatattagacttaaaggtcttgagttcaaatgcctacagttgcactccccaagtgcctacattgtcttctccaagttctccctactttccaagtagtgcacttttgaaaatgtttttattattttttttatattgttatacatttgtaatctgctttcgaccaaatatatggtcacgtgtggagtgtgggaatataaaagtaaaattagtcgttcccaatagcttttgagaaggatgtcaaactagtatgacttggagagacatgtgatgtgacaacttttctttggttcaatatgctatggacaactacttcctatacctggagttcagtagatttgttttctgtattctaagtgtgattctaattatttgtgatttattgttcttaatgaatatgcaagaacctagctatgagaaaatgaggaagagaacaataatcttataatagctttgttattttgaatgagaatttcagatgtttatgtgctatcctaattgcttaatttatatgcaaaacttattgatttacctttcttctatatacaacattatttaacactactttattaccttcaaactttattaacactttatttcaatacttttcttctatatacaacattatttaactattacatgaagaaatctgtctttcataaccatgtttgcatctttactcttctaattcaaaagtattgagaaaaaagatttaccttcaaactttattacaaatatcttttattaacacttctagcatatcagtgaccaaaatgaagatgagcaaccaatttcacccactagaagtattaactctacaaagggcttagctgaagcttgtaaatttgtatataatgacgcgaagtatgtcaacgaaagggctcgcaatgatattatcctactttcacggtactcgtcaacatttgtatttatctttcttattaaaagcttcaaatattgatcatcaaaacctatctccgtactttttggagaattatctttcaaaagagtaaggaggtacatgaaattcggattaatgggtctctgtcgtaggttatgctaaataattttacattcaacattggcattaatgttctcttaattaccctttaattggcgatcatcaaattaaatagtcaattgtaattatcagaggcataatgagattggatgctcgtgcacgacaaggcgttgctattcttgggtctgagtttcttaagcttgacggtgagctccttaaaccgggtcgtaaaggtctttgatgcagtttttgaacaataattttttaggtcgctgtgatttcatagtttttttattctgttggtagctcgagcaagggaggacactataaaacttgaccgtaatgtgaagaagaaagcagaattccttcatcatattgctacagtatgtataattgtggcttacttggaggagaatacttgctcatttatcatttattgtttgctcatatttggttgtgctaaaatttgtagatcttgaaggacaaagcagagtcaagattgaaaactgcagctgataaacattggagcgatggagccttagaggtgcatgttctgtcttcgaattgctatttgtcaattgcatcctaatacatgtgatatcacagaactacactaaggagagaatgttttaagtttacaatttgattggttgtctatgctttgaagtagtgcctaatttttttaagtcaatttatgtttagttggcttgaaacgaatttgttttgtgcagtttttctttgtgctgtattaggtttaccttttggtttttgtatagatgcaaggtttgatcttaataatgatctaattcattccttacctttaggaaggtagtaagaatgctaataaaaagacaaggcacaatatttatacttgaatcaggctgaaggatcatcaaagaacaggttatgagtgtgttacccatggaaaatttgataaaattcccagtatggagccccttatccatcattttgtaaaagagtgataagattgacaatgtctgagagcaattaatacctgcaatggtggcatgaaatggtagagtattaaatattaatatgttcctcgtcacagaagaaacaacaaatggacagaagatgcagtttacattggatgattagtgttgtgtttaagagggaaggtgaagtattttcatcgactgggaaaggagtggctaaagagaaagaggggaaaataaattaagattcctagatcaaattcaaaagcggctataatcagaaaaacaatttgataatatattataatgcatatgcttaaatgatcttctttcttctttctgtcaagtgttttttctttttaagactcttggtacacgtcaaactgtagaaccttcattctaaatttgcattatttttaggctgatttgcgcctcgctgacttccgtgctaagcaacgtgcaatggaagatgctctaatggctttagaggtgattttgtttatttctttctagggaaatacttgagcagaaagttattcttcaattatctttggcatgactaattttttcttgtaagcaatttactttgttatagaaagaatttttaaatgttcattctgtaaatatgcagtttgtcaaaaatatccatgatatgatggttaaccaaatgtataaattgtaagtctttatgccatcatccttctatgcgtattttccacttcctcattgaagtaaaatatactatgaacccta

SEQ ID NO: 14763 - DNA, 4875 bp, Cannabis sativa
agtcaatctttaattcttacaaagaagataattccacttcctgattacagggacgatacgccacaaaggtaccgtcgcttgagaaggaaccaggattaaagcaggtgattcctgtgtatttgaatgccttctgcttacttctgtcccctaagactatctgcgcaggtacacaagtataatgcatatttttagaccattgctatgcacttatataaagccaaccattggatccttcatgtttcagtttccaaactaaaaataatttaattttatattaaaaaaaaaaaaaaaactgacgtggtactttaaaacatatcttcaaatcacaattgagaaaaagaactaatatataaatcatcactgatcactaatgaagtaaagaaagtccatatctatcatcagattaaatcacatttatatttcaaatatcacggcaaaagtgatttattagtcttggtaagtacataccaaggttgcattcaagtaatgacatataaaataagacactagtaaatccaagaaggatagttcaaatgataaggcatgtaatttgctctcaaagtcctagtcccttctagatacgtagatagcaattgctaaaattttctggtccccaaatattgtaatattgaaaaattagggagtccagtttcaggaaaagaaaaagaatcatcagaaaaagtactaccgtgtgtggagttggataaagataaagagcatgatcgtagttccagatgatgggttgaaccacaagaggaagtgggcaaagatgactttgatgagttatggtagcaacaagctacaacagaaacataaatcccattagcactatgatctaacgagcatgaggtcaatcaaattcatgtagaaaaaagatgagaaaactaacatgctcaaaagaatcttcagtttcctctgcagaagggggaagcagacatgaacgccgcattctgtacagcagatcctcacggaaaaatacaatttcctgggaaaaaaacttgactctgcatttggataatggaaaattttgacaggaaatgaaaaatcaattgctatattagaatacaacaaatagaaccaagccactgataaagacctcatgaacctaaaattttactgaatgttaaaaggatagagaataactatttaaaacaaacaagaatgacattcggattaataaacataataaatagattccaaatctagcagctgaagaaaacaaatttgacctgcaaggattgcttgaaaatatagcatttggaatgtgttctcgaagctcttcagtcaaatattttggcaaggcacacctgggtagagcttttgatggacctgaaatttcaaaaaagagaattttcttttatggaataccagcatttagaaatttcttactatatgttctgacagaaaatgagaataacatttcttgttatggcataccagcatcatcggggcctgggatgaacagaaatcgactgttctctttcagccgttgatgcattccaatcaatttccctagctttccaaactgggatctgcatactcaagttcatcatcatttgctagtacaaggaacaaaacatcatctgcagataagataattaagaggaactttcaaacaggatactcaccttagagtagagaaagaaggaaatgaaaggttgcatgggtgagaagagaaattccccatgaacacaaacaaggaaggtaccacctcctcattctcaaaaacatcaaggacagtggttagcttttccatagccttctctacggaaagaacaatatgaagttacatggagtctttcacaaaataatatatatgaacaaaaaatatatacacacaaatctgaagaaaatgccaatcacctcttcattgtctagccatatgtcagagattatgacaaacatgtcattaactgctttcttttccaattccgcaagtctaagctattaattagtatatcggaaccacaagcagcccttacagatagtctaaaatataaaataataatgtaaagctaaaatcagtaaaattaacattagtgttaggatacagtctcttctcgtgataatacaccactgccaaaaaagtcatgccctgcaagcaatttgagtgacttctctctatcttccaatgggggaaatccacaagtaatgacctttatcagcaaacaaattttagcatcttgcaaattgaactctaaatatttgcatatagtcaatgccaaatgatttttagggaattatatttacacctctcggtaggagtaactaagagcaaaagtagaattcaaatatgaatattgtgaatattaaagtcaagtggagcctaaaacaagtgaattgcagcttgttcttgttcaacttaacatcaatttacaagtgaaaaatacattaacgtttgaaaaaaacaaggttagaacaaaaagatcaaactctcttcagttattatacaaaacaagagtgtaagcatggccattcttcacatggtagaaaagcaaaaagaagtaataatacacacgttcaaaactcaaatcctctctgtccataatcaaatatttaaactaaggatgcatttgtttgcacttaatgaaggggtgaatctgattggaccagatttatcatcattaagatcatttgtttttttttttcaaccacttattcccccttaatacctcttactaaagaagaggtaaattagactctgaatctttttaagacatatatatcaagctcttttttatttattttttctcaactataacttttttgctgtctctatgcaacttcaatcaactcaaacatcaaatgttaatgtatattcatttttgtttttgtttaaaaacatagttttatctcatgtctttgtcatatatataatttaaaaatgattctgctatgatttgatattatgtatatataaatataatattatgtgtatatttgtttggataagtctatagtatactcttctgaaggaatgtttcagaaaaccctttatctgtttcggcattcaaaagaaatttttaatttaatttttttcatgatcgtatacattatagttatttaaaatcacttataaattttttaaaaaaatctgaatcgttagcaatgccaaaaataaagttaaattctgaatattttaagagtactctcatatatacaacattaaaaaattatttatttattagacagatggaaacaaatggacctagttcctcagaatgctcaaatcgtgaataatttgaagaataatgttgcactagaactaatgcagagaaaacaattactacttgaatttttttataattaatatattatttgtgtatttttttatgaattattttttataatacttttttaaattaaatacaattaaataaacttgttaatattatataattaaaaatattaaataattcagatgtggaaaaaaaacattctaaataatgttgtattcaaattcaaatgtaatatcttattattcaaatgtacaattagattcagaggcttggatcttaaaaaaacaaatgctccctaaaaagcaccctactttacttaagagctagtatcatattattaaatagaagaaacagcagaatctaagagataatacataattctatagttttataggcatttagcattacagagaactgcttataaataatatatactgcaaatagccaaagttcaacataaaaaggaaaagaaaaatgttacattagaaactcattccaattaatcaccagcccataatataagaacattttagtattttacaataaaattaagaatatttagtaattttgctcccttaattttttacactactaagttgtacccctaagatatacggctcgctgataataccccttcaaatataacttttacattaacgtaatcctttcatcacactctattcaattatttcgtgaaatgagtgacacaatggataataattgacaaataaatgcaaattatataagtttcacctattttaatttttaccttaatgattaaaaaactaaaaataaaaatattaattattgttaaaaaaaaaaagcctttttttctattattcattaacataaaaagagcaaaaagtatacaatttgcatccatttatcaactaccatcttctgtgtcactcattttgcaaaaaaattgagtagagtgtgatggagataccatattaatgtaaaagctatatttcgagagatattattaacaagccgtatattttagaagacacaacttagtagtgtaaaaagtttaagaggcaaaaatactaattattctaaaattaatttcaagcacatcattataacaacataagctttatttatttcggaattatacttgttgagaaaataagtcaaccaagaggcattttatgaaatcctacatgtacaatagcaaagcaccacactagccagtagcacagaaaatagtagcgaggtgggggcaacaaaagttacaaaacagaaacaactaagctggtttgatgcttactaattttaaactacaactcacatacaactttcagaagagaaaaggaaatacaatgtcaaatcaagatggagcatttttcaggataagaacaatgctaacctgaaaaattccttctacacgcatttcaccttctgctacgactatagtgttctcggaaaaaaatcctgtcgttatcttgtattggttgtcaaagaaaatgatgatttcacatttccaattttaagggaacataaagttccagattcatgtatttcaggatttgagatcaatagttaaataaattgtttgatataccacgattaccagatgggacagctttcagaaaattacacagttgatgagtaacattttcaaaggatattg

SEQ ID NO: 14764 - DNA, 3862 bp, Cannabis sativa
ccattttcataacggaggagtggttggtactcacttcctcctcgtgtttagcagttggaccgctcggtagcggtttgtagtctgaaccagattcatcacctggtttggattctgattcttgctgtttctgtgcatcctgaaattcgagtaagatctgaaacacctcatcaacatgtttgacaaaccaaaaaaatgtttgttaaagaaaatgaagcaaaattaacaattgatattgttacctttttcatcacagtctcttttttccatgtgtctatacctttcaataaggcttttgcagatgtacctgtgttttttcagtgcatttcattacaggactggttttgataacaataataattaagcaatgtaaatttattattacctaagaagagaatgatgagcagaacagtgaccatccaatcagcaaacatgacattaaaagccacaccaatactaattccaagcatgagcattggctgaaatagcaaggctagatcataatctataagaggcatctccaatgttgggtgtctaagtctcatattatagtatactgttgaccctgcagctcccataatcatgcctacaaccccaaaatttcataaatatttacgcacttcacaacccaaaatagaagactaaatactattttaaaccagcatttcacgaaaattgagctcagggtattattttgtacaagaacacgaagtaagagacttacactttgaaatggcagtagaagacttgggatcaaaaccaacaattaaagtaagcatcggaacaaaaattccgccacctccaacgcctccaacgcttcccaaagccgcgccaaagaatccaactatcgatcccacaacgattttccagccaaactccatctcctgtgcaaccattaagtaaataataaaaccatgttgagttatttatacacacaagaatttcatgaacataatgtgatatgatataaattacttacaggccaaacatgttggtaagaagattttccaccctcccagaaaaaatgaataactctaattaaaatcccagaatgtttctcttcatgatgattaaccaaagtttctggctttatatcttttaacaccctctccccattgacaaagccactcatcaagaacaaaatagcaaaaaccatccatgttagtattgccaatgatgccttctgcttcatgatcaaatattgcttgggaaaaaaaagaccaaatatcttttagctagatagatatatttcttctgttgatttttgtttttgattttcttcttctgtattaatttctattgaatgagcttacttctatgttgctactactactccaattagagcccaaacaatggagtagttaatgtatatagaattgaagagtgattctttaaagtgacatttattatatctatctctttctatgaatatatatagttattttgcataattttgttgtctacggattgttcgtgagtgatgaaaattaagaattaacaagtgaaaatagaaagtgggaccccaatattttatctaacttgtttggtcccaagtttatatttcagctgcaaaaatagctttgaatctttataatatgtactcattcttacttgtaatatgttagtacttcttgtatttttctaacacttagattaaaggtacttgctaattgagaaaaaaacattcatgtactcaatttactcagtatggcctttaattaactacatttttgtactgtgtataaatatgataaatgctattatacttattgatataattatatattatcttatacatattttaatttaatatttattataaaaaacttttaattattcgcaaaatgtcaccttttaaatatttttagataactagtgcctaattaaaatgttatatgagtgaagctttttcaaaattttactgttggaatctttagggttatgaaattaatataataaaaaaaaatggtacttttttagtgtaatataaagaaaggattcaaaacattccatatataaatcaagtaacacacctttaaatatgccaataatttgagacttgggaaaataataagaaacagccaaaaaagaatcacagttcaaaattagtactataaagaaatatggaaagagtaagaaaacataataggattattatatatttatttctggatagtgacattataaatttgattttgtccaaactaaatattatattttcactacacttgaaatttcgtggaagttgatgtactattaaaatagttgaattatacaatataattgaaaaaatgtcacaccattactaaaccttgtttattatggtttaaaccactgttttattatcttatggttgccaacaaatgaatgattttaggtacaaaatcaaaatcttgcttattattaagttttaagtaaagcaaaaggaaagttcctagaaacttcaagccgtacatctctataatatgaagcttcatatcatatggctctttcttctgcaactgttttaattttatcaattactacaacatttggattttgaactttcaaacaatttcttcaaaaaaacagaaaaagtacatctttagctcctcccatttttctaacgtctttcttacagattcttcgctctattgtataaatatatataggatcacaaaaattactccaataattaagctaattatatattagggtattttaatttttaacctttaaagtcttttcattttaagagctttcatgatagtaaaagaaaagaaagaaaaaaacaccatttagagttgcttttacaatccaaaattaaagcttcttccatatgtttgttttttttcattagataaactctattttgagaattttgctacaatgtagctgttgaactctttatcattaaatgaaaataatcaaaccctttatgggaaaagaagatgagaaagaaagaacacttgaatgttaagggaaaatatgcaattattgtattatttatttacacttttgttaatttgactgcaatatcttatctgagcaaaaatcattttggtatgtcaaaggtgaaattactaaaatggtgagggcagtccaaaaattattaactaaaacattttcttgatccactgtgttctgttgcggctaaaaatctacatttcttacaagttagattttacagcaatctttacagcacatttttcttttcccatcaatttatgttgaacacataaaatactaaaaataaatgggaaattatagtaaatgatcccaaattaaagcactatgtaagcaaatgtttttattttaaaactgttagagaaatgacccctttaccctatttattatttatatggtcttttgccacataaaaaaaataattttcttccatatttgttttagaattagaatcaaattatttaaagatcatgatatatctttattagttttattaaaatttcttttattataaagttatgtcgattttttatgggttgttggtatatatatagattttattgtacattatatttttattttgttctatgatatattactattcttatatgatatttatttattattttgctatgtataatagtagtatatattcttgttagtataatataaatattttaatgtatgtatataattttattggtatatgctatatatatttaattattatttttatatattttaattgtataatatattaattattttaaataatatttaattagttttaatttgattatatataatggtggtatatagttttgttatcatgatatatatatatttgaattatagtgtataatttgattagtatagtatatatatatggaagaggtttcaatggttacatttttattgt

SEQ ID NO: 14765 - DNA, 9249 bp, Cannabis sativa
ttgctgggcttggctcacgggtgctctactgtacaggaaagggtaaatcagtttgtgatcggctatgagttcgagggcttggcggtagattgtacatgttcgggccacactagaccacgcgggttgggtccaccagctaattgattttgtattctcagtttttgtcgcttaggtcgacatgttaaaatgacttataatattttgtaaaaagctttacaggatcccgaaacatgtgtaaccttttggaatggtttataaattaaatagttacaagttatattttcactctctacttgatttaaagtttaaattttttcgttcatattttctagtaatcccagtttgacgggattagattatattaatggttgttagtagcgtgccttttattagggcattacagttggtatggtagctcgtgatcacatgtaccgtcttattgaagcacgcatcatgtgtcagtatggtaatgtggcgcctgagttggctaagattatgggaattcgagaagctcttagttagattaaggataaagattggtcgatggtggttctagagatggatcgcttagtggcgatttaatgatgatccctcattttggtttagttgttaataactatagacacttatttgattgtatatgcagagtctttttattatgtgtatcattctactaagaaaatagttcataagtttgctagagcttccgattcgagttttcaacgaaagtaattttcattttgacgatttgcattcataataaaattctattacaattataataatgtttaacaccactctttagtatttattaattttgactaaactatgctctaataaatattcattatactacaaactttttattacttttccaatctccactaatttctcattattttaaccattaattttgccttgtaacatttctcctcaatttctttcaactcttttatttatttatttggaaaaaaaaaaatctctaaatatatttgttttttaatcttttatttttctaatgcaatatactttaggtaaatagacataaatacctaaaattttaaatttgtaagtagcataaatctaatatttatttttaatggcataaatactcaatgtttataaaattataatttttctttaatttcgccagtacaaactctattattgtcttaaacatgacacatataaaacctaaattctaaatcattagatctaaatataaacatgtagtataaattacttctaaaatttcttttgaaaaattcaaaacaaattctgtattaaaaaaaacaattacaattttacaaatattaaatatttatgccgttaaaaataaatattaagtttttaccgcttacaaacttaaaactttgaatactacccatacaatttttacattttttttacattaaagaacagtgatggtacgaccaaaccctgctctcatcccatcctatcaataaataggtcaaaagaagtaacaataaagcaagaggccaacatgaaagcaggtcaaatatttcatcaacaaaaaatcgcagacctatgcgagcattttgcattagcaagagtaaattattaattatttaatgtatgttaaatacagaaaatgacataatgctatgttaaattaagcccctactactgctcatctgtctctccgcttccgcccttaaggtgcaaatgcttttctctcttctgaaagtctgttaaacccttcccacttccagtcacaccaaccttaccgaacggatcatcaggagacttaaagatgctctctcgcttgcgtccagagaagaaaccaacctgaaaatgcaaatcaaataataataataatcatcaaaatacgcagatgcaccaattctaagaatcttaatatttcttgttcagtgttaaatttacattagatcataattggcaaatccatctggactcagcataagtataatgtgcaatggatttttgattgctcttgggtcggcccacaaataaaatgtacaaataacaaaataaacaagagttaaaacaattgacaccactcttgtactcttatagcagtcaagagtgattggttcaacattgcaagtgcatctacatttacataagaatctcaaagcataccttctttgtcttgccttttgttgtctggaattgctgccaagcattttggcgcttattttgtgtaacttcaagctgctcaaaccgcatctttgatttgaaagcatgtatcttctttcgcttggttgctttctgcagagaacaatttggagaaatataaaacagcagccgtgtatagtaaaatacctctcagcatcaaagcaattactaagttatggtgttcgtacatgctgtaaaagttcatattcattgatttctaggcctttatgtttatgtttattattacacttagcagctaccaagtcttaaccccacgattaggttatagtaacagggtaaatgctgtgttttgtgtaattaaatctataaatgaaaagaaaaaagctttttaaatttaaagtataataattaatgccaacagttcttattaataccaatgattcatttgtcatttaatccccatcaaaattatgtagatttacattgatgagtggcaaggatatgatatatatacatcaattgttatagcctaacaccttagaaaaggtaacattcataaataaaaggaattcatatagataatagaaaatcaaagctccaaggagcaatccgggttggaaacttaaaggaaaggaacaacgtgtttcttgtgtgatagctttagcggttcccaaacgagaggcaatcattgtggcataatattgttaaaagcaaatataaaatggaagagaatgggttggatactggtgggaaagagtatctttgagaaacccttggaaggacattgcttctatatataaaaattccagcagttggtcaagcttatttaaggttatgagtggcaagaatttactgttctggaaagactgctacatcaatttttttcctaaatatttgctccccatgcttgcagactatcaacaaaaagaatagatgtatgtaccaacgatttgtgctttacggaggactgactggaaagtaattgaaatatacactaaatcagaggtttgaatgatagagtatctactttctttctagaataagttgatttaatttgtagaatccaaatctacaaattaagtaagctaatgatggataggatgggggatccctccttgggtaaagataaggaaaagccctatgcctcctaaagtggatgtgtttactttgctagtgttcatgcatctcttttagaaaacaagaccctattagtggagttatatgcaagatgagtggagaaaacaacaatcgcttattagtgggcacacacctattttacaaactcgaaatacacaaattaatgtggcatccatcttaaacctgtcaaaattttaaggcagggcctattacttttacgtgttttaagatgcatgtcacaccattgtgcacatcttgagtgtgtagagtaaatgtgtacctatagctatatattctacaatattggtggtatataactacatgggcaccctatgatcttaagctagcttttgagagtgaaatctacccaagtgattgtatcaagtggtatcaaagtcatgcacccagatgtcatggaaggggcaacctgtggattaggcccagagtgggccgtcgtcgacatcgcctttaaggggggagtgtattgttaggttccacccaagtggttgtatcatattcctttgctcatagattatggtttacactctctaagtaatgtaacatatctgctgcatggtatagatctcgttcattcaccattgtctgataaaaataaatctctaaaggagtcaaggtcgacataaagatcacatttgggaagtctcaacttttgagaggcaatttgctggttgatgttaagtagtttatagatgtacatttctctaatctattatctatgtcaagattttgttctaggatcttttcctacttgtgcttgtaattcttctctaaccaaagcaagcttgagggttccttttttcttttattttttttttctttttgtaaacaaaaagatagatagcttaccacatcctcgggattttgttctaggatcttttcctacttgtgcttgtaaatcttttctaaccaaagcaagcttgagggttcctttttccttttattttttttttctttttttaaacaaaaagatagatagcttaccacatcctcggggtcatcaggttctatacgaagtttagctggcaaggttcgagattggaagtcaacagaagcagcttgagcaatttttctcttaatagcttgctttgtagcttcagctaccttctctgcttccaccaatgcattcacagcgccttcttgaattggccttatattatcaggatccacctggaattaaaaaaaaaatgtatatataagtagcagcactcactgcaggtattcactccacggtgataaatgttcaaaaagcacagctatgaagaaaaaaaagacactaatgaagaccagaagataattaatgaactataggaaaccaacaaaatcattaacgagacttcatagtttcatcatcttaggctaggatataagatatgatatcacatacatcctagaagaaaagctcataaatgagttcaaagtagtaagataatgacttaatggaatgtttagagaaaaataatacctcttctttattgccccattcaacataagcaacgtaatacccaattggagtatgagcctcaattgttgcatcatacctgggcattcaactaattaaacattggcttaaaaatatgtataggagagagagagagagagagagagagagagaagtgggggtcctgggggaggagagaatataaatataaccaatgtgataatataaacgtgaattggttcatgtacagataaataatatcaacattttatcacataccattcgccatcttcactccaaacagcttgcacctttgtgccaacaggaaacttctcttgatggtcagaaaggcttagtgattcctacaattgaaatcagtaaaagtacacgatataagaaccaaagatatgagatagctccgacatcagcacacatttacatacacaatatcaatggataacaatgccatgaaatatcatgtctatataaatatttagacgtttagcatcaaaaggtcaatgaatctttagcaaatacatgaagaccataaaggttctgacaggccgcaagaatcgacagaaatttcaattatatggatgtatgaacttttatacagctctctcattctctctctcacacacaagacacaacaatagaggaaacaaaaccaagccttaattttttatatttgaagctaggatccccgcctaaccctacaatatttgggcaaaaccagaccttatttgtcataccttgtcattccaatcaggagatgtatcaacacttgccccagtcacaatattggatacagaattctcattttgctttgcagtttccagcagttcctccgttaaggcaattacctgcatcttagaactttagtgcaatcataaatttcagaaggaatagaaaacatgattttttttttttataagttacacagacaaggactcagtggatcactcagcttacccacccaactacttgagctagcctcaagaaggaatgataatatagtaaacatatgaataccaaagcatgaaaagtgtatttggcagtttccttacttaattttttattttttataagaaaagtcttcatctctttggaaaaacagatagtaaaaaaagcaaagaatatccctaaacaatgcaaagaaaggacaagctactacgagtatagcattttgaagaacatatcattgttgtgattcgaacatagaatctgattgtgaacatccaaaatcagtgactgtgaaagagagagagcaggctggccatcacgacacacagcaaacctgcacaagaatcaagatagaagtgatgtgcatcttgatgatgttctaattctacattaagatccagtattcttttctccaaagagttctcatttctggagtgcatgaacttaagttaacataaagccatcctcaccttaacaaccctgtaatgacaacaaactcccaaggtagccattagcttaactgatgttgcttgatgagcaacattttggtgccttcaaaagagaggaggaaaatagaagaagaacggtaattgcactgatctagacaaccaaaaaaagaatatctacaattttctttacaatcattgatctataagacactacagaagatgctcctgtagctctatcacataataaccactcaaattgcgtcataaagtcgagtaacacaagtacacaacagaagcccattatttgactggaaggtgtaactggatattcaacaacacatacaaaaaataaaagtcctaaacaaaattacctcattgagctccctttccatgtcagcatattccgagtttccaggatcatcagccaacagctgcttgacctgattgacagaacaagaaatcagtgacagatgtgtcatgcataataccataggaaagatgtagaactgcaaatatagagagcagggataatggcctatagctgtacaactcttatcatataacttgtgttaattgaaggacaaagcaacaaaaaaaattatcaggtgtgcttaaatgagactaagagcctcctatgcaagatatcaaaggttcgaaccgtggacctttcacttacccaaccccctcactactcaaccaagctagtggcttttaaagtaacataaaaataaatgaaaccaactaacaaacaagtctgtaacatttcacgacaaaatacccaactacaaatattttagttttcaatacaggattcctgaatgtctgaaatgcatatccatgaaaacagtatatactaaagttagtgttgttggagtgttgataatgcgacctattagcaaacgactataacgtcattataagttaattcaaccagacaaaaaaaaaatgtatgagtagagctattctcagtaatacatgcacagagaaaaaaaaaagcatgaaaggtcagtgaatttctgttgttctcatcaaaagataaatagaccaaggctgtgttttagttaaggaggggaaggtagctaagaaggtgacgtaaattacaaaggaaaaaagaatatcgaaggaaggtgatgtaatttagggcattggaatgccattcaaaatagaatgactggtccactattttagcggaatcactgttcctaaaataaaatgaagaaatggaaagaaaaactattcttaaatataatttagtttttttaatacttttttttttaaaactagatcccccgcctaaccctataatatttggggaccatgaaactatagcaattactatataggtacacaagagggacctcagaccttgtgagaggaccttaattcttttcttactcaataaagtgtacagtatgtcattcttgttcttgttccaaattcatcattctcccaaccaaagagcccctaatctctctctttgtttggtaggaaggaaaatcaaaaatgggaaattttttgaagagggcaaacacttaaaaattagttaaaattgggattgaaatctccaacaatatcttccatccaaatcagtaccctaccccaaaatccacccacacacccctctctccttccttcctttgctccgtcacaccaacaaactcttagtttagttcaattccatgtgtgcttgagctaaacagataacctccatccatggattaacaattttactacaatatatgtctagctattttatcacgtatcttccaaagtcttaagagtcaggtaaaaaataagataaacaaggagcagaaatcatagccaccttaaggcttcaccttcaaaatccccaccctaccccaataaataaatcataagcaggtttgggcgataaaaatccatactttctctcggactttgagttcaattatgaaaatttagcggctccaaaatttcactcgaaagaaaaatttaaagaaaagtgtttcacaatagtgaaaatttagttatgtgacaaacccagagacacacacaatcatatgtatgtacgttatgaagtaaaccctatctgaagtaatggaaccagtaagacataaacctaaacagctaagatgttcacaataacacaaatacagatatacatacatagatgtaaaacgaaaagaggaagaaagatgaattcgtatacctggagaagctgttccttataggtggagagattggaggcgagctcttctatgcttacctcttccccctcttctcctccttccattttctttttgaaagaaaaaaaaaaatgaattaactattaaatttcttagaagaaattcttttgccgaatcttgaatgaagaagggatttgagatttgggagtataatggaattggaaagtggaaacccaaacggcaaaggcttcccttctttgtgtcttggttcttgggtgcttcagtgtgttggaatgaatctggtatatatttatcttgagttgacgatgttttcctttctactcacgaccccattcttcggcccgtttagcccaagtcgcacttttattgtgttttttttagaagtattacttattctacatttttattacaaaagtacattcacaaagtacacctcgcacgtcggacataaaacaaacaccggtatttttgaaactacaataaaaaatggtagaaattacgggtttttgaaaagttttcctataaatatggcatatttatgtttgggaaacttacaaaaatactgtttttttaccaaatattttcaaaaatactggaacacagcaaactttacatttttactgtccaagtccatttttatttcttatatactgtccagacccaatatatttactaacaaaacacaaacgacacctctccttcgtggttggggacggacaaatcaacagtagaatcatataaaaaaccataaaatctggcaaagagaaaaaattactaaatcaacaacaaattactgttttgtagtgttattttactattgttttaatataaaaaaaagccacataattgaaatattgtaaaaaatgacaggacatggaatctataccagttctcataaagagcaatggacaatggaaaaaagaacataattatt

SEQ ID NO: 14766 - DNA, 6413 bp, Cannabis sativa
  modified_base (3367)..(3409): a, c, t, g, unknown or other
  modified_base (3578)..(3584): a, c, t, g, unknown or other
tattagtttggatttaatggtaattaacaagaaaaaaaggtcatttttgtaatttaagaagcccaagacaacattcgctcttttatatatttatttatatagattactaataattctttttttactaataactcactacaatattagtttggatttaatggtaattaacaaagtaaataagaataattttgtaatttattgtaaaaagtcaaaaataacattctcactcttatatagttatagattttataattttattaggtaaattaaaaaaataagtaaaaattattatatttggttaactaaagattgagtgactcaactacttaaaaaagtttaatataccaatcatatttctgaagttattataaagtattatattattttatctaaaacttactatgatggtaacaaactaattagttgcctttttgttaattacttttaaagtatatgttcatatttagattatattatattgtttaacatacatttaagttactatcataaaaaaacatatatactcttaataaatcacatattttgttagcaaattttttaaatatctaaattagtaattaccaaataattagtttaaaacatactgtggtattttaatatcatttaagatatatttttggtaatcctaatttattgtggaaactaattaattatcatataatataattcacttaactaaattctaaaataaatattaatgaagattaaaatattatatatatatatatataataataactaatcactatatgaaatagcaaaacaaatatgattcccacatcttgaaatgttcacattgaacaataaatcacaatagtatattttagggtgaactgagtaacaatgtcactagaaattattttttaaatttgagagaagagagagaaaagagaaagagaaaaaaataaatgaaaatattggcaaacatctaatacacatgattataaaaaaagccaacgtcaatattgtaaattagatccaattaaaggtgccaaatgtaaatttctcactttactataggatgccacatcagactggtgttgagcacaaaataacaatactcaaacaaaattttttgagtagtgctaccgtcaatctcctattacaatctcttagtcaacttctattttcgttatatatagttacagcatcattcttgtaaattttcgaataatttacagtgttgaaaataattttcaatttttttgaacacgcgtagtaaattaaaatatcataaactctgttttaagtacggtaaactattcagaattttttaaaaatttacagaaatgatattgtaactataacgaatactcccatgaaaaaaaattaaaaaaatattcaaatatgtgagtttgaacacataagttaactataagagattgtaattagcactcctcaaaatatttggagactttttttcatcaaccgaactatagaattggatgattttttttattcaattctaattacactaacaaaacattacatagcactggtaaaaagaaaaaactcttcagcaaaaaacttgcaaagtaaagtattgattgggtaggcaaaagtatagtaataactaataacaacaaaattgaattaacgtacggtatgtaatgatcaaatgtttcgctctgaaaacataataataaatagcacatgcagtacatgtttctttattttttttagtcatatgttcattagggaataaatacatttttttaaattttatttatattttaaggctaatattttttttacaattatataaatttcgtttttcaaaatatagttttaaatttttaaaattacaaaaatttatttttctcattaataataaaaaaaaacgaaaaaacctcacaacaactataaattaattataaataaaaaaaatgacaactataaatgaattataattaatttataaaacaaaaaaaatatataacattttattatttttattgaagaatatatttttataagtgttaagatattttgtaattttttttcaaatttttagtataatcttataaaaatttctttttattatataaatgaaatgagataaatatatatatactttattatttttttccaaaatcagaaaaataattagagtttggcatttgttgtgaggctgttgggggaccattttgatacccacatccacatccatctcaaccattaatacgtagtttgtgatgatctgtcacacttcttcaattttatgtttttttatgaaatcttttcaattttttgttggtttaatatatttagaaacaaaagaagaaaaatattacagttcattcagcataaacaaattgtaattaagaaaacataatattgaaattataacttaaaaaattattagaatataatctctttaaatatttcttaaaaataataatgcatatattttgtttataataacatataagtattatccatcgcaaaactagagaaagatagagagtgctgtaaatatgggcaaagctttttgacacaccaaacaatcacaatttggcacgaaaaaatatatacttaaacacgacacggcatagtattgtaaattagcatatataatacgccacgacacgatataacaagcccgaaaatacgatacgtaagtacgaacagattaactcaaaaacacgacatattaaaaaacccgataatttaataataataacaatgataaatatttaattattaattaaaataattttaatatttaaattataatacttataattattttttatatgattgtattgttgaagaaagatgtaaaagtaattaaaattataaaacataaaaatgtaattagctattgatgagctattttagtaattagttcatcaattgcaataaaaatgtaaaaatatggagcacgaatttgagcccatataagaaaatgtgttggtctatttaagaaaaatagatcagtctaataaaatgcgacacgaatttgagcacaacacgaaactactgggtttgcaagtggtgtcgggtctattctataacattattgcatgacacggcacaatccatatttttttatggcacagtacgatacgacccatacttttttatggcgctacacgacacaacccatattttaaaaagccaaaaaatagaaacaggcctaacacgggacacaagtgtcctaacacgggacacaagtgtcaaagcaaatgaagtctatcttttactattatcattgatgatcgattgtccattaaggaagtgggtcttaagaaatcagcagtcattgtcctgttctctggtaatcccctttccaccccactcacttaataccattttcgtttttctcatataataataataatannnnnnnnnnnnnnnnnnnnnnnnnnnnnnnnnnnnnnnnnnntaataataataataatattgtaaattgtacgaaattagtataagaatgtattttgatatatatgaacgtgatataatttcatcattagaattataattataaatatcactagtacaaaccctaaaaaataaagatgaaggttactaaagatattattattattattatnnnnnnnattattattattattattaattgcgtgagatttttgtgtgttacaaaagtatacataaagtgtagaataaaaacaatattaattaattaaattgaaaaaatgcatagataataattagacatatatcttttaataatcatatatactctttcaaaaaagaaaaaaaaaaaagaataaatcatatagtagtagtacaataggtgttgatatatatgttattaaaaagtcataaaataaagagtacgggttaagacaaagcaagatattatcaactacctttagttatcacaaaaaaaatccaccacttctaattatattataatgatcgatcacagcgtgtgtgtatatagtataattatataataagatagacattagatattaaaaaactatatataaagcccgtaagagcttctcaaatagaaatgttttctcattattactgaaaattctcttctctgttttttttttcttttcttaatttctttccgtcttaatgggagagatctgagtacaaatgaaacatgtatataataacatgtgctatatatatatatatatatatattgtttgtttaaaaggaaaaacaaaatttgtagaaataacatcgacagtaattggaactagtataatcttaatcatgggaaggatttgattaattaaggctaaaaaaattaaaaatggaaactaaagatatattattagtaggtaccttaaaggttccaaggggcttccatggccattcggtgaggattccaggcgtagaagccatattctttctctctctctctctgacgatatactttctgtctaaattaataaactgactttgtgctccaatttctacgaggaaggcctccttttatatatagaaaagaatacatatgtatatgctagctgcaataaattacaatgtgttagaatttatttcttaaaaagaaaatagtaataatcaaaagtagttgatatttttttgtgtaataattttgagttctcttctacatatatagctaactaaaaataagcctatattccttacaaaaataaataaataaataaaataaaataagcctatatttgtcctgcatgtaaaatagagggaccaaaaataaaacaaattaattaataaatgtattatctattatatatatagttatataacagacaatatgatacgtataattaaaagatgtaaattaagtacggatcaataattatgattcccaactaattccatcccttataaccctaacgtggcagtatatgtgattcatctattggacctggaaataaacgaaatgcctttttttattatttattaattcttctcaactgcttctgctggaccacatttattttcttcatttcgacaaatttatttattcaattctctctattttatatatatatattttttgatgaatttctctttcattttcatttctttctttagggcctcatataatatattgattctatctcatacgtaacatagttattgcctccaccttccttcgttcttcttcttaataagcatattgaaagatgaaattttggagaatactcgctaaagtaaacatcttagttgacaaaatatgaaggtgctatactagaaataaatattattctaagaatttgtattaattcttacattgacattgaagttatcattttttttaataaaaagtaaagcaaaaaaagttatataatttataatttaaataactaatatatttataatagttattagagtgtctttagaagtaaaatagtcaaagttaatgtagaaaaaaaaaataaaaaaattatatttttaaataatgtagatcattttagtatttttaaagaatgctattattctatcagttctaataggcttaattaataaaatagccgtcctaaagtggtaccacatcacatgacacaacatatctgcttttctaaaaaaagttttggatgatcaattcctcacctagactaactgaataatgaaataatgtatgttatcaatttaaaaagtagaaacattttaaaaaaacaatgtatctatttaattttaatttaaaattgaaaaacaaattttgaaaattttaaaaacaattaataaagtcaatttcaaagtttatttaaacagtgtattttttttttaattatactttatttgtattttctactattataataatttggaattggacattgacccagaccctgaacttggatcaccagaacttggcctaggtcccgaagttgactttgacctggctcggtccaataccccgaatctcaaaccctactcagacttagcctctggaccccgaacttcaaacacctaacccaaactccaaactcagacccagactagtttgaagaataattgaatatataagcattaaaattaaaaccaaattgtttttatagaaaaaaataaatatataaaaatattttaagaaaattatatagtacatcccacaccatgcaccctcgtattgtttttaactagtagaaaattttaattttgattttttttttttgtaattatgtatattataatgggatttttctatagtaagtattttaaggtaccaatttatattttgatcctagaaaggaaaattaaataaaaatagaaactaaaatttttattttcaaaaatacagattgaacaaccagtccgtgtgaagctccaacgaaaatcgaccaaggtgggaaaaattgagaacgaaatgtagatctcaaccaaaaagtgatttaatcccgataaatcaaaattcaaaaggtaaaacataaaaaaaaaaaaaaaatagagatttctacctccattgataa

SEQ ID NO: 14767 - DNA, 7185 bp, Cannabis sativa
tggaggtgacggtgagggtggtggtggtgacttgtagacatatggtggtggaggtgacggtgagggtggtggtggtgacttatagatgtatggtggtggtggtgagggtgaaggtggtggaggagacttatagatgtaaggaggtggtggtgatggtgagggtggtggaggagacttgtagacatatggtggtggaggagacggggaaggtgggggaggagacttgtagatgtatggtggtggtggtgacggtgagggtggtggaggagacttataaatatatggtggtggtggtgatggagaaggtgggggaggagactggtaaatgtaaggaggcggtggtgaaggagaaggtggtggtggtgatttgtaaacatatggtggtggtggggacggtgagggtggtggtggagatttgtagacgtatggtggtggtggggacggtgaaggtggtggaggagacttgtaaatgtaaggaggtggtggtgatggagaaggtggaggtggggatttgtaaacatatggtggtggtggtgaaggtgatggtggtggtggggacttgtaaacatatggcggtggaggtgatggtgaaggagggggtggagacttgtagacataaggtggtggtggtgatggagaaggtggaggtggtgacttgtaaacatatggtggtggtggggaaggtgaaggtgggggtggagacttgtaaacatatggtggtggtggggatggtgatggcggtggtggagacttataaatgtaaggcggtggtggtgatggagaaggtgggggtggagatttgtacatataaggaggtggtggggatggagaaggtggagggggagatttatatacataaggtggtggtggggatggtgaaggtgggggaggagacttgtacacataaggaggaggtagcgatggtgatggtggcggtggagagttgtaaacataaggtggcggtggtgacttgtagacatatggtaacttaaagtgatatttaggatgttgtggatagttgtagtgtgatggaggaggagatgtagtataagtgtaaggcttatagtcatcacttgcagccacattggtagtggctattacaaagcatagtgccaaagcacatgctaaatgaggccaaaaattgaccattttttagtacttaaaaaggaacaccaaaacacttaatttttgagagatatttgagacctcctcaaaaggtttgaaagatgtttgtttgttgtgagtattgagtattaaagagatggtattggatgtttatataggtattcttaaaacgagtgaaatgttttgtttattaatattatggaagtttccacaaacctccaactctctcacctattattattgaacctttcaattaagctttcccacttgagaggaaattatttatgtaatgggaggccacttggtctattatgattcttattgatcatgcatttttacatttgcatgttgaaagagtctaattgtattaatattggagaaaatagaccataatatataaatatcaatggattcctaatatcatgaatgattcttatttagtagttgttaatttctatgctaagaaaatcgtgggagaaaacttagtctaacatgtacataattatatataatatatttatctcatttggacatacattttgatttttgaatatttatttttgagtaataatatatgcacacacaatatacattttaatttaaatgaataataattaagaaaatttacatttctagtattttttgtgtatatatatgtcaaccattaattattcaaaatagataaagataaaaaagaaaatcacatcaattaattattattttctgcattttctttttctttttctttataactaagtaacttgaacttgtattatttcatttcatatattcatacttcttatgataaacataaggatattattaaaaataaataatattaataaaaataaggataaattcgttaaatcaaatctttttgttttggtagaattgctaaataaaatcaaatcacaaaagatgatgtatatattgtattgtttggtgagattattaaaaaaataaagaataattgactatttcttaaatttagaatatttttatgttatttttaacaattgtgatgatacaactaatttcgaataaaatatataaacgaaagagttcattttcaacaatgatgtacttgactatccaataataacaatattgtgtttattttatgttatcattaagagagacaaagtctaataataataacaacaacaacaatgataaaacatattataaaaaaataaataaataaaatgtttaactattcaaccttcatatataactctaactatatatgtcggtgtataatttattttctttggggaagttctttcttctattttgtattctctcaaatatttttgtttgggagtgtttgtgatggggtgtagtttttgattaatttattagatcgtactgtatattatgataattttttaaaacggtacccacaccaccacgtaaacttcaaaaccacactacaagaatacaatgcggacgatttgcactaattaccaatttaataaataaaatgtgtaatttccattaaaagggaatttttatttttatgatttttttgacaaaagtttacaaaaattttattttattgggaaatttttttttttaaaaaaaaaaggttaaaaaaatatgagaaaatcaatttataaggtaacttgggtttggggtcgtgttcggggcctgggtgcggggcttaagcctatgattgaggtccagggtccatctgagggtggggttggagttcggactcagggctaaggtcagagataaggcccaggatcagagcccaagtcaaggtcagggttcgagctcgggcccaagcctgggtttagggttcgtggccgacactgaggctggggttcaaggtttaaagtaggggttagatttcagagtcgaggttgaggtttggctccgcggttcgagatttggggtcaggatcgaagtcgggatcagaattagaattacatataggtcaaaactaaacatagtattagtattgtattgtattatattgtattaacacaatctattaatacatgttaaaatcaaacatagtattagtattgtattaacataacaaaagaaaattttacataatagactaaaaatttaaaaaaaaattacaaaaatacatcatgaaaaaaaaagtattttaactattaaaacttttttatttataaaaatacatcttcaataaaaataataaactatcttttttgttgttttatagtttacttatagttgtattatagttatcatgaatttgtttttctggtttttttttattgttttatagttgatttttagttgtcgagagattaatttatcgtgatttttttgttgtatttttattgtttgttgtgcagcatgtatttttgtaaatttaaaattttataaatgtatttttgtaattaaaaatttaaaaccgtaaaattataaataaatcataaaaaaggatatttttaaaaatctcataataaaatacaatggagtgtaccaaacgttcctataaaactccacaatgtgaaccgtttaaatattggccacaacagagactacacttataatattgagatcagttttctcaactaatccaacggtggaggcaattttattaatgaagagaatcttcaatacattatagtgaaaatatttaatattttgttatcaaaaaataaaatatctaatattttgcagcgtgtacaattttttttttacaataaaaattaaaatatttaaaaaaaaatgcatatttaataaaacaaatagaaatcttacgtcaaaaaaaatagaaaatattttgttattaaataaatataatttttttatgtttattaaaattcattagtaaataataaattgttaaattattgaaaatatataaagatgtatgtgaaataatttattttatgaaaagtaatcatttaaggaggtaaaggtaatccatcatttaattcactttaattttctttttttttttgggaaaattaatttcagatttaatgcaaagtgcaaacattaaaacataacttgattcaaatctaagaaggtaatccaatccaattaaattgaactgtaaaaattcatatgataacttgaaacaatatgaatgtttttcttcatctaaagactcttaatgagtgagtaacactagtgaatcccccatcaaccatgagattatcaccacttatgtactttgcttcatcacttgccaagaaaagcacagagtttgccacatcctcagctgtcaattccacgccctgtagattcgcatttcgtccaacaaactcacgaaaccctgtccacgcatcctcggttctctcttcctcgggcaaatgacccaaagccaagtttgttggagtggcataaggcgaaacacagttgactcgtatgccatgaagtcccaactcagctgcaacattctttgttagccccaaaacagcatacttagagcttgtataaggatgaggaccgattcccccgagtgcactggctacactacacaaagaaactatgctgcctttctttttagggatcattacccgagaggcgtgtttcattcctagaaaaactccctttacattaatatcgaacaccttgtcaaactctgctaagtcagcattgcgtatgtccttgcagggtgagcctgagatgccagcattgttgatcatgatgtcaagagttccaaacttttcaacggcgaaatcaacagcccggctaacatcatcttctttggtaacatcacagtgaaaataacacacgttgggatcacccccgagcttttcacaaacttgttggccgaggttgtcttggatatcaaccaaacaaacttttgcaccgtgtttgtgaaatagacgaacaatgttctctccaataccggtggctccacctgtgaccaatgccactttccccaacaacctgagaaaaattgagttaaacaaatctgtattcgaatcttgtaataacaaacaacaagtctaatccatccgagctgttaagcagtatggggtttcatttcaaaactaattggactgttttcgtttggcttttttcgtcctgtcatataaaattttcacagcaaacaaatttggtatccatttggtttttgtcatttttagcaaattaagtacaatccattgaattgtgagtgggatccactacccctactcaaaactccacctgcataatttttgatcttaatgaatggttctaacttgtgctcaagtcaatatcgatatcaatatcttgtaagcatttttcttggcttttcataaccatcaattcccaactcaattggattccaaaacagattttcaggataagttttatgacttaaaatatcaataataccagaatttgtaaagttaagaacttttttggaaaaattccctaaatacatattataagttatacattataaaaactcagaaatccaagcttaataccactgtaataactaacataaagcaaaattaaacaaaacattagacattggagctttataaaacaaaaatgaaacttgaacaacagatcaacactgttttgttttgcaatcaaattaagaacagatattaataaatatattttgggtcagaattagaccttttgacactgagctaatcaaacccaattggaaattttgtttttggaatacatataagacaaaactttggaaaacccagaattgggatcagaacaatccaagtggatctcaaaacaataaacaaatcatatgctatatattatctaagggtgggattgatgtttgaaacaaattatagtcaaacaaacaaacaaaagtaatctaagttaaggaaaagagaaagataggaaagttgttacctttgggtgggaagtgaagcttgagtttcttctttagtggacatttttgtggtttgcagagtctctagtctcacttcagagtgactctctcttctcttatctctctctagtgtgtctgagtagatgggcaaaaaggtatatttaatgggagagaatccatgtaaaagtgtgtgtgtgtgtttgagaacataaataaaataataaataatagtagaaaatgtacaagtgtagtagaagtaattaattagtctttttcaatttttataaatatgagtatttttagttcctttttatgtttgaaattatatgtaaaaatatatatttttaattttttgtagcaatatttggctcattcattataaataaatgtgaaaaataatgaataaattcaagaccgaatacaaaaatagattggtacagctaaagtacggtatgaaaatattgagtttatactttataggttatggtgggtttattctttaaaaatattaacacaaatacgataggattcatattttttatggcataatacgatacgatacatattttaaaaagtacaatataatatgtatcgaaccagcacacgacacacacaaatttacaatacaagaagtaactcctttgtagtctttattaatcatcaattaattattagtatatatttctttaagaaaaaatatgttttttatttcttttgctatttaagaaaaagtatgttggaaatgaaaaagaagtttctttaaaaaaaccatgtggtttattccaagcttagctgtcgtttagccgaaaaaatgacttgtacttgtatatcgggttcagtattaattgtcgttctttgtaaaaacgacatgttgtttaaaaagaaaaaaaaaactttctttaaaaaacggcgtcgtctttctacttccaaatcagtagtgttttaactccctcgtctttctattctaattaggggtgttcacaaattatcggatccaatcggcacgatccaatccgcaaaatgcggatatacacacttgtgcggattggattggattgaaaaaactagaatccgcacttgtgcgaattggatgttgtttgacctcaaaaagtaaccgatccaatccaatcttcacttaattatctatatttttaaaaaattataatatataatatatattaattaaactcttatgcgttgtaatttttaatttcttaatctttttttagtaatatattctaatttcttaatcttttttagtaatatat

SEQ ID NO: 14768 - DNA, 7843 bp, Cannabis sativa
atctggatacaaacaagagctacgagcaagacaatgtgcagctttgtttacagaacgtttaacaaaattaattgagactaacggcaaatcggccaaaagagaacggcaaatcggccaaaaggtacctattattagtgtttagcactttgcttagctaatgtcatactactattgttgtaactaaatatcgaatcttatataatttaagaaaataataatttttaaaaaatatggctaactaattatgaagcgtcacttataaaaagtattgagtaccagtggtgtccaatataatgctctataatttaatataataacattgagaaaatattagtaagtagtcataaaatactacttgtaaaaaatattaagtacttaataacaatacttttgagtataaattatattataaagtgctaattaattataaattacacatctcctataatttggagcagaatgctatttctgtttaaggtaagaaaaatataataaagtttgtatggaggtgaatagggatggatatggattggaaggagtggtgattttttctcttaatatattagttgatgggtcccattgttattaattccatgatcgacctcagtagctgtcaaatatcaaactcatatatatatatatatacatttggcttaaaaggggggggtctagtcacacttcataattctcatcatgcaccagctaaaggattctcaggtttgactcctcaacagtaccttggttatttttatatgatttaatataacaatattaattatatttaccctttattttgtccgattcaatgtacatgtattaaaattctaattattaattatgtatacttgtaataatttgtagtgtaaattttggaggttttttcatttttatattttaatacagttttttttttatttatacaaaattttacatagagattattattgtaactaacggagcaatttaaatcgtaaccaacatcgtatagcaaccctataaaaattactttaaaaattcaaactgtaaattttaaaaaaataatttaaaaataatatataaaataatttctctatatttttaaatttatttttttttatttaaatttttattgcagataaataattaaatattataatcattaaaaatatttatactataaatttcttttatataatccatatatcgacagaaaagattattaaatattagaaaagaagagaaaaaaaaatcattgggctatatatagtgtaataattaggttgccatgaataaaaagtgggtaaaaacaaattctttaggggacatatatatcgatgtttaacaatatttatttgtcactttgtaccactactaaagtttaaactctgcattgagaacatacgcaaattaaaaatgatgatagctaattacaatctcctattataattttttagttaatttttacatttaaaattacatgttaaaatatttttttcaattttttttcataaaagtattcgttatagttatagtataaatttgtttaaaattttgaatagtttatagtgccgaaaacagagttcctaatattccagtttaccactcgtgttaaaaaaaattcaaacgtatttttggcactgtaaactatttgaaattttttaaaaatttacagggataatgttgtaagcataacaaataccactgtgaaaaaaaattgaaaaagaatattctgacaaatattttttgggcatatagattaactaagacaggagattgacggtagcacttctcgttaaaaaacgtaatatatatatttacagagagaaactaaataaatctagtttattttctttgaaaccaatctaatttatttaataattaattagactagaactatatatatcaaagctaaaatatgacccctatgtggaagccaaataagatttgatataattactattatataattgcttaattagttaatttactcgtttaaatttctttagttatattataggtttataatcatataaaagtcaatgctatataccccctaaacatatacgttatccacttttaaaggaaaaaaaatagatatacattataacaccaaccaaatttatcctatgtttggtagacaggaaaagtggaaggaaagagaacttcaaagagaaaagtgaagagaagaagaaagaattgtatgtttagtaggaaagaaaataagaaggaagagaagaatgagtggaaaaaaagttaaaaagaaaatccagaaaaaatgatagcattacttttatgattttatgattttatcattattttctttttctatcttctctagtttctatcctttattattattgttattttttcatctacttttctttccattcataccaaacatagtgtaattaaatagattaaattttagaaattctcatatttggccaaagttaaatgcatattgtacttttgtgaatatgaactttaaatcaaatctgatcgtgcagttgggtcacggccgcattgctcatcgaggccataaatattaatttcagtacgtagtattaattgggggattaaattaattgactatattcactcaaaaaaataaaaaataaaaattaattgactatatataactatagcatgcaatactaattaatgattgattataatttatattattatatatccataaacacattatgcattaaacttcataatgagaacggcaaacaaaattaattaattgacttttatttgttaatttccattattaattagtgaggtttttattagttagctagtgaacatatattgattttaattttatatatcgaacaataatgttatcaattttctcagcatcaccacgcatcaccacgagatgtcactataacaaatattagaaacaagaatggattttctcttctttattgattatactaaaactaactaatagtagccaaatcgatgtttgtagctaataatattgagaaatgttaaaggacaccagtggtgcttaccacttgtcaatatcgttattggtccaactaagtatcaggtctcatataatttaatataataacttttatgaagtatcgctatccaatcgcaacgcgacatgttgaaaaggtgctaggcaccactggtgcctaatagcaatgctcaataatattagagtgaatatgtagagttttggtttggataaatctcagctcatctcttactaagtgaaccgtgtatttcgtttatagaattcttaggtacacatacatctactaatacacaaatacaaaaatcaatacaacaatattctaacagaattcttacacccaataaagtggaaagaatattctagagtggcctaatcttaacaaaatgatgagaggaatatcctctgtcatggcagtgcatgatactcctgtgaggctcaggtattaggcaggttcttaacaccacccctcaaacaaaggggtgacatttttataccgagtttgtccacaagaacttggaacttggaatgagagagactctttctgatgcagtctgcaatctgataaaaaattagcacatatctgatctcaagttctttccttagaccttatttcgaacaaagtgactgtcaatcttgatgtgcttggttttaacataatagacagggttagaaacaagagcactagcactaagattatcataccaagtgacatgtttctcaggtagcttgaattttagctcttttaacagagattcgatctaagtaatttaagtaaccacttgtgctaatgctttgtattcagactcagtgcttgatttggatacattagcttgtttttttgatgactatgactcaagagcctctctaaaatacacacagtgtccaacaattgatcttctatcatcaaggaaaaaagcccaatcaacatctgaatatcccactagagacagcctttcattgtagccaatgtgcaagaacccttttaactccactctagtggctagtggttggaccctgcaagaactaacttagtttgttaatggtaaaagtaatatcgggtctggtataacacaaatattgcaaagctccaattgcacttctatagatggtaggattggacagtggtgttccatcattttttgacagtgatcttcctgtaaccatgggagttggacatggtttgacattcatgtcatatctcttaagaagttcagtgatatattttgtctgtgataggtacagacctgagtcatctctacatacttctataccaaagaagtaatgtaaagggtccaagatctttaagagcaaaaatgcttgttcaatttagtaatgaactcaacaagctctttgtcattgttcctaataacaatgatatcattcacatagatcaacacaattataattacgttatctgtcatatgaaaaaatagtgaagtatctgcctttgagttggtgaacttccatgccgggttctaactctcaggtggcttcttccaccttactattcctctaaagtatcttgaccaatgctattgtcttgttccgaagaaccttttccttcctatcgaagatttgaacttgttgttcctcataggatagatctgactgtagttctagggcttcataactcaagacatgagttaggtctaacacatatttcctcaacatctaaatatgaaatacgttatgtacaaccgataatgttggtggtaattaaggctagccgatatgctacctacacgaccttcttgagtatctcgaatggccctataaacttagggcttaacttgccccttttttcaaagcgctttacattcttcattggtgagactcgtaggaaaatatgttctcctacctaaaattctatgtctctgcgcttataaataacataacttttctgcctgctttgtgaagcaagcgtccaagccttgatcttttctattgcctccctggtccgttgaaccaggactcaaatattttctttctccagttttgtcccaatgaatcacgaaattccatttcctaccatacaacatttcgtagggagccatcaatattgtactataatagttgttgttgtaagaaaattctatcgatagcaaatatttattccatgaaccctaaaagataacataggcttgtagcaaatattctaatatttgaatcgtcctcttggactgcccatcagtctggggatgaaaagttgtactgaacttcagctttgtacacatagctctccgaagactttcttagaacttagatgtgaatttcagatctttgtttaaaacaatagattttggagcttcatgaagacgaactatctcttttacatataattccgcatactgatccactatataggctgtctttaccgacaaaagtgtgttaactttgtaaaacagtccactgtgacccataccgaatcatacatttcagtggttctaggtaactcaaccacaaagtccataataacatcttcccacttccaccaggaagtgtcaaaggctatagtaaccctgccagtttcttatattttgtttgatttgctgaaatgtcaagcacttggtcacgtaatcgactacacccttcttcaatttgcaccaccaataataaggttttagattttggtatattttagtagtacccgggtgtaatgaataaggtgtagtatgtgcgtcatctagtatttcttttcctgaactcatcactgctcgaaacacatactcgaggcttataaagtaacatcccattgttcaaaattgagaaatcattagcctgaccagctaatacctcctacagaatcccaactaactcaaaatctttcaattgtacccctctattttttttctaataaatctgactaaagcgttacgttgtgaagatttccaaccacaaattcaatatcggtcctaaccatacctaaagccaattgaggagagatcattgtggtactaaaaacctgcccgggatcttttttgctcaaaaaggcatccgcaacaacattggttttcccaagatgatacaaaatctcgtaatcatagtccttgaatagttccaaccactgtattgtctcatgttcaaatctttttgagtgaagaagtacttgagacttttgtgattggtaaatctcacacttttctatgtacaagtaatgccactagatcttcagggcaaatacaacaacaagttctaaatcaagtgtcgaatagcgctgctcatgctccttcaaccgacgagaagcataagtaataaacctatcagcttgcatcagaacacatcccagaccttgtctggatgcgtcacagtacaccataaatttctcttgatctaatggcaaagctaacactggagccaaaatcaatcgctgctttaattcttgaaaacttatttcgcacttgtcagaccatacaaaccgttgattcttcttagtcaattctattaacgacatagacattttggaaaaccattctaaaaaaaacgttggtaataaccgaccaatctaagaaaacttttaactttagtaactatccttggtctcgaccaattcttaactgattcaatttccaaatcaaccatgattccatcctgtctaacaatattccccaaaacttacatttcttaaactttgtatacaacttgtgatctctaagtcatagaaaaactatttaaagatgttgctcgtgctctacttgtgactgggagtatacaatgatatcatcgataaataatataacaaaattattaagaaaattcttgaacactctattcataagggccataaaggttgtcagagaatttgtcaacccaaacgacgtcaccaagaactcataatagttgtacctagtttggaatgcagtttttggaatgtcttcctcccgaattctcaactgatgataccctgagtacaaatcaatcttggaggaaactatttttccttgaagttgatcgaacaagtcatcaattcttgacaaaggatacttattcttaatcattagcttattcaattcccagtaattaatgcacatctataaagatccatccttctttttcacaaataaaaccaaagctccccaaggagacacattgggtcgggtaaaccctagatccaacatcccatgaaattgtatttttagctccttgagttctgccggacccatttgatatgatgcctttgaaataggctctgcactagctgtcaaatcgatgatgaaattaattttttgctacggtgttaatccttgtaactcctcgggaaacacatccaataactcttttaccacctgacatcctcaggcccaaatattttggatctgctggagtcaatcacaatcactaaaaatcctacacatccattgtgtagtaaatccttagcctttaatactaaaatgatcgaaatccgagaaccttgaatggacccggcaaatacaaatggttccttgccctctgcttgttgccatagaagaactagcgacaacatctacctaagtgatggcaaacactcgagctggagtgggtttcacctcttagttctagttcctctttcttaaactaagggcaatccttcttaaagtgccccaccattccacactggaaacatgtcttccggttacatcccccaggatcatgcttcttgcaacgaggacactctagattagaataggcttgacatccgcctttaacttggttcccatggaacctcttacttcgactcgagccatctggtgctgggaaaaacttccttttctgattcctattggaattacagtcatccctaccaaaaccaagagtggaaaatgtgacagtcagtagtcccgtgatccgtaaggggaaacaacgggtaagctgtgcaatcccacaccgcct

SEQ ID NO: 14769 - DNA, 5347 bp, Cannabis sativa
tcgaaaataacttaaataataaaaaattgtctaagtaacaattttacagtaatttttgttgatgaaaagtaagtaatttgacaaatttagagataggtttgggtgatacttggaagtgatgacttatgataagactaaccaacttctaaggggacaatcccacctgaagtcttgaaaattatcactctttttctcaaatgggatcaaatttgtaaaagggaaaatacaaatggctttctgcatctaacctttttctatattcagatctaatcctatagtcttgtcataataacccaaacccaatctctacaatatatattgttcaaaaaaaccaaccgactaatttgaaaaggcaaattaaaattattttctctccacgttttcttttttatttccagcagtacatattaattatttctcatttctctttctttaatgagaaaaaaaaaaggaaaagaaatgtatttttagtaagagtcaaattgtttattatcataatttgtgaacactatataataatttggttcgtatattatgatcatttaattgacaaaatgttgtcactaccaaaaaaatataattttagtgataaccttttagtcacaatatgatatttttttgtgattaaatgtgatttttagtcataacaaaaaattacttgtaactaaaacataatgtttaaatacaagttgtcactaatttaattttagttacaatacttgttgtgactaaaaatatatatagtcacaacaaatgtgatttttgtgattaatacttttagtcacaaatttttataatggtggctatgaacaatgaaaaaaaaaacttatgtggcttctttaatcggtatacatattaattaccaccttatttataaacaaattaagataacatataccatatcatgttctaatggagaataatgttttattttattttttcttcatcgctttattaacagagcaattttataccttttctcataccaaacgtgcattttatatacaaactaatttaattaaaattcattttcgcaaaataaaaatataatcatattcatataaaccttataaagtcaatttcaatgaaccaaattagcattttctgttattaaaatcccaaaatatattttctgtttcctctattttctttctttaaggttattcggccacttaaagtttatcttactgcatgctaattagtcatttaacaaattatatggcgattaataagattttcacatctaactttttaagatgaacaacatgaaacgttataggattcgaatcagaaatattgggagacaaagtaaataataatatataatttttatattaaaagaaaaccaataaaaaatataaaaaaaaaaaaaaaaaaaatgaggaaggagccaaggccccctcactatgatctttctctctgtttttgttttcccatatttttgctgtgaaattcgtaagcgtacctaagaataagttatctacttttgtaatatctcatttacctaaattacaagattaacgatttttataggggacattccatgcatacagctaagctatatattacgatacataattatagtgtgtataaatatatatgcctttcttgtcgcaaatatgacaaacacctcgtgtctcaagcatatatatatataagcattaacttaagtgtgtgtgtgtgtgtgcacataattttgaccagttcgtttcctccatctttagtgccatggaaaattttaataagtaggaccctattttttaaattatttggtagctaaaaaaggataatgtttttatgttttcagattaattggatatagacacattgatcttatcatatatatttaatttgattgatatatacagtatactcaaatgtgatttaaaggtgctagaaataatgagattaataaactgtagccgcagatgagatcaatcatgaatacagccatatatttgttgtattttcattttatatatatagtagactcgatttattacaaaaaaatacaatcaacctaattaagagagaaaataaaaagtatacaagaaaagaaattaaggagagaataatttacatactaagaaaaaattttaaaaaaaaaatacatgagtttatatattcaaaaagcacaaacagaaaggtaaggaaataatatgcatatatatactacttgatgtattgaaaagtctatataaacatgaaacaaataaaagatgagggaactcttcttcttcttcttttttacataaagatgttctgtttaaatatgttattttgagatacagagttctttttgagaggttgaatgttgtgttcaaatgcaaggatttttttggagagagtggaatatgtatgtccttcaagtacacacctttttttagagaggcggagaggtgaaagtgctatatatatggttgttgttgaaaaataacagtacacattcattgcttttttatacgttaagatactttccaaagacttcaacagaaaagaatttacaattgagtaaagacacttggatgcaatgtttatatacttacagaagaaaacaaaaaatatatatagagcaaagataggtggatgcattgtttatttagttgaaacactagacatagatcacagctgccacctatttggtaaggaaaaataggtacttgacatctcacgaatacgtaccaattttgtatcacatattgttgtttatcaatatcaacattctaattcttgttaggtatcaatgataatctaattcttctcaatatgaataatagtaagataaggtacaatacatacttttatcaaaagaaaaagtacaataaataaaatacaaaatactaaaaaagaatacagattttgatttttctttatatatgaataactatcatacttttaacttttgttgctggtcatcgactaagtaaataatttatccacaaatttgtatagagtagatataggaaatctagtattatcttttaaaaaataattatcatttttatttgagaatatattaatttgatccttgtgttaaatgcaaataagcccttatgttttttgaattgatagttcagacttcaagtttcgtaaaatatatcaaattaataccctaaacccaatttttgggacaatttttgagcaaactaatacattaagctcaattttccaacggccaacgaggatcagaactttggattaagtgatattgatagtgtaagatatataattgatattagaattaataggcttagtaattgtgtatatacgaatgagaaaatgatctagagatagagaaagagaaggagaaggtagagaaaacaaattaaactttaaaatttatggcaggggtgaaaggagaaaatcgcactaggtaactaccaagttcagccaaaaaaataataggacaaaaagtcatattaatggtaaaggcaagaaagcacataatacaagttaaactcagaagatgatgctgctattgagttggtaaataatgtgtctacagttgttgatgacagcatttatattcatccaccatgatacctgtacatacacctctagaatatgataccaaagatgatttgaataatgcgtaagaaagaacacccccacaaaattacgtgttctataacatcaaaatctatataccaaaagaatcccaaaattgggtctgagacagttcacttcacttccaccaccagaactgtcgaaacaaatatatcttcctcattcggacattgttgtaagtcaagaaagctctcgctttaataggatcggcattcaaatactcgaatgcatacatctgtttggcctcttccaagccatcgatctccatcaccgcctgcaataactcagatgagtcaatagaataactgcttcgttccattgcatcagccaagcgtcgaatgcttgatgccactgccaacattgcgtcttgaagggcctccgaacttcgaggccgttttggaagctgccttagagggtggatcaaaggaggttcttgactaccatctggcatctgggcatactcaggtggtccagtatgtgactctgttccatctgtctcgcttacatcttcagaacttgcagaaacaaacgaagcagagtcatcctcgaaattctttatctcgggctgaaagctcccatcttttaacttagcccagcgactaggagcttgataatttccacagacaatttttagttcatcatacatctctatttgctttcctcgaaattgtctggcatcaggatgtgcctaatgaacaaataatttagaagaaacaaaataaatgcaccaaaggtcaaagcaaaagctaagaagaaaaatatttactcacagctatgtatctcttccaaagctcttcatgctcgcactcgatcatctttgtatttgggttccacctaaacccatcatgacttagcatatccttcattatcttatacctcttctttattgtcttgagacgattaacaactttttggttatttaagtttaagttgaaacgagaattcacagcaatacacgcagcagtataagcattttcattaaagcatttatcgattttgtttccattttttgcttgaacggcaagagattcaattagacacttgtccattgcaattgaccacacaacattccttcctttgtgcttcgtatcccttctctgtgcatgcagatcatactgatccgtccctacgtgaaacggcttagccatgcaagagattcaatgagaagaatatgtcccagttgggcagcaaacaaaactctcgcccaatctaaggtgtcatggaatttcaaacacaagatttcttctccctgcaaggctgcacataacccacaaattaattatcaagcagcaattgtagatgtagtgatttctcaaattgctattaccccaccaaatagaacttcatgcaacataaagtaattcattaattccacagaatgaactaatttaaataagaaatacgatatcttacccttgtttctatattttttgagacagaaaatcaaaattatgattatgggaatttgatgatttcccattactcaatccctagcactgttttaaagatgagcaaaacatttgaaataaacaacattcacccttgttaattaattaagtaattttttgccaaaatggtgacaactctaaatgatgcattgtcacatcaatattttctaatagtaacagcaatatcatttttatcactttgcttcccaatttcaagttgatcagcgaccagaaatgtttatattaaaaataaataaatacaattttaaaaattaaagcttaccaaggtcaaaatcatgattttaatcatattcaggaaagaaaaatataca

SEQ ID NO: 14770 - DNA, 3206 bp, Cannabis sativa
  modified_base (40)..(50): a, c, t, g, unknown or other
aaactaattggcaatgagtggagtagtccatgttcttatnnnnnnnnnnntacttttacatttaatccatgtgagacaatgttcttcaatactttgaatatatggagattagcaaaacagtttcagtttcattcttaaatttataaattataattcttaaattgacatgatccatttgataatcgagtttgtaaagtgcaaaagttaacgcttatgcaaattagcataattgaaactcattaaatccaagcattcacactatatatggtatattattattttaaacaaaataatattcaataaaataaataaatcaaaagatttcaacgtcttggccaaccttaataagaaaggttgaataaaaaaaaatgctcaatttttcgtgctcttactacggttaagtaacatgataaaaatccttgtaacatattgggagttataaatttggtaaataacagttaccattgaaatttgaatttgatgtgagttttgaagtataagactgttatacatgatttttcaacagtatgtttaattgatgaaaattacgtttgagaggttgtgagatgttttgataattttaggtatcatcagagagtattgagagacagagaagatagcatgtaatgtgtcgcctggtaataagtgacatgcgcaaaattacttattttgtatttaatatattattattttttatttattgtcactaagagtatctccaatcatgctataaacacattccttagttaaaatagaaagtgaaacttgaaaatatgagcttcaaccatacaaaaaagggaaacttacaaaaatactggaatttgggttagtataacatgtaaatttccctacaaaaaatgactctataatagagaatggataagaaactttctaaatatacggagttccttacttttttgctaaaattttttaataatattttaatcaaaagtattgttacttttttattatattataaaattaatttatagttgacgaattcaaattataaaatattattaagataattaaatactaactaaagtaggaagcatgaattgagcaacaaccataaaaatagttgagagttctattttagctttttagctattttagagaatttggttggccatggtgataagcatgtgttgtgaatcaattaatggcttacgatgaaagaataccaaatcaacgaacacgcaatcaagaagaatactatcaaagaatcacaagaaccgaataatgagttaaagcggtaaatcaaggagaagataacaccgagatttaacgagttcgagccatgtgtaatattctacatctcgattagaatagcaccaggcatatctttattgatatttattgatattgatatttattgttatgaccacactatttatatattttgcatctatttatgttagaaactggtttggaactagttatgttgaaaaacaaaattgataaaaattaagtttataatattattttgtactattttaaaatatataaggtctaatctgtcattaataaaatagaggatcccatttataattttttagtctacaataatattaaacttagacatgattaatatgtatactaacttgaagggagtgtgtgagttagtttataagtagctatttatattatatatggttatatttattatttgattaatacttttttagatttaatttgataaacatatgacttttgtttgtttttctttgttttttcctttaaagtaaatttgcatgttggccctcgatttttcaacaaacttagataaagaaaaggtttaaatcctaatatatcttgtaaattgtaatgcaataaactttttgctaaagttgaaaacttgtctttcagcttaatcatataaataagattcttggcatattgttaaaggacaaatttgtgtaaattattcataaccccacatgaataattcatgtttattatatatatgcaatgatcttatttaaacaaagagaatgaaacaagcatatatataaaaaccaactagacccaactaagtggtctaagcacaaccaagaaaaaaccaaacaaaaacacattgcaacagcatgatatatatcatccatctccaactgctcttggaaattatatatgtatgtatgtttgtcacttgacaaaaccaggtccctcatatctctcaaaatatatggctcatatctatttaaatttatagggcctcatatagtagctatctattcagttttttattttatttatttatttattttgtttgagagagtgagctatatatgttttggaaacaatacataacaacatttttatatgttttattttttatgacagatatgattttttatttgtatgttattattatgtaattcgtacagcgcatattagagaccacattattttttttttgaacaattagagacctcattattaaatgtacatgtatacaaataatttatattatacattatgcacaaaaaaatattaaataattaaatatatcttttttaactcattttgtgaataatatacaatacaggtttctttaatttttaatatatataaataagtatttttaatttttatttgtaataattattgactaatttacagtttagtaaataaataaatatttatattttttatatgtatgtaacttacaaatatatttttaaatagaattattttatagttattttttcttgttttaaattctaaaaacaaatcaaataagtaaacatttgaaaatatctggttttaatgtgaaattcaattaaaagaatttaaattttaaataaatgtgaatttttatactgaacctaatgtgtaacttatgactaatttttaattccaaaatattgcatgtatatgaaaagaaaaaaaaaaaaaccactatttcactcatagtattaggagatgtttgtaatgggttaggactacgtaacaatggtaatgtaaaatattaacatgtttgtgttgaggtttaaatcttgaaatattattctctaatataactactttttaagagagtaatgctcactctttaaagaaatatgggtttaattattttcttccatcatattaatttgaataatatgtttaaattaataaataaacttaaataacattaatatatattattatttaggctaattagtaatttttctcccgaactttgacatgtactaaattatgac

SEQ ID NO: 14771 - DNA, 7148 bp, Cannabis sativa
  modified_base (2081)..(2086): a, c, t, g, unknown or other
tagccatggtgtatggagaactctaggatagtaaattttctaaggacaagaatgaattaaaacaagacaacaaaaagaagaatctggaaaaactcaagaggagatagtatagcatttttgatatccaagtattataccttatttattatattcatacctaatcatcattgtatttgtattatgaataattatatatatatgaagcatctccattatcaaacttacaattctccattttcaactcgacccaatgacaacttcgaatgtggtccactatttattatctcaacaaattcctaaaccttttccatttgaccaaaatataattaagtttgaaaaattcaaaacaattaatttaatggacatgagaaatgagtcaacttgttcataaaaaagacccatacaaattccatatccttttctctaaagcaccaaaaagtacaaactactaaaaagagaaagtgacccattttagatttttcatctctctctttcaccttcttcaaattcaattattctaaaaaaaaaaaaaccccaacccatcggaaaattcatctccggcgataataacactattcattcataaaatattaccaaaacaaaacataacccacttcatttttattgagattgagattcatacttattattttgttatcattatcataatatcattaccaaaatccaaaacccacttcattattgagtttgattttaatgatgggtgcatggatttcgtgccatatatatataattaatgaacacttatttcttaattcaacttattgtgggaaccaattaaccaaatttgtattgtaccatctcatttttgatatatatatatatgaattattattaaactcaggtcacgttgctctattaacaacatgccaatgaaaatgacagataatattcaagttgtaagtatatccacgtgattcaacatgccatttccatacccatttttaccagaaagtcttttccttttttcctttctaaacaataataattaacacttcacaaaatggtaatccaaaccaagcccatctaccagaatttcactattaaaccaaagcatctatttaaatatatatataattattttctgaaaaaaaaaaatagaagaagaagatggcctgaaattattacccttggaaaaacgttacgttacaacaaaagaaataaagaaaagaataatattgagatttttattgggttcttcctatatatatttaatcagaccaaaagtttcatagatattattaaaaagatcgaacctttttttcaaagaaaaaacagagagtgataactaagaatgaagaatctgtcatatataaatatatattatctatttcattgtcttaaaatatcttttaaagatcaaaaccttttacatacgaactcaaaactaatcaataaaattaaaaatacctctatacattaaaaagttcaaatctttacgacgtaaaaatttattttttaacacaattaagtgaattaatccctttttattaacagatgtgaaactacaaaaatacccttccaagaactttggggggaaatttttaagaaatttaattggtgaaaaaagctcagacccatatacagtccattaaccagtgaacgttttcccacccaaaaaataaaaattgaaactttatacataaacaagtttgccgccgatgacctgaaacttagtcattttttttcccatgtacaaaattattgcaaccatcttcaaaattgagaaaaaaaaaagataagccaaccaaattcgaatgctagagtttgcaattcttcctagaaaaaaaaaaagaattgatctttcgaaatttggttttctaattttttttcttcttcttcttacaattataaatgtaatcataaaaatttaaatttaaacaaaaaagaaaaaaagaataatcagaaaactaggccatgaaaattgataagcatttacattacatatatattaagatataaccagaaaatcgaatgtgatgagcagagtgagactgactgaagatttgtgccacaaacacgtaacccgcaagttatagcttctctctctctctctctcnnnnnntctctctctctcctcaaatatttacacttttatacaaagataacgctgagacccttctctctctctctctctcttaaactctgtcaccactcacccgccctatacaaacccctctttccatgttttcttcttcttcttcttcttcatcttctctataaagaaaaaaaggaaaaaaaattctaatttcgaacttttcttgattaaattgcagtttctttgattctatctctgtatattttatatatattgtagtttgaagtgtgtttaggaaagaaaggaaaagacttgattgaagagagatccctatttttctcatctgactgtgaattcgatcaaattttcttgggcattcttttgtttctgctcaatttcttttctttgtttgatttttccatctgggtgtgtgggattctctggcgttcgttgttttcttaattgccccctgtttttttgcaatctctgtgaaattagggtttatgggcgtgttttgtgaattggggtttcgacgatgaaatcgtatagggttatggtgtgtgttattatgtgaaagtgcggggtttgttgaatcgttgattgtttggatttagggaagattcgtggagtgggggggttggttcgtttgttcttaggtttcctgattttgaagccatgattattaagcggaatttgaaatcccaaatgccgcgtctgaaacggtgtagaccgtttgagtcagcgggtgaagatgacgagaactcagttaggaagaagaagaaaaccaatgggtattaccctcttaatctgcttggtgaggttgctgctggtattattccggtgagcttccatggtttacttagctctgttgcaacagggaaggaattctctgcttcgtggtgtactgaagcctcgtgctcacctgaggaggaggagttaaagtcaaaggctccagatttagtgactgagaggattaatgggaaggtggaggttccaaggccaccccttgttagaacttcaaggggtcgagttcaggttcttccttctcgttttaatgattctgtaattgaagattggagaaaagatagtaagtctaatgtgcgtgataatggattaaatgatgagatcgaatataaaaaggagaattttagcttgaggaccacgaaaacttgtagtgttaatgtgaaaaagactaaaaacttggagaggaatggatataaggctgttaagtattctacattgtatgaagatgaggatggagttgagggaagagtgaatggtgttaaggagtttgaatatagaaagtttttgagttccaggaattctgttacgttggttcatgaacaaatggttgagaatgacaggtgcccaattgaagaaattgagagaaaaccttatctgctggatgaaaatgagagtgatgggttgtatggacctgaacacttttattcaggtgatatagtgtgggcaaagccagggaggaaggagcccttttggcctgccattgtcattgacccaatgtctcaagcacccgaactagttttgcgggcttgcattcctttagccgcgtgtgttatgttctttgggtattcgggaaatcaacgggtactttttcttcccttaatgttggagtggagtttattgaagtcttgattttgttgttattattatttgattatgattgggtttaataatgtggttatttattggatattgcaatgatattgagcaggattatgcttgggttagaagggggaacatctttccatttatggatcatgttgacaggtgtgcgctcgcaccgtttcctttttagacggttacttttaacacttggtgatactgagtaatattttatctaaataggtttcaggggcaatccgaattaagcaaatgtgtgccctgtgaattccaaatggcaatcgaagaggcgtttttggcagaacaaggatttacagagaaacttattgctgatataaatgtggcggctggaaatgtaacttatgatgtgtctatccttaatggagttgtagaggatacttgttctaaccaggatcctcatggtcactttcgtaaccaggcaagttgtcttgaagtttccagcctctattaaatttattgtagatgtagtagaattgctaaaacatttcccatgaatttttcaaatggaattgaactcattcctcaatatgtttgtttgtaactgttactgatgcttcactcactgtgatgatctgagaataagttctctgtgcaaccaaactttgtagaatctttttcagttaacgtctgttagtttgttgaggaaagatgcttcagatgaaaatcactgttcttagtttttcgcagcaatcactaccctattagagatggtagtttgtcagtggagaaatataaatatatgttcagctccttcatttgaactaattctttgtcttctattgcctatgcagaatatgtttttaaagaaaaaagacacacaaccttgtgaaggctgtggcttgagccttcccctgaagactaccaagaagaatccctcaactccatcggaccatgttttatgcaaatcttgtgcaagggttagtcttgcctaagttgctctatgtgtttgttattttgcatatgctatttgtttagttgttaactttggattccgaagttattgtgcattgttcaaatccattaattcttattgcagttaacgaaatcaaatcattattgtggcatatgtaaaaagatctggaaccattcggatagtggaagttgggtaagaaaaaaatataacctttttatggttatttttagtttttcctattgtggatgactgctaatttttatcatgatgtttctcactattgtaaattttttctctttgatcaggttcgttgcgatggttgtaaagtttgggtgcacgctgagtgtgacaaaatttccagcaacctctttaaggtttgtccttcaaactatatatacacatgatttcgatggtttctttgtttgcttctatttgaataccgggaggcagaagacattgcagacttccctgattggttatttatgttttatttttttgaagaatttggggggaactgattattactgcccaacttgcaaagcgaagtttaatttcgaattgtcagattcagagaagggatcacaaccaaaagtcaagtaagtcactcaagctgctagtaaatacttttttttaagtaaatttccgctgtatttggcccttcttttgaataccactctagcaaattgctgggcgggtccccatgaggaatcgaaccacaaacctcatgggtgtaaaccatgtgtctgatcacttgtcgaatttttcattttatcaattattaactttctatttttaggcttttagctgtcttttacgttttaaaagttttcagacgttttatgtgctgtaattcgtgcttgtatttttccatctccttatgtcacgattattttgcagcagatggaacaaaagtaatgaccaattggtgcttcctaacaaagtcacagttctctgcaatggtgtagaaggaacatattttccaagccttcacttgtaagcataactttttaaaattatcgtattctctccaaattttgtctgctcggaaattaaaaagatattatgttagctatgttacttttttaagtattttttgcataaaggaattgccttctatttaatgagaacatagaaacattagtttgtgtttttataattcattcttatgttacattgaatttttattttttcagagttgtttgcaaatgtggattctgtggctctgaaaagcaagcacttagtgaatgggagcgacacactggtgctaaatcgagaaattggaagatgagtgttagggtgaaaggttctatgttgcctctggaacaatgggtttgtactctagttatcttttgtaactatttatattttatttatttggcgtttcttcattttaagaataattttttaaataaaaaccaaattatggaagaacatctaaaattaattaagtataattttgtacaatctttttcaatctgcagatgcttcagttggcagagtatcacgctactgctctcgtgtctaccaagcctaaaaaaccttctatgaaagaacgaaagcacaagttgcttgcctttttgcagggtaggttgtttgtgtgcttttgttcttaaaagaaaaaaaatagtttccaaattttgtatacatatatataattaaatctccagaaactaggtgacctaactgcttcttattacagaaaagtatgaacctgtttatgctaaatggaccacagaacgatgtgctgtatgtagatgggttgaagattgggattacaataaaattatcatctgcaacaggtattgttttgtgaccgtgatgtgacctgctctgaccgtttgtttactagatataaaagtgtgtgtatttggaaacttacatgttcatctttcagatgccaaatagctgttcatcaagaatgctatggagcaagaaatgttcgagattttacttcatgggtttgcaaagcatgcgagactccagaagtgaagagagaatgttgcctctgtcctgtaaaaggcaagtttttgagtagttatatttttgccgttacatttttatgaaaaggaacaactattgtttatctggtatttcagtatcaattaaataataaataaatgtaatggttacgtttcgatgtgctatttcgagttgacgtcttttttttttatctttcctcaggaggtgctctaaagcctacagatgttgagacactgtgggttcatgttacatgtgcttggttcaggcctgaagtctcttttgcaagcgacgaaataatggaacctgctcttgggatattgagtattccatccaattcttttgtcaaggttgattctttgatctaatcatttattgatttattactgttttaattcaattacgagtttaaaatgaggaccccagtttattaatggacatcacaatttttggctttttctttttcgggtagctactgtattttataaatctgaaatgattcttattctatatatttcagatttgtgttatttgtca

SEQ ID NO: 14772 - DNA, 6348 bp, Cannabis sativa
  modified_base (54)..(63): a, c, t, g, unknown or other
  modified_base (1136)..(1148): a, c, t, g, unknown or other
  modified_base (1218)..(1239): a, c, t, g, unknown or other
  modified_base (4078)..(4078): a, c, t, g, unknown or other
ttcattggaaatctgaatatacgtgtcctttaaataggagtctggtctcgagtnnnnnnnnnngagaaatctcactataacagaattcttgcaccttttaggtagaactctttgaatgtccgcacatgcccgtaggtttttcacttaggacatgaaaaacatcatgaatacttgtgattttcttggaattttatttttacttgctttattattgtcaacttatgcgtgtgaggacacttttcttaaaatttcacggacaacacgttgaaaagattctctatcttttagatgagctatctcttagacaaccaaatcttcaagtttgatggaggagcatttatggattaacctaaacaagatgatagctttattccaacatcactatcagaagatgaggttccagcgaaatcagattcgcaagcttcatggtccattggagagataacttgcatggttaaagaacttgaagagctagtagttattgaagtccaggaacgtgaatccactgtatctgcccaaggaagctttatccatcctaaagctgctccagataatgaagtcgagaaaatagggtgagactttgaattgcctacttgtggggataaaggtgaagatgatgaggatatcgcggtttctgctaaggatgcaccattagacgaaccattttcctgtgaggatttggttatgcgtgtaatgaagtctagcttgatgacattttataagttgaaattgatcagcatcggttgtacaaaacctgtgtcaatacaacgtccacataggggtgagcaaaaaatccaagaaaccgaccaaaccgaatacaccgaccgtccgaacaccgaaaaaaccgacactgagaaaactaaaaatcaaaaaaactgtcttcggttaaaactgccttaacatggtcggttttagtgtcaatgacaaaccgaccgattaaatcgagaaccgaccgaacatatatatattatatatattatatgttatttttgtatatatttaatatacaattttattaaactagttttacttatatttttttatttaaagtctcaattattcattgttttattttattataatttaatacatttacgtattagatacacacattcataaaataatacgagtttttnnnnnnnnnnnnntaccatattagtagcacaaataatttaaacaaatttaaaaaagctcattttacattatttatttaactannnnnnnnnnnnnnnnnnnnnntatgatatttgatacaatactctatttttttttagttttcaaataattataaaaaatttaaatacttacttttttaaaaaaaaaaaaatgaagttcagtttggtcggtttaaaccgaccaaaccgtggattaaaacggttggctttttttacatttgtataatggtcggtcggttttcgaattataaccatgaaaattgaaaaccgaattttggatttttttgcgtgtaaaaaaccaaccaaaccgaccgttgctcacccctacgtccacaccttcctttcaccaacccaataattacccaactgatgttgtggtgatttatgttcccattctttgctttagagtcctagttccattattccattctttcataaaagcaattttgacgtactatgacatcgttcccttccagcttacccccaacaattatagaattgtccttggattctatgcgatgtatatggaatacacacaaggggtacctaccatcaatgacttttgctatttctacgacattaataatgttggccccgataatggcttctactgtttcagtaagtaggccaactcagaagtcaattgaattgaaggtacagtttccaacatgggagactagaaattgaaatggttttattcgttctctctgtctgggattaggatagattttaaccgttgccctcgtacattgcatactttcatacttgtattatttttattctaacttttgaagattttgaccttttctttatacttgcaggaagaccaacttgatcaaaactcactgggaatcattttgagattgcagagatactaagtaatctaccaattagagattgtgcttggtgcattctttgtacgacagcaaagttgcgagaacacagactgacccaaaaagacgctacactccagcgagaacctgtgtacaagaagccttccaagaaactaaaggtaaagattgaaaggagtctctcaaaaaaactcgaaatagctcataggtaatgttcccctagtatgcttagtaagactttcatcaaatttatgcaattacttacactttcaagtaggcgtgcaagagcacacaactagcttccaacatatgggcagctcgaatgagccgaccagagaatgcgagtttgacatttttagagatatatcctatatatcttcatgcttgcaagacatgaaaatatctctaattttatgagatggatacgcaatatcaaggaagaaaggcaactcgcctagttttctattttactcattgtaattatagaaagtaaatagtttcttcatttattaatttctatcaatctttataaatagtggagtcatctcactattcagagacacaaaattcatagagaaaacacacgagagaaatcataagagagaattatagatttaagagtgtgaaaactcaaagatcattgtaagagctttcgatagagatcaaaaagtttttagttttcacctcataagtcaatacaaactaaaagagaataagctattatcgctatcaaagggtctaacctctataattttaatattttctttacctatatcaactattattattatattatttaattatttttaatataactttaatttaattcactatcattagttaagaatgaggttaacattataattaatatgtatatatagaggatgctatgtatgtagtggattttaaaatatgttgcaattagaggtttttgcattgacttaaattatcttcaaaagtatcattattaaatttggtgcgagttagtagtacatagaaataataagttattttattttttcaatgatctttaaacttttttacttttattttgacacttataaagagatattattaaatccaaaacgtacaattcttattctatttatttttttaaaaatagataatcatgtaactaccataattcattttacatattaaatatatgtacttcatttattatacaggatcccccacatacattaacatcatcatataaatattcatacatgtatataacaaactaattacaaaagagaagaggaaaaaatacagttgtattgtatattattagtttctttttttgtttgaaagggaaatacaactgtattattagcttctcttatttactcatacaaaatattttaattaatttgctcaggaaaatttattaatagccagagatgatacaatgagtaagggaaatattttgttataaagtatttgaatattatatatatatatattttgatttggactgatgcctggagttgccttaatgacaaacaatgaccacactaaaacctgcagaaaatcacgctgacgtggacacctcacatggatgtcacgtcacaccctcaaccaatagaaaaactccaagaaccagcctgtggagcctagctagcttcactcctcattcccacctaattaacttccaacacaaaacaaaaatattatattatattagtattattaaataaaatattacagtgttgatttgtattaataaattgtattaatttataatatctttttaatagactcgatccaatacggactatgagtccaggttcgggtcccaagtctaagtctggtttcgagtctaggtctagattcggttctggaatgatctttttaccagacagacatttaagacttctacttgtaaagaaatgatctttgagcaacacgtggcccctacttttaatagttaaacctttgcacgacacatgttcacactacaagaaatgtcacttttaccagcgcatttcgcaaactgagctgacaaagaggtcaaagttttaccagcatacatttgcagtggctaaaatntaacttttaccagcgcatttacgttctgggaaaagtcatctttgccagcgcttttcattttatgctggcaaaagttctaataccaacactgatttgccaaccccttttaccagcataattctaacttttgccagcacaaaaatgtgctggtaaaagtgacatttcttgtagtgtcaagtggtacaaaatggtcttcattatccagttgttgcacgcacgagcataatgctacccacgggaccatccaatcaactctaagattgcatgtaatttatccaaatagtgggattgaagcaggaatcttaggtgggtcatgggcctgtccatacccaccacttagcctataaatacctctttattctcattcaaatggggcaagctaaaactcagtcaatattgctctaggttttcttctccaaaagaaatttagagtacaagagttagggttttcagccaaaatactgtaaacgcatcaatactgtccttagaggctaatagactgactcgtagactagggtttattaatacttgaaccacgtaaaaaagtcttcacctcttcatttctgaaaattattatttctttagctcttaaatacttaatttccaaaaatcttgataaatattttggtattttcattgagagctgaagaaagacgtaaaccactgctactgctatggtgttcatgcaaaagacggttctaaaaaagactcttcaaggtggccttaaaaatttcatggaagaagtagaccccctctctccagagcatgcccagccgagcaatgcgagaggtggtaatacgtctaacgtgaacgattgagaggatgacttagacaaccagcgtgaccacgttggtgacaataggaatgctgagaaccatgaagaggaagaagacgaaaaagattgcgtcaaagatggatactacaaagacaactatcattatgatcaagaccccaaagtggcctgagtgtctaacgagctactcaaaaccaaaaaaagttagcccgtcaagagaagttttctcataaaatgaaaaaattaatgatggcttgtctttgagccaagtttggagatctagatgaggaagattttgacgatgaccctttagtggagcacgtcggaggaaacactaaggaaaatccggccaatgttggaatctctactcttgcacaggataaggggaaggcaaaagtgattgaacctaataacccacgtgctcctaaacctcctaaaaaaatacgaatcattccaaaaatattgtgtggtcgcaggatgtcatactaattaatatacatagtaattttaaacaaagagaatcactaatactacccaacattattgagatgtcatactattatcagggtctaccctaggtataggtgggctaggctcgcacctagggctcactcagttgagaggcccaaataaaaaaatatacatatttttttaataatttcaaaaatactatttatttttataataagggccaaatatttttttttgtctataacccatttcaactcagggtcggccctgactattattgttattagtttggttttatattaaattttacatagtatttaacttatagtttataaaagggattatttcacaaatacacaaaacacaacaaaaaaattataaaaatacggtttcacagaattttaaacatttttacgatttttttattttatttacagaaaatacgatctttttatgttgtgctcttgttaatttgttgttgatttttgttatttgtatgttatttttttgttgttgttttgatattactttcatgttacttttacatagttttttttgttgttttagtgttggttatatgaaaaaccgtaaaaattttaaaaaaaattctttaaatgtaaaattgtaatttttttacaaattaatagtgccgtaattatccctgggctattttcaaaaatatggaaaaaaattattaaggttatgataaatatgacataaaaagtaaatgtcactaatatgatattatctaaccaatcaaactaaaaatatgattttttttatttttaaaaaccataaaaatctaaatttaagattcgtaaaaaatagaaacttaattaaattaccataaacaatattaaaattcccttcatatttattttttttaagaaaataaaactatagtgatcgccggagttgtcactcgtgctggaaaaattaatggagtttgctgttggcactggaaaattcatcggagtatcttccggcgccgaaaaagtcgtcagaa

SEQ ID NO: 14773 - DNA, 6547 bp, Cannabis sativa
  modified_base (4240)..(4255): a, c, t, g, unknown or other
  modified_base (5511)..(5514): a, c, t, g, unknown or other
agagagagttaggatcaaattaatatttgagataatttattacaagtataccaacttagctagtgtaacttaatttggtttctttgttcacccatgcacttgtcaggtacgacgtctatgcacctgtccccatttgatatatataatttatatatatatatatatatatgtgtagtaaaagtaaggaaggcagggacagttggaagtaattaatcgtagaatttgtgggtggaaacttagcatttgtaccttcctttttctacccaccctattataaacgacactataaatttctatgaactcatatgcacaatttcattacaacattacattaaagcttacctctctctactatacttcatcactttaaccaaaacatatattagaatcatggggttctacttcccatacaatatcctaccttttcttactgtaagttcttgttatttttttcaaaaaaacaaatagtcttgttttattttctttctcatttcaattaatatatgtgtatgtatatatatatatacacacacacagttgttgtttgtagcaagccatgccgtgcaatctccagaactttattggaagtctgttctgccaaacacacctatgccaaaagctgttacaaatcttctacaatcaggttggtgctaccaaattgacaccccctctttaaagtttttttttattgaaaatatttcttgctgtatatattcatgaaaaaaatctacaattctcttttttaagaggggtttatcgatgcacccttatctatttcggtatgtggaaaaatattttaatatactttttttttatagtcgtctacgttgtagttatttaagacctctcctgcaaaattttgagaaatttaaaaacatttaacatgcggaaaataggaatcaagcagtttatttcacacgcgtataaaataaaagagtctcgtatgcatcaaactgtttgaatcctgttttagacgtgttaaatttttccgatatctcaaaattttataagatgtcttaaataactacaacgtagatgaccataaaaaaagtaaactaataaattctctcaaatataaaaatatatataagttggatccatcaagccttttaaggggtggtttataaaatcaccctatattcattatggtaattaataattacaggccagcaggcatcgatctttaattaagattttcaaatttgttatttaatgaactaattaattaaaaagggattaataaagtatttataatggggtgatgattttgtagatatattaagggaagagaagagtacctctgtgaataatgttggtgacaaaggaggtaccaacgttgatgttggtgttggtaacaaaggaggtaccaacgttggtgttggtgttggtgttggtaacaaaggaggtaccaacgttggtgttggtggtaaagaaggaggagtttctgtaaacacaacacataagggaaaacctgtttatgttggagtaggtgtgaaaggaaaagacccatttgtgtacaagtatgcagccaatgaaactcaacttcatgacaatcctagtgtagctctgtttttcttggacaaggacattcaacctgggactcaaatgaacttgaacttcgtcaagagtagtactagtatgagtagtacttcaactttcttgccccgtcaagtagctcaatcaatcccattctcatctaaaaaattgcctgaaattttgaacaaactttctgtgaaaccacactcagaggaggctgagatggtgaaacaaacaatcgaagagtgtgaagagccgagtatcaaaggtgaagacaagtattgtgcaacttcattagagtcaatgatagacttcaccacttccaagcttggtaataacaacaacgtacaagcaatttctacaaatgtagtacaggagaaagaatctgttgggatacaaaagtacacaataaaacaagtagaaaagaagagaaactcaaactccaaagtaaccgttgtgtgccacaagctaaactatcccttcgcagtcttctattgccacacttcacaagccactgaggcttatatggtgaccttacaaggtagtgatgatgggaacaaagttaaggcagtagctgcctgccataaagacacctcaggatggaacccaaaccacttggccttcaaagtccttaacgttaaacaaggaactgttccagtctgccatttccttcctcaggatcatattgtttggattcaaaactagaactctactatatatttatattttatatactccatacaattaatgcatcttttctttattatttagttggattggagtatagttttagttgcagcaggtttttatcgtgactgatcttaatttctcaaagataataagtatgcatgcatgcatgcatgcatccaccatatatgtgaataataatcctgtattagtgtgtatgaagtcttatatgtattcagttatgtactatatatataattaaataatgatatatagatcgtattgtggctccgttaagagacttcttgttgaaaggtctagagatttgtattttccctttatttacaaattatagaagaataaatttgagagcattgttatatggggcaccaagatagtactattatgagttatgaggtgaaatccttgactaacaaccttttataatctttatcaaaataaaataaatgagacttcatataatatttaattacactaataataatattataccttaagcaccatggataccctttaatatttctctaaatttgatgttattgacggtagccaacttgctcttttatattttaatattctttaatgaaacctttcggattaaaacttcaattaccaaaagcctccatacaaaatttaggtagaaacaagttgtttagcatcactacaagaaattagacttttgtgcgttggcaagagttgggtattaatttggaaaaatgaaatcttcttttgctagcgtataattttgctttggcaaaaggggtcagaaaatcagcgtcggtactgcaacttttgccaataaaaaatgaaaagtgttggtaaaagtgtacatgccggtaaaacttttaccagagctggaaaaattacttgtaccagtgcattaatgcgctgccaaaagtattttttgatagatggatatttgacttttaccaacacatttttactctggcaaaactcgcttgtagttgtcacataataaaattttcccactgcaataattcgtcggtaaaattttgtaattaatttgtttaattttagattttttattaattatttttaaattaaagtaaattaaaattaaaaaaaataaaacatgaaagcttaattattaataattacacaataaaatataattttaaattattctaagtatacatgcataatatagttataattgtcaaaaaattagtaaataaatatatgtttaaaatacgaacattagtataattttctcaattaaaataaagtaaatactactacaaattatcatcatcaatatcatcattgtcatgcccatcattattttccacctctgttattatagatgtcagttataaactgagactaagaagtttgggtggtatttagtgtcattttttttaaaaaaaattgtctcttaaactaacactaaaagcctattttgtagtagtaaatttaaattttgaatcataaaaaaactaatatagcttttacatcgacttttatattgtagttatgataaaaaaacatacttaatagatgagattaacgaagtgcattaatgactctcctacttacataagtttatgtcatgatatggattaaaatttattaactgtaagactaattatacttattgtcaaatttttaacgcgtatttacaaaatgtattgtgatataagacctttttttttttttaagaaattgtgatatataagactttgttatactaagagatgccttatatatatctatttaatgtataaaaaaatattttacaaatgatatttaaattgtaaatttatctatataatcaatataataggagagggaatctaaaaaaaatatttctcccacaacagtagattatctcacggtctattaaaaagccatcaagattgactaatgtgaagactcggtttgaccgagtagacaaaaagaaagaaaaagaaaagattttataaatatggtgggacccacattttatcatcagataatctctctctctctctctctnnnnnnnnnnnnnnnnctctctctctctctctttcccacttctctttttctctcttcgaagcttcaaagaagccataaccaccaccaccaccatcacttttcgacgaccactcttcgacgatcgtctgaccccacatgccagaccatttaaacccgcaggcaccgacgacctcaagccccaagcagtgttgtcctttttatcgctgttagcttgagatcgcaagttaaagtttggaggttcaaactttgaacataattttttgccacctccggtgtttgtttgacgagtcgtcttcaccactagactcagctcatcaaggagaacaacctacactaagccattttgcccagcctgctactttttccagtgatgtttttgtagctctagccctttccgatgattttctagcgatatcgtgtaccgtttcgacaaatagttggcatgtgtgtgatctactcgtcgaggtggtcattttgatacatactactcctattttcgaaaacatttctaacacactgatttttactgccaccgatagttaatgtgcaccgcttaggtgaatttttggaactttaaactttaaatatagtcatatatatgttgttggactcgattttgaatatagaataaaatgatgataattacttaaccatttaatggtatatgtcagagtgatatctaagactggactaaacaattggagctcgggattgagagcttagattatcttctcagcaatcactcttcggccaccgtctgaccccacacaccggatcattcaaattcttaggcactgatgacctcaacccctaagtagcgccacccattttgccgctgttagcctgagattacaagtcaaagtttagaggttcaaactttgaacagattttctggccacctccggtatctgtttgacgagtcattttcaccactagactcagcttgtcgaggagaacaacctacattaagccattttttccagcctgctacttttccagggacatttttgtagctccgcctttttctagcgactttctggcaatatcatgtatcgttttgacaaatggttaatatgggtgtgatctactcgtcgaggtggtcattttgataaatactatccctatttttagtgatatttcggtacactgatttctaccgtcaccaataattaatgtgcaatggttaggtgaggttttagaactccaaactttaaatacagtcatactatatgttgttggacccgattttgaatgtagaatgcaatgatgatnnnnatttagccatttgatggtatatgtaagagtgatatctaagattagactaaacaatcagaacttgggacttgagagcttaggatcgtcttttggacaaagtttaataatgacttgagagaggtaaggactcaacttgattattggacttgattttatatgtgttgaataacattagacatattctaatttttatgatttgcaaattatttgaaaaattgaaaactcaatctgcatatttttctggactattctgggacactgagtgccaactatatttttatacaaatatttatgcaggttatgatttttgagtttattcaaaatacagtcattatgctgccgaattttctataaaataaaaggattatgctcttttgttatccttattatttgcatgcttttggttatactgatgagagtcatgttgatcatgatttgtgcatactgttgtttcacgacctagtctttgtgtcatcataagtagatcaggtattcactcacctgtaggtgaaagacctagaatctgtacatggagtaaactgaatctgagccccggtattatggtggttatcagttgcgtctacctgattttggatgtcattttctatgattggtattgagagctaggggtctagtggacgatgtgatatgtatttgacgcttgattttgtgattatttgtgatctctccactttgtttaaatattttgataatggtgatgcgatattttattttaaaagctaaccatgcaggaatttttattaaactaagagtcctttaataatattagttatttttctactgggctttataagatcaccctcctatttttttcaattccaagaactcagtttgatgctagtggatgaggatggtactgttgaggaagaaaaatgttaatagttttgtcttattctacttatcaaactttccaatgaaactgattttgtttttaagcttgaatgaatggtttagatgacttaaattagctatgtactagttagaaatgaggaatgatgaatgctagatatta

SEQ ID NO: 14774 - DNA, 18762 bp, Cannabis sativa
  modified_base (2526)..(2529): a, c, t, g, unknown or other
aaaaaaaaaaaattaataataaacttaattaataacaataaattagaaaaatattaataaaaatttagaaaatatctagatgtggcatttaattgtgatttataaacaattgtcatcaagttctacatttttcaatatgttaatgagaataagtttttcagtagttgaagtgctatagttttacacaatcaaagagaggagaaagttgaatgacattttatgatctgatatcattcaaagatatatcatgcagttctagattatgcttaagaaagacaaatatcatttaggatgacaatttaaaccgtctccctaccaaaacatccatcacaaagttaaaaaaagcaatattttgaatagcaagagggaaagaaggataagtagtgtattaatgggaaaaaagtttcacatagacaatgtcaaacaagatagttagatgcaatcaatacaattatgtctcttgtctatcattttttgtgaaaaatgacatgaaatgaaaatatcttgtcatgatattgaatagttaatagcggagctttcggcaaatacaatccatatggtgtcaaagtcaaggtcatctgagctaagagcaatcttagtattttttgaactcaaagtaacagtgcatcagatttccaaaactcttgatcaaaaaacattaggcaggttgaaattgatttgacattcaaataataataataaaaaaaaagcagattgtaaaaatattataaaaaagcataccatttacatacctttcatggagtttcatattcattcaacctcatttgcacgtgaagaaaaaaaaaatcagttgctattttatgtctcattactagaatgttttgaggaccaatgtcaaaaagatatatgccatacatcaacatctccgtaaattttatgatgtacataccacaattagacttaaatttcaataattaagattcaaacaactacttttataataaataaaattgtaggaataaaataataagaaagtttacacgcaataggtacataattaaaacttacgtatttttttgataaggagttttcagccactcgtaattgaaatcagtgatgccagatttgtagttcttcctcttttcatgaaatcccaagtattccaaaataaaaggaattactctgcagtacactttaatacagttttccactctctcttcgtggggcttgttataggaatctaaaatatagatggttctttcttttatctatctctaagtatcctaaacactaaagatctagattttttttttactttctcccttgatgtgcatcggcatgtgaactaagtctacctcaatccacgacttcccataggacaatttcccttgaatgaaatttagtaaagatttcatttcagggaaagatctttcttttttttccacaacaaatcttccaaaccgcttcttaaataatcctcttttaggggaattgatttaatgtaataatcaaaaattacgtttgttgttgtacatttcttcaatgaagcactttcggtattgtacaaggccttccttcttaaataatgaaaggatacatcgatgtgctgccaaaattaatatagacaagtgaataactgctgcaaaataattaattgtaaaatataaagttttattattaataggcaaactctaatatagaccacattgggatataaaattaaacttcaagtaactaaaatccaacaatcttcataattcagggggtatttttaacgaccttaaaagttcaaggacatgatttggtatatgtcaaaattcaagagataaaaatcttaattagccatcaaattaatatttcaataatctaaacaaagatcatttttaatttggaattcttacctcttatttaatggtgattttgatttgagatttttgatagataagatgatggtcattttaaaaaaagaacaatggatgttatattttataaagcctatggagattgcagataaacatatcaaatcaagggaaaaaaagttagatgtaattgaaattcttaccttattttggatttgacgggagagatttgagtgattgaaactcacattgcgatgatttggggacgggccggagagctaaactccgacaacttcgtgatgcttgcaatggagctctgtttcatttttttctttttttggtacaggaaacgcgatgatttggggacgggtcgactgacacagctcgaaaaacgacagtaatgtctccggagctctgtttcgttttcttcggttcaggaagctaagagtaaaagcctaatgacgtgtttttgcaaaatataatctaattgtggttagtttttaatattaacatatttttgaaaataaagtagattaaaaataaaaaaaatacaaactacccaaaatttattcgaagtaattacataagacactatttttttttttaaaaaaatgacatttttatgtttactgactttttttttttttttttgcatttttacagtttcccataaaaataatttgaaaacaataagaaaactacatannnntaacatgaaaataatatctaaataacaccaaaacaacaacaaaaaataacatatatatataacaaaaatcaacagcaaattaacatgaatacaacaaaaaaaaaccgtattttctgtaaataaaattaaaaaattcgtaaaaatatttaaaattccgtaaaactgtatttttataatttttttgttatttttatgtatttataaaattatccctttattgtattaaagttaacaaaaaaactaaaaaaaaaaacaattctcgtaaaaaacgtacttaaattttattttcgattttttgcttgaactttatttttttagttgtaattgtgttgttgttcaaaatggtttttatttctctttttcgaaataatatgagaaacccaagaaaaaactgtgggaagagaagggtaccgccattgacactgacagagtcgcgcacagcagagctcgaattcgtaaaggaaaaatataaagaacacagaacttaaaccctttgtctcctcttcaacatgggtatcaaaattgaggggaaaatagagaaggtgaatgggttagaactcagttacgatgacttcgtaaagagatacatggagaaaaatcagcctgtggtgctcacaggtctcaccgaccaatggagagcttgcactgattgggtcacttccaatggcaaacccaatctccaattcttcgctactcatttccccaaatcaacagttcaggtatgaactgacttttctttctttattcactatttttattttactactgtgaaggaattaagttttggtggcactgttttgaatatatatatatatatatatttttttttttctctcttagtttattttatatatcaattcatttgctaaatatttcatttttctcttcttttttatgtgtagtgaaattcggttcttgggttccttagaatgtttatcctggtttttactaatgaataaattactattgtattaagaagatatttaatttatggttggagtttgaatatttttacatttgagctgtgttgcatagtattgtcactgctcacacacttataggttgctgattgtggtaccagagaattcacagatcagaagagagtgcaaatgtctgtttcaaagtttgttgaccagtgggttcaagggtcagtacaggaggaggatagtaatgcttcaactaaggatgtaagagacaagcccttgctgtatttgaaggactggcatcttgtaaaggtatataaggctttttttttgttgcttttcagcccatggtttgctgctcccatgagctgggttcaattatttatgggaggaacctatctaggaattttttagttttttctgtcttctaaagattttaggctatgtctgcaagttaaattttggcgaggaaagaaaaaggtatggaaaatgtaggaaaagaaaagtgtggagaataaaaaaaaatcaattttttatatttggtatgaaattttttgttgaattaagtttttttccataccaaacataagagttattattattattatttatttattttttcttgctttatcaataagaattaaaaacctcaactttaatgcacgtttttatcacagaattgaaacctgttataattacatgaatcgttgtttgtgatttgagttttatgtgtatgcttcatgatcctatttttccttggaatatgaaatcaaagaagaaatagcacatagtaaacgtaagccacttgaggctagttcaagtggttgggtgtgtgtgtgtgtgtgttagagggtgaggggttatagtactcattgtatcaagaaaaatgtccacttaaagagtgaatttcttgcctagtttagtttttcaagtttccagctctcttattattttcaatttgatcctaggagtacccagaatatacagcatacacaactcccctgttcttttgtgatgattggctgaacttgtatctcgataactaccgtatgcataaggattctgatgtttactcagatagtaacgaaatatgctgctctgactatcgttttgtttacatgggagagaaaggtacaagcacagctttgatctttacctctatttccttttagttatgacatttttctgcaaaacacttaacatttgatctcaactgaaattatctgcccttctgttcggtttaatattcaatccacaaggaagtacctgaatttaattgttatgtaggatcttggacgcctcttcatgctgatgtttttaggtcgtatagttggtcagcaaatgtgtgtgggaagaaacgttggctcttcctgtctccttctcaaagtcatcttgtattcgacaggtatgaatgcaatttcttgcatttaaagcaatcagagagatccatgctgataattatgatgctataatccatgataaatgaaacagttttggggttttgttgtgggtgggggagctatgctatatagtggttcatgccaatggattactagcttttactgcaacctcttacaagttttgctacttttaagaataagttaattgttatttgttgtcaactgtcaagtttatttactattaactgcggccaatgttggttctcttgaagaataagtggttggtttaactttctcagtttttttcttcagggtgctagagtaggtgtagtgatgtttgttttgttttgttttgtttttggtttgctattgtaacttctttctatcatcatcagaaacatgaaaagcagtgtgtataatatctttgatgaagttagtgaaacaaaatttcctggttttaagaaggtaaatcaacagcctggagtttctttaagtttattctgatttatttactagtttttgcatttgctcatctatttctatattctaatattcttcttacgtataggctatttggctggaatgtatacaagaaccaaatgaaattatatttgtgcctagtggatggtatcatcaagttcataatctggtaccttctgttcattttattttttgtacaacttttaaaagagttcacttcattcttattagttttctttttcctattcaaaacttcaaaaacctatacatgaatgaaaaagaatctccaaatatgttaacctattttttttaaaaaaattatatacaaacagaataagaatattgaactttcctcatggagatgtctgtgttcagcccaagattaaaaaccttaaggtctgacgctacctgaagaaatgaaacaggggaaaaagaagagagagaacaaagatagtttgaagaaaagtttaggctaaaagctgcctttctttattgaataatccagtatttatacactcaaaatgaatacaaagggatacaatttgttacaaaacaaactcaagaaactaaacttaacctcaactaacaccaactaactctaatgactcaattgtttgttaattggttatcatccccctcgagcgaaaaggggaagaaacaactttgagtttgtctcacaaataatgaaatcaatcttttggtagaggcttagtgaggatgtccgcaacttggtctacaaaggaaacatatcgaattgaaacttcgttattgaggacttgatcacgaacaaaatgttgatcgatttaaagtgcttgcatcaagcgtgcaacactggattagctgctaaagcagtagcccgttggttgtcaacccaaatgatgggaacatcagacaaaacaacctgcaattcagtgaagaaagaatgtaactacttaagctcaacaactatgtttgccaaggcatgaaatttagactctattgaagatcgagcaaccatttgttgcttcttggctgactaagagataagattggaaccaagaaatacagcatatccaccaatagacatgcgatcattagggaaatttgcccagttagcatcagaataagcttcaatggacaatcgagaagctggagagatgaataaaccatctgacagagcgccttttaagtatcgaagctattgtttacaagcttccccatggacattggttggagcatggatgaattgagagagcttattaataataagggctatatcaggtctagttagagtcaaatattgaagtgaagggctcccagagtgcattgatattaagttttgtcttcaaaaggtgtattaagtaagagcaaactttagcaccttccaaatgaactttgacaagtaaatatgtgatgtatttattttgtgacaaatacatgcctttggaatctctatgaatttccagtccaagaaaatagtgaactaatcccatgtttttgagtgaaaaggtagcattgagattaccaatgagcttctgtataagagttggattaggacctgtaactaaaatatcatctacataaacaagtagaatgatttgagtagaacccgatccatttacaaaaagagaggtgtaagctttagaagctttgaatccccaactgaacaatgttgttttgagcttgtcattccaagctcgaggttcttgcttcaacccataaatagctttgttcaatttgcagacatagttagggtgttgaggttcttcaaaaccttttggttgagtcatataaacaatcttatgaaggtcaccattgagaaagacattagagacatctaattgccttacttcccagttgaaagatactgctaaagtgaggactaatctggctataactggtttaacaactggactgaaagtgtcctcaaagtctatactaggttgttgaagatatcctttagcaaccaatttggatttgcacttgtcaagagttctatcaacatttaacttgactttaaacacccatttattgtcaattgaaaccatgtaggcctcataaggtccaagtgccttgtgctttaagagcataaaactcttttgacatagaaccattccacactggatctttgagagcagccttcacaaattcgggttcacgaggcatcaatgtttcaggtaatctgtgttttgtggccagataagccttaggcttgtaaatgcctctctgaaatctagtgattgtagagtgagttctagggatttgaggagcagtagtagaacttggttgtatcactggctcagcagtagtggaagagctatctcaattgcttctacagtattggaagatgcatctgcaattgtttctgcaggaagtggcaaggggaagcctgttgcaaagagatctgaagtggcaatagctggatccaagtgagcaactggttcaacttgtgcagctggggcatctgcagcagaagatgcaactctcatctgtagcaactagtgtattgtgagcggattcatctgcaataggaaacatgccaggagctatttgtggggaaccagatggctcagtgacagggtcagatgaagcatgcttagagccagtaaaaaaaacttgttgtaggacaagaagagatttcaaatattacttgagaagtggaagcaaaaacctttgaggcaaggaatgacagctcatcaaaaacagcattcctagctataaagattcttctatttgcattttcacacaaataacctttgtgctttggagaatatccaagaaataaacactcttcacatctgtatacaagtttgtgatgatgatagggcctcaaatgtggatagcaagcacaaccaaaaggtttgagaatattgtactcaggaatttcacgaaacagacactcaaaagggctaaggttgccaagcacaggtgttggcattcgattaatagagtgagtggtacactaaaaagcaaaccaccaataagaaagatcaagaccagattgagctaagagagttaaaccagtttcagtaatgtgtctatgctttcgttcaactcttccattttgttcatgagtattagggcaaggttgtttaaacaagatgccttgattagctaaatctttttcaaatggcctatactcccctcccccatcagcttgaacaacttttatagataagttaaactggttttttgcaagacttttgaacttgataaaagtttcaaaggcttgagattttaaagtaagaggaaaaatctaggaaaaccaactgtgatcatccacaaagactatgcagtatttgtagttttctttataaggaatgtgggagggaccccatacgtcagtatgcaccaaggcaaggggttggttagctcgagattgagacaagggaaatggcagcctatgatcttacctcattgacaagctttgcaaaatttcagatttttaagagaatgtggtatatttgctttagttaagattttgctgagaatgttaagtgcaggatgatcaagtttggtatgccaaacattaatgtcattaacagaatttgaaagatagacaacaggattagagatattagaataagcaaaaaagatatttttattactattttgtttggtacaagtagaagctgaatgatcagtttgagtgcaacactcattacaagactgagaatgacaaaaaataggcttggattgaaaatctgaagttgcaagatgcacctacaaggctgtattggaaagactcgagctatcatctcctcaaaggtagaggccatccttaattttccctttgagtaagactgccctcgttttcttgtctctaacaaaacaacatgttttatgaaatttcaagaaaacatcattgtcattaataagcttagacacactgactaagtttttagtgattgagggaacttgtaaaacaaaatttagatttaaagaataggaattggaggaaagagtggctgtaccaattttagaaataaccagtttcttaccattagcaacaacaatagtttcatggccatagtaaggagtagcggacttaagattgtcaattgaatgtgctatataattggttgcccctatatctacatatcagccaatatcatcactaaaatttggcacaatttgagccacaaaagcctgaggatcataatcaagagattgctcagtaagattagcttgaggctgagttgtggaagcctttggagtgacctaatttttgtcaaatttgtaatgacaagttgcagcagtatgcccaaatctcatgcaaacttgaaaaagaggtttgttgttattgccaggtcgaaaaccatttccacgatttggaaatcttgatacattttctgatccatttcctcttcctgaaccattaaaaggtctatatggtctatttcttgatctcatggtaagattagttgccatttttgttaaaagatccaagacagtagagtgtctttcctatcttgattcatgagacatcaaaagagagcctgaagttcaagtgagagagtttcacttcgagaagtaatgctagacacaacaaaatcaaactcgggaccaagtccattaagtagatgcaaaaacaagtcaaaatcatttacaggatgtccaattatagccaaggaatcacacatagatttgatcttgtcgacttaatcagaaatatacaaattacctttctgaagatttgtcaactggcctttaagctgaagaagtcttgctttcgattgacttgcaaacttctgttcctaggctttccaaacagaattcgacgtggaatagaaggcaaccgtggccaagattccttcagtcattgaagatcgaagccaggacaaaagtaactgatctttgcaacgccatttcaagactatggggttgtcatggccaatgatgagcttcgaaggaggagcaatattactaaagagtaattcatcaagattatgacctatgacaataggtatgacctgagattttcaagagagaaagtttgtgcgatcgagttttaaagtgagtgaagccgtgagtgaatttgaaaaaggattccatgattgtaccatcgaggaggactgagctggcacaacagtaagatcggtggctccagcttgagacgactggtcaccggaggaagccattgatgttagtcaataggctctgttaccatgaagaagtgaaataggggaagaagaagagagagaacagagagtgattgaagaaaagttttcctttctttattgaataatccagtatttatactctcaaaatgaatacaaagggatacaatttgttacaaaaacaaactcaataagctaaacttaacctcaactaacaccaactaactctatctgactcaattgtttgtttgttggttatcactacccaaggatacatgcacatctcatatgtgtgccaagaccgacgagtccactgggctaactcatttctggcctactaagttaatgaattgagtccatcagttttgttttcatagttttggtcaatcactttccataactaatttgttaagaatagtaatagaaaaatttactaaaaaaaatctattcataatgatattattttaatttgtataactacctacaaactgcctaaataaatttatacataaccattgctgcaactctcacaaattatatacatataacacaaacatgtaaatgtgctcaatatgcagccccagcccatttgacatctctgtctcctcattttctttctcagggaagtcaaaaccctttgttttatttttgtttcagtatgaactctagatttgtgggagcacaatatgttatctgatatgcaatttcaatgctttcaggaagataccatttccataaaccacaactggttcaatggctataacctttgttgggtggtgagtcaacaggactgccgaatacttgtttgcttggtttagaaaattagcattgtgtttataatttattaagcaaaatgttctgccactaacatctatccctatgtattttattacttatagtgggatctacttttaaaggactacaatgaggcaaaggaatacatagaagacatcaaggatatatgtgatgactttgaaggtctctgccagcgtaatcttgcggccaacacaggtaaactgcaagtttcttgtgacccttaaaataggaattgtatgctagatgaactcattgaaacataagatataaaggtagaatattcagtgagagagcttagctctcacataataaaactatctgttcaaattgtcttgtaattttttttttaaagagagttgctttataatacgactggataaactgcatagtcaacataacaacgtgtttataacggcaactaagaaaaagaagattagtggtggatttcactaaaatgacttgtttggcaacaataaaaattcgactctggataatgctataaagtgaattgtgatgaacatttctcttttatattgactgccaatcatttgcattgcaccattagttactctgtcaacttgatttgatccttaaatgatattcattggttgctctgacttttggcaggcatgaacttctatgatttccttattttcttggcacgcttatgctttgccaatttggtccaaatttgccatctacgtggagatggtgaacgttcggtctgtaatatgtcccctgtggctcagcagttgacttctaaccttgtatctatacaaaagattgcactgaaggtgaattctttagaagggctgacaaaaactcataagtcccatttcaattctaccgaaactcttagtaaccctgaattcattaaactttgtatggttttagaaaaaacatatggggtgatatacagtcaacaaactagtgattatcattcaaagaggtctctggttgatgatataagagatttggatatcattaaaggccacacttttgaggtctctactcctgaagatcttgctaaacttatagaccattttattagaattctttaaggtcatctcagcaaggcaattactctgctttctaaactagttgaacttagctgtttcatgattaaatgtttgacttgaagatatcatgtgcaaagtgtttaaatccacaagaaacaacaaatatgaggcttatgtatacatgtttggatatatttagtgtttgtaatttgttctcccagcaattctaatctaatgtatcattgcagttcactgaagttagctttcttttcacctttttctttatacttgctacttttttttttctatattgactggttattaatcatatggtgattttagccagttgagcagctgaccctacttaatagtttattttggaatctcgcaacatatttaggcgacattagtgattgaaaacataaagcaatagtaaaaaaaaatcaggtttttaaaattgttttgagatgttcttgtcataacataacatgtctcagaatccatatgggccatttttatgtcacgtctttaaagagttaaaaaaaagaccaatatttttttgtccaaaccttgaatcaaggcaaacaaatttacaaaaaatgaccagctttttattagagtaagtaacaactctttctttctccctccaattttaaagcatttgtgttgcttttccttttcttgtttagacccactaagtgctggcttcttattcccttgtgcctgtcatcttttgctcaatattatcactgtatgaactgttatgcaataagggttttctttgcaagaattttttaactcaaaatttcacaaaaaagaaagattctttttgggatatatctattactaaaaaaatatttatgaactaagattgacttgctaaataaccatacaagtagctaaagagccaagaacctaacccttttatatttaatgtagaaaaaaaatgttttaaaattttaagaacattgaagcactagtactaaaagaagtccactttgaagagcacaaacttacatgggaaaggctgcaagtctgtaagtgaattaaatgaacatgtctttgactgttattaaaaagtatttcttatggttactgagattcttattgcacttaattctagttttagaaattttgaaacaaatattttacttattagtaaatggtattgtttggaaggttcattggttaggcctgctggtgttttaaaaaacaataatttaccttctttgttgtgcccacatgctaggccttaaagtatggtattttaccaataaagtataaaactttgcattcttctttactttaaaaataataaaaaaagaaattggactttaatgacaataatacccatgtagggttactggtttagtgagcaagttcaaatcttcttctaaggcccacctttattattttctttttctttttcctgtaaattattatttttatcttggaaggaattataaagcaaagaaaaagtcccaacactatatttatataacacaaaccagtactattaacactttggtgtatgttccccaaatttacaaagccagaggtacccctccaaaaaacaaaaggaatacattataatgggaaatatatcaaaatcacccaaaccatgtcaaaacctaacaacaaaaactaaaacccagatttttttttcttattttttgttaaaataataaccaaaaacaaaacaaaacaaaacaaaaaagacactgattttctatatcttaatttctaatggcatttttttttgcttatttaaggacaccttacatttctcccaggacctccatagtaaaaataagtaccccatacattattttttccttgtcttatgtcataacaattagaatgatcagccaagaggtgaagatttgacaagggtaacaaattattgtcccaatccacaatttgtaagtttctaaaataagatgctctcccaaaaccttctccagcaaaatgaccacttcccatttgtgtggatgtgtgaaaaccagaagatctactatttacaatttcacctccaaattgtaacatgcttgcatggcttctaagatggctgaataagaaagctggccaatatccaaccaataaaccagacccaaactccaaccaccaatgcccatgctttggatcctgattattcatcattataattttaattattcaacaaagatgaaaaaaattataatcttaaaaagtgttgttcttttctctttttaagatcaatagtttgtcaaagattgaagacataattattacaaacatgataattttgcttctcatgggtagccctcattgtctttattatctattacttgtactaactacttaaattttgcaacagagaatttaaagaggatttttttttttggaatattattattaactgaggatgaaatgaattttctttgttttaactttttgagagaataaagtaaggcatcaaatgatcaagtaaatgatataataataaaaaataaataaagatactactaatggttttgttatagatctaaaaccataaatattatgactagttaagattttatattaattttagttgttgatatgacctatatttatgtagtttattaatgaattttagtagtgttattattggtaaactactaaccttccaaaccattaaaccaatatcaaattgcctccctttgtaagatgacctaggagaaatagctgctccaatagctatcttgttatttgtttggacaaaaccagagcatagtaaattataacatccagtagcttgatatgcatctgtctgtaaaatcatgcattgaacaaatttaccatccatttaaattgagcataattgaattttaccaaaaattaattaaataaatatacaaaaactcactgtccaatatgtaaagaatctaggatagttgtcaccatatagctctgggctaacctgaaaaaataaatgaagggaaagatgtcaatggtcaccactatagaaaagtagtctctaacagctgttccacattgctaaaatcatctttcctttttatatatatagttatattaatatctatatatatatatatatatatgctgagtgatctatttgcatgaatgaatgaaaagtaaagtttgtatttttatttttttgggtgttgaaaaaacatgcctgccagccagcttcaattgtgtttaaatcattgccaaatgagcctgagatgacccataattgtgataagctgaattcatattgatcagtgactcttggtgcccaaacattaagattggcctttgctccataatattgttctccatttacaaatacaactgcatgctgttacaaatcataataataatataaaatttaaatttgaattaatttcatgacaaaggaaagaaaataaagggtatagttaatttttattaaagattttgttttgacaattaattgatgttcttttattacctgttttttcttcttgtattcatattcaactataaaaatgagattaactgaactttttttaagttagtcttttcggtggagaaaaaggaaaagaaattatgaattctttttttttaatagtggactaaaatagtaaaagaaagaagaaactacagtaaactttattaaagaaaataaattattaagctaaattatactaaaaatagcaattacctcatgaccactaccagttgagtctctcctaacatgtcttcttggttttctaccatatcttctaatggaacttgctcttaatatatctttatcagtggttcttctaattggaatagttccttcagggcatgattcacctgagtcagtccactgttgataactctcttgaattgttttgttttcatggcctttaggcctctctggtggatcctgcatataagaattaccatatatatatataaccaaagaaaagagtactaaaatttgattataattatgaatgaggaaaacattaccaatggcttctggcctttaagcagaggatgatcaaaagctggttgaagatgagcaagcacacaatctatgacatcaccatctgagctctgtagtactcaaaaccccaaaacaaaaaacaccccagatcatttaaagctcaaaaaacagaaaagaaaaaagctttttttcatatagtaaagaagaaaatgcctgaattgtcttgacagcaggcttgttgagtttcttcaaataagcattgacccttttgagcttatgtaactcttgatcaggccggagtgtttggttggccggaaaatgattatgggggtgagaaaatgcagggaaagaaaggaaagaaacaaagaggaaaagaacaagaagcatgggaactaatgagaaaggttggtagtagtaggagttagtagtagtagtagtaatcttagtaatagtagaataagctagtttagatgaataatgttttggcttaattgtttgttttggttcagaagaaacaacaacttgtgtttgtcttgttctgctctgaatttcacagcagcaatatggtttcatcaacttcagctttagcttcctcttcttaataatattattattatgaatattcttcttcttcttctttttcttatcattccattgttttgtcctcctcttcataatctcattctccattgaactgaatcttcctcactcttcatgtccttacaaaacaaaacaacaaaaaaaatataatatataatttcacttaaatcctcaccatttccaacatataaacaaaacaatctctctctcactctctcactatatattttggtgtgtgagattctagcttgtttgttttttgttctgacaggtagaaatttcagggcagaagcatatttaaattggaccttgataggtggggtatgtttaatgtactcaagtttttactcatatggaattgtggtcaaaacacttttttcttttttcttttttctttttcttcaagtttaaattataaaaataatcaaaagaaaatctagagagagagaaagtgaaagactaggcgtatttcaggtttaagatatcagtacagagacctaacaatggccaacggtactgattcttttcattctttctctctttttcaagaggaattttactacaactttctatattcttgaggtttttgtcattttcctcattttttttttttaatttgggctaaaatggacggcttcaaatttacattggtattattattaatattattattattatataactacgtacaattaagtgcatgaaaaatttcatattctatattacatttacacctaatattattatgttatcccaaatccaattcccaccaacaaattttttaataaagttattctcaaatctcatggtagaagaagaagtagccttgtagtagtcactattaggccactttcatgtttttattatttatttattgattttcagcatcatcataaaatattgaaatcattttttttttcaaggataattaatgccattttcaatatatacatttgtgtgtgtgtgtgttcttcgatatataattgtggacgcgtttgtggtgacatgttactatctcaaagtctcattctcctttaataatatacacaatttctaaaagaaaaactacacattaatacacacataataataatgataactttttctcttttattttcatcataaattattattagatattattaattaccattgtcaagtctgaattgcgtttgtagtagtgggtctagctagcttgaatctcattgagacttattacaatgaaaatctttaaatcaaatgtttttatgtataaaaaaataaaatttattaggtatgtaataaaattcttggtttagtagtaaattttttttttacgttaatttaacagaatatctcaattattattttataatattattataatatttaaaaataaaaattatatataaatattttatataaaaaaaattattttttgagtggaaaaaattaattttattatatatatttaaaaattaaaattatatctatttataaaatatatatacttaaactttaatttcacaataacttaaaatgattaatagtatatatatatgtttttaataatttgtacactttattataaacacactttcctacccacaaattaaaaatgcatctatctcattcattattttttaaaaaaatatatgtttggacataatatataaaatgtattttaaaagtaaactcaaattttgtcaaaatattttctaatataatctttatatatagaaaaatcaatataaaatacgtataacaatgaaatccattcttttattgtacatataaaatacataaatataatcacatctaaagagcacaccactgtagtcgcaatagccaaaaaaaattctcaaagatcgaaatctcaatcttatttaaaaaattaaaaataaaaatatattacctaattaaaattaattgaacatacatgtattgtacttaacatcatttaattaaatctaa

SEQ ID NO: 14775 - DNA, 6067 bp, Cannabis sativa
  modified_base (52)..(55): a, c, t, g, unknown or other
tatataataatataattccttaattatacataattatctagttagggttttnnnnatccatttcttaattccgggtattacactatcaaagtcatctctaaaacaaaatttgctaatgtatgtgccaacatatttccttcccgaaaaataaatggacaagaaccaacattgcataaagaaagatagtgttgaacatcacatcttcaatcaaactaccacccttccaataacattggaataatcattttccaaacacttaaatctaatattgcactggaaacacaacttcagattctccaaacaagcaaggatctcagttgcgtaaggagaaagacacctaggtacaaacttagcgaacacacgtaccactgtaccatcaacatcttgaactgttaaccattaggttagttatctagttagttataattagttaattagttgtgatggccagtgttatcaagatttttagaaactaattaaatgaaagctttaggaagtaaataactattaagtaaatgggacaaagaattttacgtggttcagacattgggtaatcctagtccacgagtcagtatattggccttatatgtgtttaaatgtattacaagtagtgtttacagtgaaaccctaactctagttttttaggtttctcttgaagaagatgaaagtttagagagtattttagcagagcttcggctatgtaattttttgatcccctctttttgaaaaaatagagggacttatataggctaaagtgcgagtatgggcatgcccatgacccgcctaggattttttgtaaaaagtccacccactattagagtaaaatacataaaagtattgactattgggcccccaagaagactctttcttgtgggtcaaaggttccatacaactgggatcattgttggtgcaggacgcatgtcaggcagaagttgcacttggtagacaagacactcagagtagccgtcagacaaaaaggagtattcaaaggaggtgcgcgcactaccatgatctgacacaagggacaagatctgatcttgtatcaaaaaagtataaccgtcacaagagtcatccaactttagcttcgtgataggcctctaattttccatgtgtagttggaagtcgtcttagactctttgcatggctcattggtgtcttcttgtaaacccaattgatttggtcttctccaggtcccggaggaatgacaaggcttccaggtccccgatggtgatttaccttcgggtaaatctctgagctttccatagatttggacctctcccaggttgatatactcttctcacgactttctgtaattaaggagactttattaattagtagttaattggatagtatccttccaccttttgtcacatgtccttcatctggaaacatggataacatttaccgccaagcttctggcactcttcagtggtggaagcttgtagtctccttccggattatcaaagtacacttgggacacgtggatgaatctcaagaatgcaaaagcatctccttcatctggcacttggtagttgagatatcaaaaaattttatgggaaacaaatggcagtgcacatgtgtcgcgtatcttttggatctatgaataccacacgcctgaaggtagaacatttatcgcataaaaacaaaatggcggcagggttatgatgtggcgactctttaatgcgcagggggcctgaggcaaataatgatgacagtttaatacctttgattctgccaaggagcattaaatgtagtcctctcaactccccaaccattggatcactttgtgctttttagctgagttgatccaggcctttgatttcaaatcacgtggaataacttatccactaataataggtatgaaacccacatcgttttcccttttaccatctctaagctttctaaatccctttgccttcaaatttgaacaagagctttctttcttagaatctaaggacagaagaacttcgaacctaaccttccttctcaccggaggatgtacgagtgtctcgataccctcataaatcaccttctgcaagttcgagcaagaaacttctgtttgccatcttttgagcaagctgaaactttgtagttagaagttatgaagatgatgcactaccatagaaaagggttaccttcagtatggtgtgaaagcatcctatttcgagatcaaactgaaaaagaagaaaaataaaaagcatgccaaggacaatgatcctaattttcactgcacatactaatgtctgataagtgtgtataaatttgtaagtctcctcttttcaaataaaaaaaatcctgattcagataaaatgtcatgtaactttgtttattttttcacaacatttggtaagtatagtttgtatttgagacactaatcttttatcatctttgaaagcataacatggatatttgtattttttatgaaacatggaaagatacatgctttagaataacttgatttttgtatagaatattttagtttatttgtctcttttttatttctttaaaaagttaataaaaaaagggagtcatgtgactggacttatgggcgaaagtctttcttttggtaagtgttgatttgtgctttgtttgataaattttttatgagtttcctattataaattatttcttattaattatgttttgagagatattttaccttgattctttccatttcaacacctatttcaaatattgtgagatatcttaattacttgctcatttttttttttattattttcatgtcttctttaataaaaaaaatcaaaaaatttaaaaaggaaagtgttttttttttctttctatgaaggatggattcttgtaaggttagttaacactttgagtttttagcccttgagataaacaaaaagagagagtagtaagttttaatttttagtttgtatgttcaaactatagactctttttccagggggacttgagtttggtttatgtgttaaacttttgttagatttagcattgtattttgtgttaatggtggtgccattcagggggattgagtttgctaactttgttttgtaggcatttaaaaattaacgaatattttgattatctaaagtgccaaagggggagattgttaagtccttttttggcaatttagttgtcaaaatattgtttaatttatttgtgaattaaatagtattttattgtgctaatttcgtggctatggttgtctttctttcttttaggaaactttttttatagctaatctttttcttttaggaaacttctcatataagagaaggaattctctttatggaaagttttctaaatttggaagaattgactttctcttttgctagttgttaatttcagttttgctatgtgtatagcagatcatataatctttatatgataggaattaaagtctaaatcatgatcttgaacttatttggaaagtttccctgtttgacactgatttgccattgcatagtgcgattttgctgctgcaaatcaaggcattttttagaaaagttttgtaaagttgtgtaaacgtgtttgtggctatctttatggtttctattttctataaataagacctagagaacagtcaaacgtttctctccacttctagtttcattttcatattttcatctttgtgaggagagagtttcttttgtgaaaacctagagtgttcagctaggttttagtctttgtttattgttcttctaccgttcttagaataggttgaagaacttcattgaataagagaaggatctttgagagaaaacttgtgaaagcgttacttcaggaggaagtaagcactcacaatcaattgcatttagaaatcaaattggcaaagtaaatcacaaaagagtgtggcaaggctttagagggaatctaaacttatttaattcaattgcattttgtgattgtttgagactttactaattgatttcattctctgagcgttaccttgtgaattaggagtgtttgaagaacactaataccacgtataattatcttgtgtcaagtttttatattctgcactattatttttattttgttactgcaaattagtgttctgcagtaacaagtttccaatctattactacaaatctcattttttttcacttttattaaagaaacttcttggcaaatgcaaaaataaaattttttagttgtcctccccaaaacctaacttttctcttgggttaccaatggctgaaagggagagagaagagattgattgagtttgttagtcactgatggctaaaagggagaaagaagataccgattgaatttgtttaagggtttagaaagtaaagaaaaagaaaagtatatttttttaatattttattacaattttttaattattcttaatatttttaaatgattttaaatagtttaatcatattgaataattaaaattacatggactaataaaaaccttctacatgaaggtcaaattgtgatgattgtattgtagttgaccgtaccacgctagagaaaatgatattaacagagtccatttaacagaaccttaaaatttaaaatagaatttacaccccaatatcattgctttggataatttagcatattaaatagcaaaattttgatagttttacaaaaattacccattattaattaatttttatgttaatttaacgtgatttttataaaaaaaacacgggagatgcattatcactttaaagtaaacaaatgaatttataatgatacataacaaaacgcatttaaattataaaaatattattgggacactttcaaattatattcaatttttttacgtataatgatgtgtaattaatctcaatcatacaattaaaagtgatgcggtccttacttaatcataaaaatagttaatatttatacaaattatcatgtgtaatatatagtgtgtacaatttaagtgggtaactactattacacaaattattaaccaacaaattagaaagtagattaagctaccaaaacaattaattatttgacaaatagaaaactagatatggaaaatatttgatggctacaacaaaattaatcacgtactcattaatgacattagaaaccacctcatcgatataggtttgaactacattaattttaactactttttcttcactgtctaactaacaaatgtccacttgattttgaccttaattaattaataagacgaacaccgctacgttatataaaattataaatttacatacatatcaacacagccagctactagcctactgcacaatccaaataaaaaatattgaaaagtgcttagacttatttggatgttgtaagacttaattaatatccaagaatatcctaacgaacaaaatgacaagtttgttgacctatatatagccatattacctcatgcagaaacgtacaatattatttatgaagtctgaaaccgaatgcaacatacggcagagttcaattgtgttcatgatttgagtttgattgtatgtagtatagtagtacgtagtacgtagtctatgacaaaactcatatttattgaggtatatatacacttaataatttggttcggttcgtaataagttatatatataaaccacgattgttcagagcacatatagtttactactttttataatctgaatttgtttcattaaaaatattaagcaattaataatggtaatttgtattgtggttggaagctttcatacatttgtattgtaagttacatgattgtgtgtataatgtatatatatatccacatagtactatagtaattgactgtgattgtttgttgttagatatagtaatcctccacacttatgttaattaaacatgcatatatagcctaacatcatcgatcaggcctgtatattattttttaggtatttttaattgttatttttcttattaaaattataataccacatattcataaatcaacaataaaatatattataaataaatataaaaatttgatgagctaaaattctctctaactgtacgtccgctagtatttatcttttttttttattctcttattattaatgtatatgaatatactagatagatgttacgtgtcaagtcacgtatattaattttatttgaattttca

SEQ ID NO: 14776 - DNA, 11361 bp, Cannabis sativa
gcgtttttcaatattaatagccttatcattttcatatgatgttatacatttaatctatgcatgaaaaggttttgaaaaccatcaaaatttggaattttttttttttttgaagaactcatgttcattaactaggaaagatagttgggaatcacagggggaattccctccccttatgaaccagcagaaagactatcggttctaacctttttcgcaagaccatcagcaaaacagtatgcttaatacaagaaaacttacaaacttaaaatgtttaattaaatctaaaatagaaagggaaaagttaagtatcttccagtctgaaggacatttgtttttttgccaaagcttgtaccacaatttgagagtctgaaagcacatgaatttccttccatccctgctccattccccaagaaagagctacctgaattgctcttaactatgcttccacgataaaactggctaccacctgattggaattaaaggcccaagagccatcttgattgtttatcattactgttgcgatcccagcagagtcattagcccaagatgtatcaatgcatatcacctttgctatttctgacattgagtgcttctcctcagttgacagcttcttaagaacctcactagagccaaatcgcttgtcaatgttctctaaggtacgcatctcaaaaaactctttgaaggcggatctgactttcgcaacagcgtaagaaatatttggaggactcccattaaagcaaataatatttttttgagaccaaatctcgttaaaaatgcaacatgtaaaaatgagaaactcaaacctcaagcagcccgagaggttagaaagcaggttttctaggaattgaatcaaatcaactcccgaaatcttatcaactaaaattggataagggccagaaaactataatgcttttgcgaatccacaatctcaaaaaagatgtagaatattttcgacaaaagaagcatataactcttttttcagccaagaaagagagtctactctttgtaggaagagccctactaagacttatccaaatatttattacaagtataggatggatattagaattccaaatcaatttccaaatgtttctcgtaggagcaaaataagtagactggtccacacaattgaagatgcaggtaaggagaaggagatcaaaggcttagaggaccaagttctcactttttcaaatgagttgaaggatgaaaaggaaaaagttgcggcgttggatgtggagaagaagaaatcatacgaccaagcgatcaatgattatacctacaccatcctaaccagcattcttaactttgactttgcagtttttggtccagaaacagtcaagatggcaaatgcctttcgcactatgtctccaacaaaaatccaaggcgtgagaactccttttcttgaaaatactgcttatgagatcacataaaatcttgagaagatcgcggataatgttgatgctcctaacacttaaataattttttttatttattttttattagaggtacataggtactcgcaatttgtacttaattcaagagacaaagttgcctcgtgcctttaatcgcacatcttgaacttcatgtccctttgaggacctttatttattgaaaatattttctaagtacattttctcttgagtagttagttgcttatgcaattacaaatatagcttagtgcaattagctttttcttctttgattatttaagtgcaatttgtagcttggtgcaacctttaaagataacgatctttaaataatgtgattctaggaacatctcggtgttcattaattgataaaaataacctagtaaataaatatgtgagaaaattttgaaaatctacgaataatcaatagtacatgttattaatcatggggatacataaaacctcttaatagttagggaattaaaaattctgaaattgactaagtatatttatgcgagtactactgataataaaatttcaaatgttcagcgttccaaactctgttgaaaactgaaccatcgagattagaaaggcagtaagttgcaggacgttttttttttgcgattagataagggccttcccaattatcgcaaaaaactccatgctttgagttgcaagtattgggcatcactttacgaaggactaaatctcctactcacaagtttttctccttaactttcgagttaaagtaacacgcagtgcgttgttgataggctgcaactttgacttgagcttgatctcaattttcttctagaaattctagatttagatgttgccctagctcgttatcattaaggttgaaacatctcgacaaagggatcatgcggcttcctcaactgagaccatggatttgcgcccataagataatgagaagggaatctcactaatcgttgattgtggggtcgtattgtacaaccacattacttttggaaactcttctgcccaaacaccatttctttcctcaagtttccctttgatgatgtgtttgattatcttattgactgcatcggttcgtccattgctctggggataagtgactgcagaaaatgccttctagattcctaactcttcacacaaagatctcatctccttacaatcgaacagtttaccattatcaaaaattagtttgcaaggaataccaaaacgacatattatagctccaaaaataaactcgcatagtttggtagcagttatggtagcgagtgcttctgcttcagcctattttgtaaagtaatcaactgcgacaatgacgtatttaactcctcccttgccattgggcaactctccaattaaattaataccccaaattgcgaaaggccacggactggtgatagagttcatattacttggtggacaatgaacatacatcgcgatacgctgacatcttttgcacttcttggcaaaattgaccaaatctgcacgaagcgttagctagtagtacccttgttacataattttcaaagccaaggaatttctagcagtgtgattaccgcatatgcctctgtgcacctcttggagaatatagtcgcattcacttctatcgatgcacttcaagagtggctgattgaaacttcaatggtgcagtttttcatcatagataacatatcaagccacttgataacgtacttttttggcttcattcttgtcctcacagagcttccccatttttaaaaattcaatgataggggtcatccacgtgacctgactatcattgtctatttgtataacttcttctcgatcaatggttaaccttttaagaatttaaacaggaatgacatctagtaattcaaatttgcgtgttgaggacagttgggccaaagtatcttcatgagagtggtaagctcatgaaggtattcgactaacaacaaccttcttgaacttgggcaataactcgcaagtgtaggcgaggtatttggtaaggcaaccacctcaggctaaatagtctttgttgacttggcaaacaacaatctgagaatcactgaaagctttgagatactcgactttcattttaagagaaagttttaaacctacgattgtggcctcattgttagaagcattaaattcaaatcttaaagccgcatgaactttaattttgtttggccttatcaacataattcctccacctgatccttcagtgtttgaggctccatcgacataaagagccatcttgtacctttgtggacttctagatcaagtcgctcttctgagattattcacaaggaaattcaagtataaaattagcaagggcttggctttttatcacggattacgatttataccggatgtcaaattgatcgagctcaattgaccatttaagaaggcgtccagatgtatcaggcttggccaatacttgtcgaataggataattagtcaatacctcaattgtatgagcctaaaaataaggtcgcggttttctggaagctattatgagtgtgaaggctagctattccatctgaggataacatgattctacgtcaagcaaatgtttgttgacataatagatggtgtgttgtggtcttcgcgaatgagcactgaactgattgcatagttagatactgcgaggtaaattgataatacctctccaggcagcggcttggagagtattgggggcgcaccagttgcatttttagagcctaaaaagcctcttcacatgtgttagtccattgaaattttttattaccttttaaaatttgaaaaaattctttgcatttatcaaatgaatgtgacacaaagcggtttaaagctaccctaccagtaagtctctagagttctttgggctttgtacaagatcgcatctctactaaagcttttattttggcggggttggtctcgatgcctcgctggtttagcatgaaaccaagaaacttcccagaacctatgccaaagatggatttgagtgagttgagtcgcatcttatactggcgtaagattcttaacgtcaaatccaaatgagcaacatggtcgatcgcgtgttgagatttgacgagcatgttattgacatatacttccatggtctttcttagaaaatctacgagcatcatgttaactaattgctgatatattgtgcatgcatttatcaaactaaaagacataattttataacagtacaaacctcaatctatgataaaaaaaggtgtgctcttggtctggctcatacatcaaaatctggttgtatcccgagtatgcttccatgaagctgagcaatacatgacctacagttgcatcaacaaattggtcaatgcttggtaatgggaagttgtcattaagaaaagctttattcaaatctgtgaaattgacacaagtgcaccaagattcattaggctttggaactaagatgggattagcaaaaccaattcggataaaatgactcattaataaatccacatgcgagtaagcgatcaacttcttcttttaacgcttggacatacgaatggttgattcctgtgtaatacacttttgattttattgaaagagggtacctcgcggggtccattttgtggtgacacatgatctcagacaatattctaaccatatcttagtattttcatgcgaaagcatccagattctacttgaggaaggtaatcaacccttctcaatgttgcataatttgtttagatctaaccttcaaaaattttgaaatatttaaggatcaataggtacctcaattgtttctttagcagcttgtgcagtgttcgtgtaattgaggattttgggatctatatcaggtttctcaacatggggtacttcctcaattctgaatgactcatatcgaggtggtggagccttgatcatgtaaataatattactcaatttcttcttttctacgatattgagtgcaatattgtaacattcccttgaattagattggactcctttcactgaacctacacccgcatgcgtaggaaacttcatcgtgagatggtagattaacaataccttctccatctctttcaaaatgtggtggcctatcactgcattataagctgagtgttgatcaattactacaaagtctgccatggacttcactgtcataggcgcttctctgagtgttatgggtagtttgatcattccctttaactcgatagtatctctcatgaaactataaatgctcgaggtcactagtttcaaattttttttcatgtagccccatctgcttaaaagcttataaattcagtatactgactaaactaccattgtccaccaagatgcggtgcatattgttgcctccaatattcgtgacaatcactagtgcatccgagtgagggtggtgaacccactcgcatcactttccatgaatgtgatgtcatcacattccttcacatttgtcagtggtttctctctggcttccttcacataccaatcctgagctttcctcgagtctccaccaatgtggggtccatcgatgatggtcaaaattttgtgaggagccctagaaccacttgcatctttatcttggttagctctattcatttggggattggctttacattccttcttatattggccaaaatgacatcgacgaattaattcttcgattttatcatgcaaaaaccagcattccaaggttgtatggccaatatctttatgatacttacaaattattttgcgggtccctcttgttgcggtttcccctaatggaggacagttttttgaaaatgtctgtatgctcctcaatagcatatatgcagttgtgagggattcttaactcggtgaagttgacaaatcggggaccccctttgcatttgggtgaactttctttttctattggggactttgctagcttctggctttgacatctttttgggctacatcttgggctgcaccttggattgcgtcctctcgagattttccttgcagactcctggaacgtgccctggttgttgaagaccgattcttttccttatctttctctagttctgctaatgaattctcgattcttttgtgagactcagccatggcaaagaattcaaccaacgtctcaggacgtcatgtctataattctttcaaaaagtcgattcatggaaatacccctatgatgagcttgcacactagcaaagacttaggggccttttccaactttgtaaccttgagattaaagcgctggaaataatcctgtagggtttccccttgttcttgtttaatgtttgccaaagtggtgtaaggcagtttgtaggtcatggttgcttgaaaatgggtcagaaacaagtccacgaatgtttcccacttcaaaattgatgcttctggtaactgactaaactagccatgtgtgttatcctccaaatttgtagcaagaatttgatatttagccaattgagggactcgatcaacctccataatagtattaaacttatcaagatagttgatgggattggtcgtacctttatacttcaacgacttgaagagtctgaaacccttttggagtcgagcttgccacacttcctccatgaagggcaaggtttcatgcaatttgtaaatgggctttctctattgctcgatcattctcagagctcgcaagagattctattgatcaattcctcttggaaggatggggttgttaggagatacgacttggtttcctgttggtaaagtagccattgctactatctttttaggtacccccacatcgttgagcacagctggtgcaagtggtaggttgacgacattttttgcattgtttgcatgcgtagggggttgccctctgagtgggacaccttgattggccaacaggggatcacaaggttcctcctctacgtcacatttccttagagtctaggaatgtgcgagaaatgcttcatcgaggcaatctttcagatcacctctatgcacacgatatctccatcatagtcttgtaaaaactaattatgacgtggtgtaagcgctaagagtgcgattgtcagaccttgaggacagtgattgagactcatggtcattcacctcaagttgagtttgtgcacgattgcatgggttgcatcgaccattatcttctccttgcggcctttgttccttgtgactaggttgctggttcgagttacggtcagtaggccttttacgacgtgtggggtcccaaacaggctggttcaaattgagtccatcagggttgttttccctagaatgttccttgtggttacgaggaacactagttttattactacgatgcctattatcattagttacatggttatctatgcaacgacttggtgggacccatggtggatgtcgtgcacgagtttggtttcttcctgcgatttctacctatagtgcctaaatttgctcctgcattgctgtatattgtcaagttatcagttggatgatgccatcagaggctaaggtaggtgttatcggtagaaattgtcccatagtagctgctggtgttgaggtttctccaccatggcttgagaatcgaggaaacaagttaaggggagtcacattggcatgccctactcctcccataacaacacccaagagggttgctcccccttcaaaaattggaacattgatgtgccaatgttgttgtttttgtttgtctgtttcgtagccatttcaattctcctccaaaaatctttattaaaataggttcccacaaacgacgccaaatgtcagagaaattttgataataccaaaaagagcgagtattcaagtttagataagaataatcatcgttagttatggaagtactcacttagaattgcgagtactcaaagtctgggctacgagatagacaaaatatacagaaatataaaagagacaatataaattatagtggttcagtcagagttcggtctgcttagtccacttttagtaagttctcagcttggtttattagatgtatatcacccttttatatgcaaagcaagagtctgctaggataacataactggtcaatcaggaccgttacttcaataattacatcattaaataagaaaaaacattttagataataaatatacgaacagttttgcatgttttcctattccttgattgcagcaacgtatgcgacttattagttcacaatttgaccattcgtatcctacacacgagttctcagggctctatggtgttgtactcccataataggccctgaggctttgtttagttgaacattagcgaccacttgatcacactttttggacattccgtgtttacaatttagagccagcgagctctttaactaatcgttgaaaatactagtaagtcataccacaacttatgtaaagaagcgatctttacttgtcacaggagagatgcactcgttcatcgcatatcacagatatgcgcgaccagtactaacttctcttgatcatcttgattctttgatcatgtcagctatgcgattagaacattgtctcagtcgcatctttcggcaagtaaaatcatgcgaggtcgattctatcagaaccgtattattgacacatcatcactttttctttaagggatgagtacacgtctcaacttagcacgagactagactcgtatttctaggaggtaaatttgcacgataatactatatttgtctcttagttgtttatttaaattatatttatcttattaatattgttgaggtttgacctcttgaactaggtttcggttttgacagttagcatactcctctaactaacttaaatgtcttgacagttaaattagttatatgctaaccatatacctataaatgaatacctctcacttgcgtacagattgagagagaaaattcagagggtttagagagaaattgagagttgtaaatggcatctcttgtgtttgtttgagaatgtcactagtgagacacattgtaaggagcaagactccattgtaacaagggtttcttccctgttttgtaacctctttttagatcaataaaagtacatctccacagccgaatcaaggctactttctcctgtggattaagctcctgatcacattgattgtgtagcccaaccacataagttcttgttgttgtttagtgctttcattagttggtgcatttactagtttatgttatgatttatgttgtggttttatgttcaattcatgttcttgatcattgtgcattgttcttagtttttgttggttcttgtttggagtttaagactccacaaattggtataagagctgaaatttctctcagcaattcaagaatcgaatctattctttaaggaactcaccaagaagatcaagaatgtccaactaaaattttgagattgacgagttcaatggtgccaatgattttggcctatggagaattaaaatgaaagcattgttggttcatcaaggtatttcagatgccttggatacagaagctctagcaaccattgatgacaagaaaaagaagactaaaatagaaaccaaagcacacaatgcaattttgctgagtttgggagatgaagtgttgagagaagtttcaagtgaggagaaagcattgggattatggaataaactttctgagatttacatgaaaaagtcattagccaacaaattataactcaagaagaaactctacactctgagaatggatgaatccaatgagttgggaagacatcttaatgactacaacaagattattctgcatctatgcaacattggggtgaagatccatgatgatgaggattaagctatcattctactaagctctctgccaaaggtttatgaatattttgttgacacgattctgtatggaaagaattcactcaccatgacagaagtcaaggctgcattaagttcaaaagagattcaaagaaagggagatgacaagatcgaatcaagtggtgaaggtctatttacaagaggcagaaggtatgaaaagagactacaaaaggaaacaagaatcatcatggaaatgggggacacaagaaaagatctggttcaagaaacacaacatggaaacaatgctattactttaagaaagaaggacattttagtgatgattgtattgctctcaaagccaagttaaaaagagaacaaaataagaaaaacaagtctaagggagaagctgatctagctgctgatggatatgaatcagctgatgttcttgttgcctctagtatgaattttggtgaagaatggatcttggactcaggctactcttttcatatgacaccaaacagaaagtttttcagtacaatgtcagaagagcaaggtggaagtgtcttgttaggcaataacaaatcatgcaaaattgaaggaattgggtctgttcagatgaaaatgcatgatggtgaaatcagggtcttgcaacaagtaaggtatgtacctaaacttaaaagaaattttctttcaattggtgcttttgataaaaattgttacattgtcaagatagatgatggaaccctaaaagttactagaggatcacttgttattgttaaggaaaagttagaaatggcatatactatcttgatggtcacactgtcactggttctgcagcaccagtaataatcaaatcactagaaaatagctttaagatgtggcatcataggctaggtcatgccagtgaaagaggtttgatagaacttgaccaacaaggggtattcaaaggtggtctaaaagacaagttagaattttgtgaatcatgtgtattgggaaagagttgcaaagtgaaattttcaaagggcatgcatacaactactgagaaactgagctacattcattctgatctttagggtccctccaaaattcaaacactggggggtgcaagctacttcatgagtatcatagatgattactcaagaaaggtttgtgtattcttgttgaaaaataagaatctagcctttcaaacatttgtcaattggaaaaccatgatagggaaataaacaggatgttgcatcaaggttttgaggacagataatggccttggattttgtttagatgagttcaagagctattgcat

SEQ ID NO: 14777 - DNA, 3637 bp, Cannabis sativa
  modified_base (67)..(72): a, c, t, g, unknown or other
taaaatcaaaaaaattgtaaaaatgtttaaaattccatgaaaccgtatttttgttgtttttttgttnnnnnngtgcatttgtgaaattaacccaagctaaaactaggtacctctgacattataacccaaggaattcctcccatacctaatgagaatgatcctgtataaacctgcatgttgttgtatagcaagtgaatgacaggtcgtttaagcatataaaccacaacaaagtctttttctttaatcaaaataatcagctatcaaaattgcttgtaaatcagttgggacaatccacttcactttaattgttgtgatcctgttaccaagatgagaacccgaaaagcgagctaaccaatcagacacttattcccatattgtataacaaaagaaaatgaaacatcattgaggctttgaggaagaagcctcttacagtcatcaattataaggagaagaaatgaaaacattacttgaaatagcttgtaccacaacagctggactcaacaatataagaattaagtccgaatcaaatctgtatctaaacaagttgcatcttataaatcctacaattctgatatttaaacgatgtgttgtttttcataaacattatcataaacttagtactttgtcttttcttagtttccctaaaatgcacaacagcaacctcaggccaagtaaggttgaaatttaaaaccaatatacatgaatgattagcaattaattgaatgaaaaattacaaataatatcctaacatgatttctttttcgacaatgagagaggtctatcctataaataatttgagaaatgatatattcactaataaactacactcaaacattacattacacaagtgacgtgacaatttaaaccaataacatttatccaagtataatttatggatgcacatattattactaagctattacgcttatagtactacaaataacatgacgttttctaataaacgacaaaccttttcttaatatgtgaaaacttttctacttgaaatgtcgtggagtataacgtatttaccttttaggctaattaacaccatataaaggaaaggatcctttctacacaaagtaaaaaaaaaaaagaattttaaggatttgagtgcatttgcattaccagtactccagcaagtgctaaaaagggtgtagcctcattccatttttgaatgtcctgaacatagttttggcacaatctttgtcactcccaatcaaaaaatgagattattaacaataaaaattaagaaaaaagtttaagataaaaacctgaaagatgaaggacaatcccacaagaagacaacctaagcatgtgccagcagaagaaacctgagaacattagcagacttcaacactaggctttcattcgatcccgtcaaattaaattttaatcttacttccttaatcttaccaaaagtagtggccttcttccagatttgtccatcaaaaccactcccaatgccgtcattggaacctgtatatagtggtttcttttaaacgaagtaggaggaaacatttgtagcagatagaatcatacacttgaatcttatgaaagtaatcaaagaacctgaacaaccaccattgctatcgtaccaacacttccagaaaaccctgacataaaccaaagattagataccctattcctttcattgttcaaaatataatgatattaattgactagtgttttcacattcatataccagctgaaatgaaaatagcacttgcataaaacgcaatgccgtttacacctccgaattgttgcaagaccatcaagccaactccaacctaacatcactctaaagctattattaaagggtcaaacaaaacaagaatataaaaccagaatcaaaagatctttatagaagtgataaaagcttactagaagtgaatgggcatatctccattggaacaggtgtgtaatgctagcttcagaaagccttccaagagtttctgtgtaatcctttaagaaaattgaaacacatgttaacaactctaacttgagaacatagttatctgttgagttgcagacatactttgatttcagcaacttctttataaatattggcattttcccccctaaggcgctgtaaagcagcttcacactcattttctcggcctatctttgcctgtaatatactctcgcatttgtaaaatcatgcatgattataccttagcatataatgttttatgtccaaaacagatttggatagcacttacgagccatctgggagattctggaataaagaataggccaagaagctgtaccagacatggaattgttcctgaacaaagaagaaaaataagcagtcataatccgtgtataaaatatattttctgtttaaagctaagtaataaaacaagaagacaaaaggtaagttaccaagaagagccaagatcctccaatttacaaaagccccaataagatatgtcaatgacaccccacaacatatcatcaactgttaagtgagggaaatgcagtaattaatatgcttcatgacaatcattcaaaaaataacctaacttttattgatgctaattttttttacctgatgaacagtggtaaatccacctctaagattcttaggggttatttctgctatatagacaggtacctaaatgaaaattgaatgaaaagattatcttattttattttttttggcacagaacaaaatatttcaaactaaaattacaatctctacacattttttttaccacataagacagaagtcccattccacatcctactagaagtcttccaaggtcaagccaccaagcaaccttttaatacaagaactgaactcagttgaagacaatagagactttacataatagtctaacatttcaatttgagtaacttattttctaaattccgaaatctcacttctgcagacttttgaattggaaataacaagagataagaccttggcaaaaactataaaaagccatcctacaatgcagaacacctctgaaaatcccattgtctgttcataaaaacaaataaagaataagcaaatttgaagataatgatatctaaaagagttagtgaggaatgaaatacttacacctcttctaccaatgtaatcagctattttaccactaactatagcaccaatcatggccccaattgtcaaaattgaaccgaaaagtgagtactgccaataggaataacttggaattaaaatacaaaaacagataaactatgcaaaaaaatagttccaaaacacaataaagaaatgaaatttctaacctctgccacagtaagacccaggtcatctacaattccagactgagctggtgaagaatatcccacctgaaaatgaatcgcgagttcaaaaagtcagtcaatcggacggctagtgatatctcaagaaacccatcaagcacgcacaaagacttaccgcagagccgaaaacataggacccacaaacagcaaccaacgtggtaagcacaagcatagtggtaacagaggaagactcatcatctgattcaggatcatggctagtaccgccttgtctagaaatgaaaatcttagaaccctcatctccactatgaccacctccacctctatctttaacattcaacagaggatttgacagttgcccttcttccatgctttctttacccatgtcgtgaaa

SEQ ID NO: 14778 - DNA, 2170 bp, Cannabis sativa
acggtgacggcaacggaagatgaggtggaggagtttttcgctatactcaagaggatccacgtggcagctaattatttcaagaataaaaacggaggaaaccgtgagttgacggccaaaacttggagggctgttgtaaaaggtcagagtgacgctatggttttagacggagataacggcgttgatgatgaaacggaaagtattaacgataacagaagaggtttggatctcaacttggaacctccgccgcctcattccgatgacttttgacttttgtttttttaatttttatattattattaataataataatattttttttatatatataaaaatttattagtaaggaaaaaaaaatggatctgatacttcgatcggttcagataatttttttttttggtaaattatttagcaacaccaagttgccatttttaacaatcttattctaacttaaaaggaatatatcattttatgattatgggtttatcttgaaccacttatgttgtgattacttagttattaagaaattggaattattatcttgttttatgttttttttttctttaaatctttgtattggattgtattttttttttaattaattttgtaattagagatattttgaggcatagataatttatgttttcaatttatatttattttttcgaccgattaaataattacgtttttattgcttactatcaatttcgttaacgattgatttgattaataaaataccacagattaatatattagtgatctgactaattttttatttttaaaatatcattaaataagaaaaacaataaaatataaagtttttttcatatttacataagtagttttttttttttttttttttttgtatttttagtgaaattcacataacgatcaagtaatttaaattacaatttgcaactaaaattaacatagtattttttttaaaaaaaaaaaacattaacatagtatatagtaactcacttaaaaattatcaaagtaattataaatttaaaagataatatatggaataatttttcaaatataatatatatttttgctgttaaataaaaatatatttttattttgtttttattattatataattattattgaaagtgaacagttaataaattgacactgtaaatattattttattattacttttcatagtcttttttattattatcctttctgaacattaaggagaaaaattccaatttccaacttggaagaagattatgctacaatattcaattacattatattattattttcagtctatgaatatatgtatttaatattcatttttttttattctacttaataaaagaaaatgtgtgtatattgttagtaattttttaatatattattgaagatgttattattattttaagagaataatctcatttagtattttgtgtttactaacaaaatagaaccgataatgtgttcaataatatatgaaagtgaaagaatatatagcaagcaccacaaaccaaatatagagtgattagttatttttattaaaatatgtgaaattcaataataaatatatcactaataatattctatcaatttgtaagagcagtgtagtgttaggtaatattagtgttggttaacaatgataagtctttttattttattttttcaaagtcaaacttcattaaaagaaaactagttaaaatactagttagtattgaaatatgttaaaaggtatttatactgtctaatactattatttatataatttaatattgagttctacttatttaaatttaataaaaattatgaaaatatcgttaattaattataagatgttatctcataataatggtaagtaccttgctcattaatattagactaaagagatcacatggcaatagagtatgtcaaaccaattaaaaataatacctaataaaggaattaactcaagtcatttggtatgatgtaatatttgtatgaaaatgatgatttcttatatttccatatttggtatggagtatttattattttaagtctaggaaaactgttagatggtaataaaactactctataataaggtaatcttaaattcttaaaaaaattaggtttaaatagggaaatttgattttctatacttaaaaaaatcttaaatattttattcttaaaccaatacattttaaactaagaaaaa

SEQ ID NO: 14779 - DNA, 10829 bp, Cannabis sativa
cttgctgtttggcagtttcgttggatttagatttaggttataagtatgttattgtggagagtgactcgagactaactattaatgctctcaatgggaatgagttcctgctaagtaggattataatcctgctaacttaatttagcacaaataataaaattttactataagtgaataaataaacgtaatttattaattacgaaaatttatttgaaatatatgaatataatataagctatttgtgaaataaaaatattttcaagtttggtaatcctgaagactcaataaatggataaataaacttaatttgataattacagaaatttatttaaaatatgtgaatttaatataagttatttgtgagataaaaatatttttaggtagaacttgttgacacatcataaaggtgctagacaacaccataatacctcatagcaatgctacaatttcaagtttgatgaaatattatcaaagattggcaaaaatataaaatttggatccatacaatcagggctggccttgagttgaaataccataggcaaaaaaaaaatttggcattttttaaaaattattaaaaatatatatatttttttaagaggaaattagactctataccctttttatattgtactctttttatattgtacttttactcctttttttaaacattgtaccaattttgcccctttcacttcaagatattctccatgttccatgtgactcccttatgtcatgacattttgggtacaatacatataaaaagaggatgtttcaattaaaaaatattagaggtaaatttggttaatataggcatttttcaacttatcccttttttaaaagatattttttttatttgaacccctaaaatgagtgagccctaggcacggacctagctcacctatacctaggactggccctagacacgagcctaacccgcctatgcctagggtcggccttacctacaatactagtaccaatcaaatgtttaatggaattcggaaagtgcatatatgcgcatttagtgcagaatgggttagtttgtacctaaaattgagtctaaaataaaaaaatccacactacttagcgtaaattagaaaaattagaaacaaaatagtgcataataaattagataaacaccctaatttagcacattttcattaaaaatcattaagaagaaatatatgataggaccaccttctagtacatttgatccatgcctactatagatacatataccacacaaaaatcatatatgatgccaccaataggtttaattgtctatcaaagttcttggccaatgggggaaaataataaccaaataaaacaaaataaagagggagggagagagagagagacagaggagacaaaacagtgaactgaaacaaccaacacaactcactcaagcaaacgacagagcaagaccacccagatgtgtttttttccttttctttcttttccttcattttaggggaaatggaaaaaacagaccaaaaacagagaaaaacaaataaacaaaaaggactataagctctatacccaaaaaagacacttatatttttaacctatgcaatcgaatgtacaataaatctaaaagatcattgtgccctggatttacaagacggtgttaatatgaagtgctttcaaaagagacgtcgccatttgcttcaccaaaacctggccaccagagcgttgtccatctctgcgttcttctattaaattctgaagcttttggggcaaatcattctcaacgatcaattgctttggtcggggatgatgctcgtaaacagcctacaatcacaaataaaatgagcattgataattagaatcgaaagcaaaacaatatccatacttcactagctttgtttgtttagaaactaaatatataacgcaaaaaaggctttgagaaagaagttaaaaaaaaatacctttatcagtttcagaagattcaaacgaggtatagcatcctgatggtctaaccttgcaatgagcaagggtgtcaagccattaacagctaatgtggtattaatacgagatgattttctgcaaccaaaaaacacaatgtcgttacttaaaagtttaaatcatcagaggggtggtaaaatatgaacgatctaatcccttgtgcaaacaaaaagcaaaagggaccgctcaattttgtgaagataaaatagatgtgctttattctaaatgcaaaaaaaaaaaaatctttctccagagtctgtcttcaaatcccaagatatatacttaaccagtaatcataatcaagttaaaattaataggccatgccatattccaactctaatagacaggaagggcataaagtcacgtacgtgataattttcaagaatggatccaatatgtggacgaaatgttgttctggacaggactggaaaaacttcactagcttttgaactgcatccttcttcagtaatgcttgctccacttttcgattgtcattgtcgagagctaaacaaacagcaattgaatccaatgcagtcacagaccagaactcatcctcaaggagacttaaatacacatccaatccaccatgggctcttaattgctccctagaattacgggatgcatgagccatgtcacataatagaggcaaagcatatcttttcaagggagaatcagactcaataaattgcatcaaatgtggaattattccattttcagctgcctgctcctgtctcctcttgtttatcttacacaagttgaataatgcattgaggaccttcattaaaaaaagaaaagaagagaggttaattcagactattgaaaggtggatccacttccagaatatacattagcagagggtgggaaaaagtaagtgaaatttaaaataaaccatacagaatggaaacgagaggtcaaatgagaagtaaagactccaaatttacaataaatttagaaatatttattgtttaatgttagtttgctagtgtgtttgtctctcctagatttactttttttctaaattatcttatcaggggagatgacggaatttgccatatgtgaccagtatgaatttctttatccaagttggcgttttgaatgtagtgtttcacgaatgcacatataaaaaaaattatgatcatattttgctagagggtaacaataaaggagagtaagtcaaaatgtatcagcactgtatgctgtcatcgaacatctgagtgccaaatatatgatcctattagctcttcttgatggaaaatcactattatcaactaaaagcaatataaagaatgcaagacaccaacagctaaaccatgaaatgtaatagcatgaatgaaaaaggtccactcaataagatcaagaacactactcaatatattagatattaactactatgactgcagcttagagtagtaaccatatactgtaaatgaaacatagacaaggataaccacctcataatgtatttgagatacaagagatccttcttttaattcaagatttggaatcaaatacttaattgcatctgcacgctgaagattctctaagcagtttggatcagttgacaaatggttgatgcactttaatatctgaaaagtccgatttcagcttgattagagacagtttaaaacattgcaatagacaagatgagcaaaatcactttggaatgtaccttcaaaagaattgggggctcaactctattgaacatctgaaagagacgactgagcaggctttggctgcacatgtaagattttactgtcgtatctgcttgtgcaaactcaagcagaagatctgcaaccttttctagataatccctagcaacatcggcatttaatgttgacaccatgtgggaaagtaatccagatgacgttgcactccccggcctagcatttagaacacctgacccagacagtacaccagatgcagtctgagatgcagttccagatgttgatgcaccttcatcagatgatatcggtccaatctttttatttactgttttataagaaactctggtagtggaatcataatttccactttctcttccacgttgagagacatctgtagaaagtaaatatcatttattataatgtcatcattaatattccacacaacatactgacacttagataagtgtagactaaacagcagttaagatagatctgcaactatgcatgtacacaggtgcaaaaacaaccccacaatcaactgtttagtgtagttcatttaaaattaaatatttagcagctcaatcaaaaaaatacctgcaaattcagccatcaaaaaatccagttcaccatttgccttcttgtcgtgtgcatgtaagagaggtaatatgctttcatgcctttccagtcctgagaagtggcgtacataatcaagctgaccagagaaatgtcttgaagggggttccttatccagtaagcttagcagaggccgaacttgctcgggttgagttgctcctactgtgggaaacccatttactgcaccttctgtcaactttgaaggcctatctgctgctcttgatggatcaattttccaccgctctaaattttctctctctttattaatcaccaaagaagattccttagtacctatatttgatgctttttctgaagatgtttgttcagataattttgaaggagttgaaacatctgctgctacattgctagaatggggtctaccagtatccatctgaggatatcgcatatcagagtgattgccatctaccctttgagaaagtgaaacggaagcacgtgaagcttctgatactacagttgaaacatgatgatcagttggagatggagcctcactctgagaaaaagcgggatggctagcatctaattgaccagatcgtggccgttgaactggtccctcgagtggaaagccacccccagcagaaatagaagctagacgagtagcctcgtttaaactatgaagagtgtttataagcctcaaaagtattccattctttgcagctatacgacaaaaatcatttctaggtgtagagcgctgaagcttaaagacttgccacatgccatcaatagctagatgaaccatttccctgtatgtgaagatactaatgagcaaatttcaaactgaaactataaagtattgaacaacgtacacaaatgcacataataaagtattggatttatttattattattactatgattatattttatttttgaattgtattgaaagtaagtaaaacacaaaagggtggagaaaaaccaccagtatcacaaacagaaacgtgatacaagaaaaaaagattagtgttatatcacaatacgggatgtcatggctacttgttggtcactgaggctagaattgaacaatagagcttggggcattatatttgcacccaaaattttgattaaagcaccctaaatcattaaaggttatatgaaataatctttttttaagatttatacttactttttttttcttctaaaaaaatgcatatgaataaaatatattttaaatatttaacagaaaaaataaaatatgtatataaaaattctaatgataaagtgaaaataattaatattaacctttatcagttaaaataaagtaagcattaaaaattaatattaatcattattttttaaaaaataataaaaaagaaaaagaaaaatgctaaaaattaataagaaaaaattaactaataatgtaagaaaataaaaattgaataaaagtgttgaataaacttcaaaaataaattagtttacatatgtaaagtgttaatatttgcatagtttttttctcattccttgtcataatctaaaaaatacatatgtaaaataaaatatattttaaatattaagataaaaaaacttaaaaagaaaatatgaaatattatacccattattaaaaaacaaaattaaaaaaatatatattgaaattagcataaaagacagtgaagtgaaagaaagacaaaaaaaaaaaaaacaaaactattaagagtaaattttacattcatttaagttaaattattcttttaacatttcagtgcttatataattttttgggtgtaaatataatacccttttttaatatcaattattattcctcattaattaaaaacaaaacaaacacaaatcagaaacattcactttacactctactaggtcactttcgggtattagtttagcagacagagagagaatatacaaacctgtactttgcataatcagcctctaggaatgccaccaaaacagggattccacgacaagctatgaacatctgcaatgtcaaagaactgcaataacaaaactctattaacctttaggttatattaacttcagcaaaaaatgataaatgaaaagcctttgtgctatatatgtttacccaaaaacagagaatgcacaataagctgtgaacatttgaaatgtcaaggaactgcatcggaacagctctaataaccttgaatgaaaattttctattaaatatgaatgtgtttgcgagtataatatgtctctaccttgactgacaaagctgctgcaaaaaataagcagcctccattcgaacttcccggggtctatcaggtacagcaaagccaattaccatagggatctgtcatgtaacttggtagaagttagctgcatctcaaagtctatcccaatccaaacatattttcataccacacataggtactttggtaaaagttaaaacctttcagaaaaaggaaaaggaggtaatgaagtggaatggaatcgattttcattctattcctttgtttggttgaattctaaagtattagaatgcaatgatttttactattttagtgaaatgactgttccatttaaacgagggaaaagacaaattttttcagcatattaaatgtaattccatttcattcctattattgtattttcatcctttctaaccaaacataccctcaattaactcgaaagccagaacaataaaataggagaaaatgtcttagaaaataatcagtacaatgatataacattccaaactaaatgtccctaaacagttcaaactactttatactatgccacaatagaagagagcttcaataagccaaaataagaaaaacgtttactgaaactaatttttaaccaagtgcatcattttgtcaaatctccaaagccgtgcagttatcctgacaacattaaaaataaaataaaaacaatgctgacgaagtacccaccagaccaacaagacaagcattttcctggaagtcagtattatctttgatgatctgatttatgatttgaagcacagaacaaataacctgccaaaccaaaagtagaccacgacatattagctgtttaaaagtgaactgaaaagtttgacaagttctataaaaaaaattaaaacttatcaagagtaggaagagaagacatacacgagttctagggacctcaagcaattccattaaaggaagcaaaccatgctgggtaacaaaaaccattttttgctcagggcgttgatgaaagatggcaataagtttctgacaagcagacacaatcacttcttctgattcttcaggtttcaaagactgaactaacctgctaaactcaacagccttccacaaacagataaagaagaattaatattgaaagaaaaagaaaatgcctgtaatcgaaaatggaagagacaaaaattgaatagacatattttttttattaaatctttttctgtaggcactgtttgaaagctcaacaacttattttttgctagacattttatcacttgaacaaaaagagaagaacaaatacaaaacaaaacaaaaaataagattacagagactacctgtagagggaaaagattttccccttgcaacttttcatcaaaaacctgtaatcaaacaaaattatatcagagaaaggatcaacagtttcttaataagacacaaggaattgagacacgtatcataccaaaccatcaatgtcgatcacatctggataacccatgaaatatcttaataagttaccaccaccaccattttcctgccccatttcactctccatttgttttcgatgaatataagcattcagctttgttgccaggtcaactttcccagaatcattgacaggggaattcccttggtttagatgtgatgctgatgcagacattgaagcctctgtagttcggtcttctggatgtctatccaatggatgaaataaatcatccaatgaagcatctcctggagtgtcactaaatctactcagctcattacctccagtggcgattgcctttttagccaccttcaaaaatgaccaaacaattacatttataaataataggaacatagaaacacatatattatgtgattttcagataaaatagagaataatccacattctcagttcatttggagacttaattcagatgcaccctacaaccacaatgagacttcacttaccgtttggcaaaagcaaatcaacaaaaagagctctcaaagtattatgcaacttaagttgttaagcaaaactaagttgtagaacttcattaccgcctaaaatgccaaaaactcaactgactacaataaagtaataactatggtttcaggcctacaaaatggaagttagtagaatatcatttaaaaatgtggatagtagatgttgtgaggctaatgtgtcttcattcaaagtacctcgtgagtattaatttattccaacaccctccccactccatacccaaggattcacgcattctttgaaatgtgatcagaaagtgtttaaaatcagtttgtccccaaaatatttgaggaataaatatcaaaaataaagaggggaaaaaaagaaactacaaacaagtaactgaagggaacacgtgactttcgaaaggaagaaggatcaaacttatgtgtttctcaactgtgtactctaaaagctctacaggcatttgagcatcagccaatataatgtcagaaatttcattagaagaaaccaaccaggatagtgtaactctaccttttgaagactgctatcttgatttcttagtccaaaaccagatggtttacttgcaatggatgaagaacttggtttcccatcattttccatcttcagaacaggggaccctacatcaccattgaccaagacttcatcactagaacttggttgaggtaactcaagaagctcagattgatcagtggtattcacaaccctattagaagatacaccgctaaacccgttctgtagggatggcttctcatggatagctaaagtaggaacctgatctgatagatcatcttccggggtctctgtcctttcatcaacagagtttgaatctgaagcaggagtcaggacaggcttcgttatgtctacagcctcggttgatggtaactctttcctggagtcctgcaacaccaaggcttaatgttaatagccatacaatccaatcaggcacataccaaataaaccgaaccttggttccaacttccaacaatagaaaaaaataaggtctcacagctttaattgcagaagcagccatctctactttctccacagaagggcttccaccaaagctaagattatccccgtttgagatttcagcatttgctgggacatcttcttgtatatttctgcaaaaaaactgggttgtttatagaaaattaccaaccaccagacacaccagaaaagaaatccccgtgccgcataaaaaaaacatgtgagatatctaatggcaagtgcaccatagtagcataggagatccctggtgtcaccatagataatttatttattttaataagtaacgaaactagattgattaagtaatgtctataataatgatacagaggagattggccccagcatcacacccaaacaaaaactcagacgacgcaaacattgtagtattatcatagatgaaacctaaaatgatattaatactaaaatcaagaagaatagctcaaatggtcaagcatgttgttttcaagtccctcctaggcacgtagttggctagtctcaatatattgtagggttacacagggggcctagtgtaaatacacacacagacacatatacacacataaggcattatctacaagaaacaataaggcaaagtctacatttaacacaataaaaaaaggagtcaataacacaataagacagaatttaaagaaaaaaattatacaagaaaacaataaagcattatctacatttaacacaattacaccaatctctacacaaatctgaaaacaggaaaccctttgaaatcaacattaaaggagtcaagtcctccaccattttctaatcaatgagactccacaacttctctcccgctgtcagatttgctacaatcaatacacctatatcaatctgaatatatttacaatcaactggcctaagccaccccttacttttcttttcacaaaaacatacattattattttcaagtatgaaaaaaaatacttcagtttaagtggattcaatatccactatatgctagatgagtaaacatacgaaagaatttcatcttcttgaaagatcagaaaataatgctcataatttcataagtcagcaacatcatgcaaccaatagcaattttgtaactatttgataaagacttattttacatacaaactgtgacaggttgcagggctacaaaatgatgaaaagcgcaagggtccattccataaaacaaacctcatagtttaccttagtgaggcagtctgtcggattgaagactgcaaaacacgcctataattctgctgtatccatgggtgagaaagcagtgtcttcgcatcaggcctttgcctagcatcctgagaagagcatctaaatatcatatatggtagagaagaaaggtatactcaacaaaatgacatttcttttgattccaactaaaccttaaaaatatacatgttttttaatatcaactaatttagaactcaggaga

SEQ ID NO: 14780 - DNA, 6251 bp, Cannabis sativa
aacacactttcaaaagtcatttccataattttgattaaaaaataaaaatttaattttaaaaattctaatataactaatagtatatatgtttatatgtgtattaactcattttaattggatgcacttttaatatttaaccaattaaaatacaaaaaaaaaaaaaaaaaactcttaaaagtgagagcaaaagtgatgttctcacttagagcatctccaatggttgcatcttttgagatgctaaaaattcacacattatctaaaaatataatattttattttatctctcttccatattatttttggcactcttacttctaaaaatacttcaatagataacactttttaaaaatactataattataattttactcattattatttaatattatatcttaatttttagttacaataactttttagctttaattttttattaaaaaaataaatagcaaccatgcaaatttgtagactgacatttttttctctccaataatataacatctcattctcaatattttaatacattatatatccacctcactaagcattctaaaaaatggtatcattggatgctatgagttttcataatttttaaattgcaacccaatcaattcaaattaatttctcaaaagtcaaagcaaagaattagcatctcccacgtccaccactaagcaacattatgggttgcagacccaataatgcttggtcctcacacaatgcggccaactcattctccggcaacgtcaccgtcaccaccctacccagaccaccttccgacgaaggcatcaccatgatcaacccttcaccttccacattcccaatgtgatacgacacgtggacgggctctgctccctcatcaaacgcagtatcgtacatcaacggcccaacaacgctaccattcggcccacatgagctgcccaagtgatcaaccttaacacaagtcaattcaggcccatacatcctaaaaggtgggccgtaactattttcctcctctccctctctcttccttctcgactccagccaatcaatcgctgacctaacctcatcatcgtcgacgctcgccacgtggtggtgcagttctctcaccacgtgtcctaaatcggagccactactgagctctcgaacttgtaaagaaagcatcgaaaaatgcaaagcgttgccgtaatacccaagaggaagcggagttttcttcaataacttcctgaagtccgtacatattgagagggagtatgtggagttattttttaggaccttcaattgtgcgacacgtgtccaaaagagtgcccctagataatcgaagggagtggcgttttggcaactttcggagatacctgagaggcactgcttgagtattgcatttgagaatttgaaggttgccgtggccattttcactaagggcgccgcacgtgcgatggacttggcgtgatagtaagttacagaattcttcttggtatttgtatcgggtcgggtacagagatcggaccctgaatttacgagtgggtgggctatggcccgaccacggtgagtgtcaatccatgatttgaagagtagggttgccgatgttggatctgcatgcatgtgagtgcagctcagcccaacggctactcctcccccttcaaattcatttatctggataagataagaaagaaaaaaaagttatcatatatattttttactagaaaaaaaagtagttatatttgtgagaatgtatctcacattaaagaaatgttttttgctttgatttttgattaataaagtttcccaactacccagaagaatatcatgtacgtgtttatgaagtggtccttgaaaaattagttttatacaggctcataaagaaagaagaataactgcataaggcaggtagagattttcctgctatttttgacttatcattgcacttaattggtcctttgatatttttttaaaaaagaacaccaaccccaaaatggaatcaatctgaccaaagagacattacgtgtcaccttgtgaaatcgtccaaaaatatgtctcaacttcctgtctaatataatgaatataaatgtgacgtatagtaacggagaaagcattatttgttacaactatctcttgtcattctctctcctcaaacaaaaaacatattttattttttgaatggattgactaattagaaatatttgccctcgaaagctttcaattttagatgcagttaaagatttttaaacttttgaaatggttgaatttaaagatttctaactctgatcaattttattaatatagctattatttatgtattaaattatgtccaaaattgtaatgtgttgtgtatgatattatgtttcccaatttaatatatattaattaaattgtatttatatctatttgtaaaattcaataaaaaaatttaaatttaataattttaataattcaataaaaaaaaattaacggccccaaattaaaaaatacaatttaatacattagttgctaaaaattctaataagtctattttttttctttttgaaaatctaataagcctatttttttttttaacaactaataagcctattttaaaatcaagtaaaagatatattctgaccctttcaaaaaaatatatattctgataagaagataaaatgaaagtaaataaatttggccaaatttattctatattcctcagctccgtatccctttttttttcttttgtttttgttcataatttttctggagcaaacaaaaataaatagagatttttttgattttttttttttaacaaatgctaaacatctcttctagcgaaaagatgagctctttccaaattcaattttttctaggaaaacaaaagaaaatatcccaaaaacaaggtaaattccttctctccattttccattcttttttactttttttattattattttattttgctaaagcttatattcttttctttctttttgttcataacttttaacttataagtctgtacaaatgaagtatcattggtcacagaattagaaatcttaccctaataaagatctaaaaggttgtgggtgaaggagaagatcagaagtaagaattgcatatatatataatatatatatctttcaccttcagtctaatatttaactatttatcaattatggacaaagcttttacaactttcttagttgaatgtttttagttagtcttgtacgatcctgtaaggaaaaaaaattaaaaatattatttaatattaaattattggagggtaggcatttacgaaatgttttcttcttctttttattaatttttttatcagatctttttttttgtaagatcagattcttttattttttatttttgaaagcatcagattcttttattaatttgattcaaatacttaatgattaaacttttggtcatatgagagagaatagttacagtcacatattagtgttataattaatgcttaaatggcggaattcttcttcgtcagtgctaagtaaatcgtttaagtattaatgatgttttattttcttaattcttagacatggattgatagggacagaacattcattagtaaacaatatattacaattacaaaaaaacaaatttatattttgatttaataattataaattaaaattctaaaaaatttacagtgattataatataaagcataaataataaataagagcatctacaattatatttttatttttagctaaaatttaaataaaataattttttttatttttgcttcaatgctctttatttcaattagtgtctaattatttaataatattttataatttaaatttgttaaatataaactaatttaataaaataatgaaaaaaataatatcaaaaatattattaaaacaatttaataaaaaagtagaaatttttttattcattcttattttttttatggttagaagtttattttttaaaattaattctctattttacttaaaaaatttatttaaaaaacataattagagatgctcagaattctagattcgtggattgagacaattttcaaaagagaggatttgaaatgtatgttttttttttctttctcctttgtctttttttttttttttttctggtacattcttgattctgcttctttgtctcatctcattgacttaaataagagcaaaacgtgcgtgtaaacataatcatcttctttatttcttcgttctcaataagtatctttaactaatttcattacaataattgcaatttccttaggcagccaaaataagattatgtttctgatatgataaaaaagcataatataaatatatacctggattcggaaaggtgaccaattagtggggtccttaggcatctcatcccagaccattagatctttttcttccatcccatcagctgatcttagccactcatcaaacgaggcaccaacttgggccttcacgacccgaacacctgcatcattgttcttaacctcccagttaccatctccgtttcgggctatccgacccgttacttgtgggtacgacgaaagagcgtccgaaagggataccctggctgggtccaaatcaaagtccttgagaacattatccctgtagtaaaatacgatgtgaaggctatgaagacccatggcgtgatcaagagacgtaaacttatgggttttattacccgacccgactggcctgctggataccgctgttagcgtagagtggacactgacccggctcttgctaaccgccatattatacaacagtcaaaatgaatatatatatatatatatataaattaaaggacagtactataagaagatatgattatgcagagagaaaagttttatgtttacatttatatagggaagaaattgaaggaaggtgagggtagttaaatgatattaaattaaaggggttccaagaattaaataggggaaactggtactggtgagtgcattaataatgagtttgaacatgatgataatctcttccgtctcattaatttctttcaggagcattgctattggacggtgtttagcaaatatatcgttttgtaattggttaacaatactctttataaactaaattctttataaattaggtaatataaccgctcttcgcgcaactaatttaatttaatagtattataataaagaataattatttattaatataataaataataatattctttaaatcatgaacttatcattaaaataataatcaaagagtacaaatatattattattaataattttatttattaaaaaataaaattccataaaataagaaaaaaaaattatgtcctactaattattattatttgaggattattaaaaagtccatttgtttgttcaattatttatttatttagtaagcattttaaatttataactattaatctatatatatatagaattttaaattattttgttaaaaatattattattatgaaaataaataaataaagtggtgtaagaaaaaattggggtgctcctcataaatataatgtcttatttttatatgctgattattcatcgtagtcatctttgtatctcacttgttgtcaacatcgtatctaactcgttgtcatcatcatatcttactagttgtcatcaccgtatctcacatgttatctcatttgttgtcaccacccattgtatgtttatcattcaacacctttattaagaattttaaatttataactattaatctataaaaaaaatatgattaaaaaaataaataaataaggtggtgtagaaaaaaattggagtggttcctcataaatataatgtattattttttatatgctaattattcaccgtagtcatctttgtatctcacttgttgtcaatgccgtatctcacttgttgtcatcatcatatatcttaccattgtcatcacggtatctcacatgttatctcacccagtgtcatcatcatatcttactcgttgtcatcacggtatctcacatgttatctcacctggtgtcatcttcatatcttactcgttgtcatcattcacatgttatctcacttggtgtcatcacccattgtaagcaccttacccgttgtttattattcaataccgtatctcaccagttattatcactatatatatcttacttttaaccaatttgaggccttatgcatacaacctacaaagtttgtaatttatgaaagaattcaccattaaacaaatagagaaatctatggaatataagaatatttttatttaaagaaatatatttctatttaaagaaataaatttctatttaaggaaataaataaataattgattttctgataa

SEQ ID NO: 14781 - DNA, 6022 bp, Cannabis sativa
  modified_base (178)..(184): a, c, t, g, unknown or other
acccaagaatcttcttcatatacagaagattcttcttacagaactcaaacccaatctctctcttttctctacacctctctctctacctctcaatgttttctctctccaattctcaatatcaccataactgagttctcaatttcatatttttctaaaataactagtcaaggtggtattnnnnnnnttaggatcaagatcctaaagttggtggctgttgggagtgaggttgttaagttagttaaaaataactaacttaaccaactcctcatagagcgaagcctccacgtcagcttgagtatcagagcctccgagaatatatatgagcttttggactcacggaccaaggacactcgctaatgatgcttacggatatgttgctagagtcgactatccgaaactatcattccaagaaggacaattaaccgactagaactcctttctagagaaaggctagctatcttgaagactgaacttggagtggacatattagtcattcgtgaacacctttttagactcgactatcattctacaagactcttttcgagactggcttctacgagtgaacaactttttggaaatgacgtttgcagagacatttttatttagaggaactataccacaaaactttttttttttttaaaaaaaaaaaattgacagggaccatggtcctctaatgaaagagtggatctatccctaacgatgggttctatgtccgctcgcggtggtacttcatctcggcagtgctctctaatggtggaaaggtactctccacgattttctggcgtcgaggtttgggctacgacagagagagtgagagaggaagagagaaagtcaaagatagagagaatttttttaaaaaaatgaggaaggtaaatttagtataagaagaaacaatagcacacattataaatgtatgttatgagaggactattttgatagaagatgctcatttaagcatataaactaaaatatctgataccaaatatatttactaattttcattaattaacaagtaaattaataatgtggcataatgaagaatataaagctttaaacactccacttataaagctggcattaaatatatgaagagaatagttcatgatgatctatatgccttcccaaatgttatccataatgtgtaccaattaatcttgtacatttgtatacgtaactcattttcttactctctctctctttcaactaagggtacaccatgtcacggccatacaactcatcctttgttaagaaatcaatctacttatattatttatcatttcaaaggttctagaataaacttttttcttggtctagaacaatttatagtactagagttacataaaagattatgagtcagaaaaaaataaattacataaaagaaccaccaactcaaccttacaacctacaaaatttaaccttgttgttccaattacatggcaacactatgagcactaagacaaatgtcacctatataacgacataatgtcacatatatgtggttgcaatggcaacagaaaatcaaaattacgttttctttaagaaaaaaaaatctaaaacttgaataagaatttaggttaatattttatttatcatataaatacattgttatgttgattacgatgaatttaaaccacaccaacttgagaagagacaaataaattttaagaaaagaaatttttttttttagtaattaggctaaacagaaaatagccaaatttgggtggattggagaataggatttcaataattgaagtctaatggggcttgtttgatcaatcatttttcatattttattaccaaataaaaaaagtaaaaaaaaataataattttaaggctgacctaatgaacacgtgtcagtaacttgaaccacacacacacgcaatgattgtattggaaatgtccacgtcagcaaatttggacgatagtcaaatatacatagttctgcttgatcaccaaatcaccgttgagaataatctaataacgatatttcacacaattggtggttttcatctctgcatgtacgaccacagtaagctcggtagagtttcactcaatcagtaccgtttatctcatcgttttataaatttagaacaagactagggcgtatgatcagttggttctttttcacaatagagagagagagagagagagagaagagccagaaggaaatgagggtgagattgttggtggttacacagacccagtgagtagagagaagcgtaattaggggtttcaagctcattgatattctgggatttgacctggaatttctccttctgaccagaaaattttgtgattttcagtgtaattaccctgtgatatcaccgctatgagttttctttcggtgatgagggccgatgcttagagtttgatcagaagggtatccctaattttggttacttgaggttgttacccaatcccatgcccttcccaattttctctttgtgggttttcgagttaagagtatatttctggattttgaattttggagtgcataagaactagttggagtggtctttgttggattttaacgactgtttcgagaatttgatccaagaaaaaaggactgtttacagaagaaatttaagaaaagggacaaaaaaaagttgttcttttgttttttctttgtttggtttgtcattattgagtttcgttgatcattttaagtacgcttcggtacttttgagtccttttctatgtgaatttgaacgaaagaaaattatgaaagtaatcgagtagaattcttttgtatttcagttttgttattgttgattgttctgttgttttcttaaagttgatttctttgttcgttgatctttgatcttaaagggttcctttaaagggactttttttggctttacataattgagatggccatgagagatctcaagtaaattttgtgtactaatttcctctatcttgattatgacctatagctttaatgatttgtttgtggatatgtgaaagaaagaaacagcagtaatcttttagaccaaattagcttaactccgcaatttaacacttctgggattttctttgatatctttaagtttaagggtgtgttagattgaacacaattgcatcttttccctatttgatattttctacaaaatcaagtgatcgtttccttatatagtggtccactgcaattggcagggccacatcgaactcaattgccccaaatctctctggctttcaactctttcccacgattctttggttcaacattttaaagctttatcaacaatcccagattcagaaaatggcagtctctttcacccgtttttcatggtggtgtttgaggggtaaagataagaaagagcctacccctaatggaacttccctaaattcttcatttgaattggggtttggtctgagggaacccgaaacagtccagtacccttctgttaggggaaaaaaggtagcttcttctaatggaaaggtgaaaccaaagtggctgagtagggaagagaggagtgtggagagggagtgcgattttgtgatggtaccatcagacggtgattctttgtcagggctggaatccgatggatctgacttgtctattggctggatggaacctcatggccctggttttcagagtgaagaagaggatgagtctgataatggttttgcagtacttgttccttgctacaatcctggctacagagagcttgtggaggattcagacaatgcgtttttgagtgccatcaagaaccttccaattgagttctctcctggtaagagagaattcttttgaaagtctttcatcttctttacaaagttgcactctattactttattttttttttttcgttttacaatgctttctgtagcatttagattttgtgggtctatttgcttcatcaattgttctgaattgttcttatgtgccttttatgctgcctaactaaaaaggcaacaagtttcattttgggataattcagttggacgtttcttttctttactaagataagagcttctatttcagtcttcattattaattgctgttactgtatgtacccaataaatgtttatgatttatttgaccatattatgttgattgtttgggatcggattttggtgttgtgttcaacatgcgtgtatgtagcttatggctaactaattagcgttttgttataaaccttggacatttctttctggcttccaaatctatgaaaagcatgaacacaggaaagtagaactagaaatgcattgtgaatagtgacaataccgacctaagctactgcttcctttaaaacatgccactctgttactcttctacatttgttttcttgaatctcaagtgaattgcatagactaggtgcatctagcctagatgtttgggtaactgattccccatacaggatctaaataacaatatgatgagagttgttttcccttttaagattggagttttcaatgacaagagatttatgtatattttggctgaatgtgcagattgcaagaactactacatggaacaagtcctctcttcccttcagacctttggtgcttagaaggagctgatctttcttattatggccctttttaagagatcttttagtttactagtactagtaaaagtaaataaatagagagaccattttagaataaggtggtgttcgctcaagctgcagttaactcgagccgaattgctgggaaagtacaactttcagatttggtgataatttttaatccagtggagatgatctttgtttttgctactatcgtcctactcttaagattgattttcagttcatgataaattctaatggtcctctttaagctcagagtaatgtgaaatataatggattctttgtttgtaaatacaaccttctgtgaatattttgatcatgcttatgctttttgcttcctgctgctgtaaataaactcaacttttggaaagttaatcaagggccattctgtttcttgaatttatattttgctttaatagagtttgctcatcttattgctgagatggtatatattttgatcatgtttatgttattctacttatctttggtgtatggagttgaatgagggctaactagattacttgaaacatggttgagaattttcacctaatattgtttcagtctcatcctatgaagatttacatatctgcgttgtgaacattgacaaaaatatccaactaaagtcaaatttttgtttattgtttattgtttttttttttgtttttatcagtagagatctcaaaaccagtgtctacagttcttgaacagggtgaactgtcacaaaagtaagagtctgtttatccatgtatacaatataaataccttgacaaacagcttgatcaaacggccaattatcttctttgtgaacagtgagaattatgtgtagcctaacatagggaggtccataacaaagattccattaatgtcaattttgtttagtgagcctggaagtggaccattgaatagctgagatggtgtcaatgcttgcagtgatggggatgtttcttgcttttatttttataattgagataaatatttctcagtatgatggggaatgatttgatgaagtgttggaaaatggaaaaggaagaagttgggaaatgctcattgggatcttcggttccctatactcatcactattcaaatcattatgtttttggatacatatttttggacactaccaacatatttaatttttttcgttttttttttttttttttaatatatacaaatccatattacaacttgcgctgcaatctaaattgcaataaaaaattatataaaaacctctattgcaactagcgctgcaaccactttaaaaacacaaacagtaaatttgaaaaaaagttaaaaaaaaaaatagtatataaggtaattttttttttttggttgagatgcaaaatgaccataaatttgaaaattaagttagcaaatgtccccttttaaacaaattaagaaaataaccatatataataaattagctaataaaaattataaaaatatatttatcacatatattttttaaatatatataataataaaattaa

SEQ ID NO: 14782 - DNA, 6125 bp, Cannabis sativa
tgactgttttatttaaaataagtggtattttctctgtacagctacaagccacattctcatatatgaataaagaatgttctaatatttaatataaattatgcaataataaatattaacaatttaacattcatagatacatcaaatgtttaatttttttatttaatcatttataggtttttcaggacataaaccctaatagttagttagtgctaactatcatgttagttactctttcaattagtattgatagctcttagctattgatgctaacactctgttagttggttagcttttttttttctttttgaaagaactcgagttcattgattacgaaagatagttgagaattataaggggaattctctccccttgaaacgagccagcttgttggttagcaactctaacacttttagctaatctatccgcaaaagagcttaataaagaagaacttacaaactctaaattggctaactatgtctaagataaatatagacaaactaagggtcttccaatccgggggcactaaagtttaggtaaaggatgaattacctgccaacaatccgggaggatatgaatttccttccaattgttctcaatggcccaagaaagagctaaatggatcgcacataattctggttccactgcggagtaaataattgaaagctaagaattgaaagcccaagtcccatttgttcgattaatcaagacaacaaccaaaccaactgtgcctttgtgccaggaagcatctgtgcgtagaacatgatcaaccaacaactgtggcctcaagatccacttccatctctgaaaatttgttaagcgctccaggattgaaggcacttgtatccacacagttattactaaaaataggctacttactttagttcgagccatgtcgagattaatagggatacttttcaaaacagaggtcatttctttgagatcaaatttgatctaaaataacataggtaaaaatcttcttcctattaaaattagtgaacaccaagacaacattttccataaggtgaatcatattgtcctcaaggatgttcccaatctttacagggaaaagacttgagaaccacaaagctttagcaaaattacaatcttgaaagaaatgtaggctgctttcaactgcagaaacacatagtgagcaaaccttatattctagaaagtgcagcctttcctttgttgggaaggcatcagtgaggaatccccacactaggatctgaatttcggagcgtaagtttgattgccacaaccatttccaaacttctttttgtgattcaaatctgaaactttgatcaacacaataggcactttttacagaaaaaattccgtcatgtttatgcttccaaacaagcatctctttgtgaggagcaggtaatctcgagatccctacaatgcgattgtccaaaacttctccaaagatctgtaacaccgcttctttattccaacagttaccaagagataaatctgctagagttctggcagtatatctcctgcttttgaggttgtccataaatctgctagcttgcttataacaatgtatataagtgtaatagtttccctttattaatcaataagataattcttttgtctcaatatctttctctctttcatgctcatttttctctcctttcattgttcttcttttcgtagttcttgtttgcaagaatgtttctctaagactcctaattttaatcttttctccattcaattttaaggtgagttggtattagaatgaacgtaaaatatatctaatatataagtatcaagtacaataaggagaattttaactaattaggtaatcaaacaataggaaagtaattaatttacaataaaaagtgtctgaaaatgatatatttatagctttactatttaggcaaactctacatccttagtacaaaaaatacatccaaagatagatagaaaggatcaagaatagacaaatctaaagatatgagataagaaaaacatatcagtataaattttccactcttatgtttctgaatctgcttctgggacatcagataatccatccagttcaacaaaacaaggattaagaaacttagcaacaaaagcccacatcttataaacatcttcaaagttggtcaaaaatcctagtgatgcagtaacaacctcaactcgaaagaacatacctttcccatcttgacgcccattagccattggtttgcacaaagatgtatcttgaaggtcacacactccattgtgctgtttcgggccatctacaatccgtacatggctaagaatgccaacaccaagagatatattgtccttttcagccaacttctgtacaacttccgggtgaaatagccctctcccgttgctgtaccttacattgaaagcaactgatgcacccctttcgtatttgatcttaggtccataaatttgcacaagaggcactgtggcgccttcatccaaaccaggtaaccggagttgaagtaaagaggttacaagccaattgataaggtaccgaagtctaagggtagtcttgttcagacccaacaaattgatgtgatcaagatggcgacagatgatctcgggctccctccttccccattcttgctcttcaccatattcaccatcactcatcgactcgtaatcaccaaggttggcgaaagatgcttcaccaggctccataggatgtgccaaattaattcctttatggttatcttccatactaaaagatatcctgctacccatgcttgtgtgttgatcgttctcttccacaccgaaaaatcttccacctgaaaatctatttgtttgcctcctccccaacaatctgaactcaccctctgtctctctccttatagcactcccaccttttgattcttggcaaatttcagaggttgaagaagcgccaagactactttgctgattagaagactggttctttaccctgaatccatcagaacgaacgggtgttgtgtgttgcccgactttcgattcttcttcaatctccccaacccgagatgcagtctcagtttctacaaactgttcttcttcaggaatccccttaacacggtccacttcctgcgacactgataaaacagctgcatcgaaggacaaaacaggatcttcatgctgccggtttactctcctgtcatcatacaatgggcttttaaacatttttgttgttgctttcggagagaagcccttaacttttctcctgctagaagaaaaccatgatggtggcaaaggtgacccccctgatttctgtttcatcagctggccagaatgatcagacccgaatggactctgacccaaatcaatccagaaagaattatcggatgactcgtcctcactgaaaatcggactcttcataacctcaccaactgaaatgttatcagcttcctcaaaaatggtactagccccatccctgtctgaactgttatcctgatccatgtcggtctcaaagacatccctgacctggttagaagtgaagacacccgaaaaggcaggcatatgagatcccccttgtgcttcagccaacaactcttcatccccatcagctgtatcattttctgttccagctatagcatcaagaccatccatggaatcactaagatactgaggaaaaactggtagaatcctcaccattccagacccagtacgcccaccttgactttgcaaatttcccattacagatttcttaatcaagaggcaaccaaaaccagttgggtcagctccaaataccctgtaaaatgatgttataataaaatctggcctaaagagagacagtccaagagaatccatgtccttgggacccaatgatccagcatcaagcaacacatgccaattgttctgctgagcaagtgccatccactggtacgagtacttggccccggtcactctagactggacagggaatacgaagagtccagtagcagaatccttcttccttcttctcttgtttgttatctgctttctcagctccctagagcagagtttcagggtaggccatttgaaccaagcactgtgaaccttagcacctttttctttggcactctgagccatccaattaacagactggctgtcgtgatcaaacatggttaacaaattcttatttgtctgaaaagggtaagaatcagcaagcaatttaaaggctgatcctctactaacagtgaaaacaaggccatattcgttctcagggatattcaagtaatccataatcctactcttaacatcatattcaacagtacctttctcagcaccaccatatagagcatggttactcaaatttgcagttatctcagataaagtaaaagctgatgactcccaatactgttgagtctgtaggtaagaaaatagcccaaatccgcagtaatcaagacataccttagcaaaagattcgacaagatggccatactcatctgatcttaggtaatcaatcttctcagaagattgaaactttgggtacattgtgaggaatttggaaaaggcatgatgaaggtcaggaattgagtcttgagaggaaaagattctgtcagctgcaagagcagtagcacgaaggaactccttctgggcatggagtctagcaagagacctggacctcccaaagctgttgtcttgatttggtgtctccgaatcgacgatgtcttgggatttgaccagagacccatcttcagatgcttcctcaagtgcctccctcagcttgttctcttgcaattgcctgagaattgaaggcttacgcttggcgtcccctgtcaaaccagaaccggctctcctccttgtcttcttcttctccattattagagaagcacagtgagatataggcttccataatgaaagatgcatgaatcccaatttcccacttgatttttttctttctttaatctcaaccagttctgactgatagcaaaaggcaaagtacgatttcaaactggagaagctaaaacattcctcccaagtaaagcagaagggaaaatgaaagaaagcaaaaggagtttcttaacaatcaaacttcaaagttcaaacacttgaatttgaaaatcgaatccagagagctttagagatttagtcaccgcagcaaaactttagctgagctgcatttactttactacctaaaaaaaaaaagagaaagagagaaacaagattcttccattaaaacttttgtgggatcaagagtctcggtcttaaagataagtggggagagaaaaaggaaaaggaaaaattaaagaacataggcaaagcaaaggaaagcacgaacctttaaatgtgatcaaacagacagagaagaaaaatcccaactttagcattctccaatctccattatgattgtggcttcaattcgaatttaacagcaacaacaacaacccttttgaaaattcattaaaataaacaaaacccatgtttcaaccccaccaaaaatatacttccaaagacaacataactaaaataattcccccaaaacaggaatatatcatgtactcagcatttgcattttacccaaagacaaaaaaacaaaaagctaccattaacagttcagaaaactacagggaagaacaaaatcatagggatataaatatataaaaactcacgagagaggaaacagcaaaaaatcagctccaaccactatactataatatgagttgagtatacaccaccaaccactctttttttgcctatgttgtttctctctctctctctctgaggctgaggctgagctaatagtagtagaagaagtagtaatgatataggggtataataaaggcaaatccttcagcatttactatggcagtcaatacaaacatgtctgcattaaatgcttctgttttctctcacttcacaccattattacacacacaccaccaccccttcttcttttctctactcttctttcttttccttttagtcccaaaattctcccttttttccctcaaaggcccccacacagagccccgcttcttttgtaaattcaattcaaataaaaccattaattaaaataaaaaaaattagagcagaagacaaattaatatatggttctttattttcttgccattttcttctatactttaaaatttgatgatgcaaaattgtttttgacaaaaaaaaaaaaaagtttgggcttgggcttgggctgctttgacttacccatagcctat

SEQ ID NO: 14783 - DNA, 4651 bp, Cannabis sativa
actacaatacataaagaaaaaaaattattatgtataacggtcggtttattaccaaaaaaaccgactgttcaatgtcgattttaactgttagcaatttttttgatttttggttccgtcaattttggttccaacggtatttggtaagtcgatttgaacagttttttagattttatgctcagtcctatagcaagagaggttatgggttgtcaatcctctgctgagttatggcgtgccttagaagctctctatggtgctcactcaaaaaccaagatggatgagtacagaaccaaaatccaaacacacaagaaggaatctgctaccatggtggaatacctcaaacaaaagaggcagtgggcatatgtcttagctcttcaagtgaaccctatcctgaatcttagttagttgctaacattttatctggtttggatatagaatatctgcctctggttctcctaattgagtccaggcctgctaccacttggtaagaacttcatgacatgctcctaagttgtgacaacaaaatggagagactaactactctctcaggatatttgaaacaacctagtggaccaatttcccccaatactaactatgctaacaaagggaacaaccttggatttggttgtggttcgaatcaccatggaaacaatagaggtggacataatagtggtaacaataacaataacagaggaagaacatgtagaagagaaagaggaggtcgatctaatggtcctaaacccacatgtcaggtgtttggttgatatggccattttgtagcctaatgttataataggtatgatgaaacctatatgggtacagctccagctggttcactaggatctagcagcaaccctctaaacacagtgcctttgttcctgcttttgaaatggttgataatgatctggtttgctgatacagaacctagcaaccacacaaatgctaatgtgaacaatatgcagcaaaagaccaagtacttggataaggaaattttaacagtaggtgatggatctaaacttacaatagctcatattggatctggtttgttgcctataagtaattacaacgctttagtcttgaaagaaatgctacatgtacttgaaattactaaaaacctaattagcatttctaaactaaccaaagacaataatgtcattgttgaattcacatctgcttattgttttgtgaaggacaaggaaacacagaaggtggtgctttagaggaggcttagagatgggactctaccatttttcttcatcaaataactcacatgctcaatgtcacagttgccatgtttcaacctctaaagtttttaaacctgttctactgttttttgttttaagtcagtctaatgtaaaacaatcttctatttagaagcctttaaattcaatcaaggatagatggcataggaagttaggccatccatccaatcgtgtgttgcatcttgtgttaaattctatcaatgaaaagtcttttaaacatgagcaggaaattttttgtaaagcatgtcaaatgagaaaatcccatagtttaccttactccttgaattcaaatcgtgccaaagttcctctagatatcattcacacagacatttcgggacctcacccattatgtctaacaccaactatagattttacatccattttattgatgatcacaacagatatacctggatatatcatcttaaaaacaagggtgaggcattgcaagcttttgttcagtttcaaacccttgttgaaaatcaatttgataggaaaattaagcaacttaaaactgactggggaggtaaatataaggcttttagtgatttggttgttgaaaaagggattgatttccaacattcttgccctcatacttcagctcaaaatggtagagttgagagaaacataggcatattgtagagatgggtctaaccctccttgctcaagcccgtattcctcaaaaatattggtgggattccttccaaacatttgtgtatttgattaataggcatccaacaccagtgttaggaaatatctcaccatttgagatcttgttaggtaagaaaccagattataagtttcttaaagtctctaggtgtagttgttacccatgcctcagaccataacaaacacacaagttccaataccactccacaaagtgtgtcaatcttggctacaatgacagccacacaggttacaagtgcttgagcagcaaaggtagactttatatttctagaaatgtcatcttcaatgaagatgaatttccttttcaatatggcttccttaacactttccattctggaaaaccagtgcaagtctctgttccctcttgatctgggttgttacctaatgtcttttctacacaaacaaacacctctcctatctctcctaaccattctgcgacaacttcatcaccatctctctctacaacaactctttaagctccatctttagctgattctgctcttgaatcacatgctgattctgtcccatatgtgacctcagattcattcacctgttccctttaatttagatgatgacattgttgatcagtcacctattgatactcacactattattgatcatgagatttttgtcccaagacctcttgttcctactcaccccatgatcaccagggaaaagcaaatgtcttcgaacctaaagcttaccttggtgcagcatctaagtgcccactcattcttggagaaccaatttctgtctcagaagctcttcttcacccatgatggacaacttccatgaatgatgaaaatcatgctcttgttcaaaatagaacctggatccttatccctcgcacacctgaaatgaatgtcatatgtaacaagtgggtctttaaagagaaaagaaatgtagatggttcttttcaaaagtttaaggcacgctttgttgcaaaggggtttaattagaaacctagattagactatggtgagacatacaaccctgttgtgaaagcatcaacaatgagaatttttctcacaatagcagtgtttaaaggatgggaatttcatcagttagatgttaacaatgcattcttgaaaggtcaactagaggagaaattgtttatgcagcaaccagagggattcattgacccaagtaaaccaacacatgtgtgtcaaattctcaagtctctatatggcctcaaacaagcaccacgtgcttggtttgagaagttgaaacacacacttatcatatggaaatttgtcaattcaagagtagattcctcattattttgcaaccagacaagtcaagatataattctggtattgatttatgtcgatgatataatcattattggaaacaattcaaccaagttaaaataatttgctccaaaattaaattaggagtttgctcttaaagacctaggtactttacagtacttcctcagcatagaaagatgagataggaatctacataagtcaaaccaaaaatgttcgtgattttcttgaaagaacaagtatgcaacacttgaaaccatgttcaactcctatgactgttgagaaaacactctctatttctgatggagaactgttagaaaatctagcagagtatagaagtctcattgtggagccctttagtacctcactctcacacaagaccagacttaagctttgttgttaataagctaagccaatttctccaagcccctacatcaacacattggaatgcagccaaacgcatactaaggtatcttaaaggaactctgtttcacgggctgcatatcaaggtcagtgacaggcttgacttaaggggattctctgatgcagattgggcaagttgcctaatgagagaaggtcaacagcagggtactgtgtctatctaggtgataccatgatatcttggtcatctaagaagcaagttgtagtgtctagatcaagcacagaatcagaatatagagcacttgctcaagttgctgctgagatgacttggattcagtccctactacacgagatcaattttcctctggctgcaacaccaatcacttggtgtgacaacttgggagctagtgctttggcgtctaattcggtttaccatactagaacaaaacacattgagcttgttgtgcattttgttagagataaaatactcaacaaataattggaagttcggtatgtcccctcacatgatcaagtggctgattgtttaaccaaaagtctcaatagtacccattttcaattccttactgacaaactaggtgtggtttaatcctcacttagtttgagggaatgtgttaagaattgaaatggttactagtgacttgttacctgtccaacgcagcagccaagtggtagccctgtcactcgtccctctcaatacgtggaattcgaagaggcacctgacagcttatgattgaacaattgtatagtagagagaatcttttcctattattattttagggaatatttcctttattgttatgtcttgtattctgtgtaatgatatgtcccttttctagaatgatcttgtattggcatatatatattcagtaacaacaatttgagctctatttatccatttctctattttgtaaaagttttactctatatcaaagaagtttcctattgttaaggcttttctattataaaaaaattagataattgcataaactactaatttttgtaaatttttgatatttttacatttaaagtttttttttt

SEQ ID NO: 14784 - DNA, 11559 bp, Cannabis sativa
attaatatggcctggaccctcacatttttatttttgggcacattctcaaaagacctcgtgctaataaagtaagtagaacacttatacacaagataactcttgcatattctttctaatgtgagagacttgggttaaaagttgtcattttaaattagtgaactgtataattaataaggtttacttttacagcaaattagagtgaaattacagtattcctacaacaaattagatcaggaaccagtttccaatcctcgtcatcgagaggcaaggtcgggaacttaaggtgtcaaatgaactaggcagcaaattagatcccgacgagcttatagtatgcatacaatccaatccaaaaacgccgaggaattgatcaataacgttaagctacaaaaggatatgcataagtttccatgacaagagtaaatagtaatgaagagcagcaggcactatactcgcaatatcaaatggaagcccaccaaaaatcatccaaccaaaagtaccaatggtaaggatgagtttcattttggtacaaattataaaataacctttaccaaatgacagcaaaattggtccacatacaattcctatttatttatatattggaaaaggaaaacatcaccttctgttcgtacatgttttatcactgtcttgaaaacaaatcaagaagattccagagacgcgagtgaagatttggttgtacaaattcggaacttaggttggagccccaatgagtatttagttttgtgcatatagatgagtactcacacactggaccaccatacatgcgtcggcaccgccgatcgaggtggcaggcgagtgtggtgtcactttattttttagaaaaaatgtatttattaaattattattatttaatacatcagaaccaatagaagaaatagagtgacataatccgcgattcaacctagatttgacgagactgatagtttgcttgtacaattttagatagtgtcgcgaacgtcttaaatagagcgatataatctgcgacttaacacaaattttaaaattcattgtgttctttatgttttattgcacatgttttctgatttaaacattactgcatagctctgcatttgttatagttggttttcattgatcttatttgttctacatttgttcttgctgaggtgttgttttcacaacaagatattattgccaaaaattaaacttaaatattttatttacaactaaaaattaaacataagtatttattctgcaaattatgtttctttgaaattaaaaaatgagattgattcattgattgaagattcgtattggccacatcttgggatgaagagaggacaaaaggatccctatacatattaagaccattcaattaaaaataaaggtagtaataataataataataataataataaaaaggtaattaacttcagcagcattaatttttttttcttctttaaagtattttctgtcacttagcttattccctcagtgaggatacagtcaaaaggtggaaaatccataaccattaaaccatataatatagactaattaattaatgcgataaggtcttgataaaataaatggtccactatgagtagctaactagctatagatatacttttgtaatggtcaaaggagccaaagaagcaacacctactttctatattggattttgcccttgtacttaattaccataaatctttaaatatgtaatttaaactcatttttccaaattccaaatggccgtgtaactagtttataatcttttagaactaccttgcatgagctcttattattactgctcaaaaaaatggagttttggagcttctctttccttctactttgtatgtttcggttagtgttttcacaatcaacaactgaccccaatgaaggttattaataattatctcttaatctccaatattaccaattcaatttaaatttgttgtcttattagttagtttcactttcagttgaaagaatctaattattttcatgatcttaaaaatctcagtggctgcacttaaaaagatgatagattactggaaattaggaaggtatttgaatctttcaactgacccttgcaacccaaattcgaaatgggcacctgagactgcaaaccctcgtgtagcttgtgattgcttgagtagcacctgtcatataacccacctgtcagtttatcaattaattaatataacatttttcttctaataaatggaaattctaatggttttgagcttaacccttttggtttgtacaggaagatatatgctttagatatttatggtgaaataccaaaagagctttttcagcttaagaaactaatggacttgtaagaatcaaattcttggatttgcttaccttgttttcattgatatacttgtaaatatttatgtaaaaatgtttaattcatgttccaggaatcttgctcagaatgttctgagtggctctatccctgctgaaattggacaattatcagaaatgcagtacctgtaatttcttagcaattatacactttttctttgtttaatactaaaatcaggagcattgttattaggcacctaaagcctttaggtgtacaacaccaacaccatactcttataaatggttagcgatttttatattgtttatttaatcaaaatgtataggatccgatagtgaattgcacaaacagcggtatgccacctcttgtggtgttcagcaccttaaggtctcccttggtatttctctaaaaccagacattcttattcttaaatttgtgattaagcaggagccttggcataaacaatctgacagggcaggtgcccccggagctaggcaatttaaccaagatggtttctctgtaagcccatgcctgcaatgttttcagatgcagtttctatgcctctaatttttcacttctttttcaaagtttggaactttgttgatgttctttttatgcaacagaagttttagttcaaatggttttgtgggagaattacctacacaacttggaaaattgacctccctagagcagttgtaagttgtaattattgaaatagtgtggtctctctctgtttctgaatttgcctttatttatttatttatttttcataattcaggtacattgatagcagtggagttacaggaccaattccacaagaatttgcaaacttaaaatcccttagaattctgtactcatctgactgactttttcttatacacatctctatgtgtgtcatactcataggtgaattcttttcctgtttcagttgggcatctgataatctattcaccggaaaactcccacaattcttggggactctcactgaattcatagacctgtaatttttatcactatttccttttaacttttatgaattattttaagattatacttttcttaactagtactgctcatcttctatcagacgaatcgaaggaacatctctcgaaggcccgattcctagcagttttagcgctctaactaaacttgagaccctgtaaaatcttctatttatgattcattatctttgttgcattttttcgtgtttatgttgtaagtttgaaatttcttactctcttattacatgtgctactttgtgtaggagaattggtgatctaagccttgaagattcttctcttaatttcttggaaaatcaaactagtttgtccattctgtatgctgcttcctatctaacctcaaaaagaacaataacttgacttgactctattgtgagatttcaatttagttgatattcttattattgatcagcttttgacaattgcaggactttgagaaattgtcgattgtctggcgaaattccacaacgaattggtaggctggtagagttgcagcaactgtaagtgggcttgttatcttaaattttatgtcatctaaaaaggatattttctgtaattgagtgttccatttcattaatttgttctattcattcccatagggacttaagctttaacaagttgactggctcaataccaaactcattcaaagacttaacaatgttaacttatctgtgagtagattttctcattctcatatggttacttttatcatgattgatcatggttatctgaagacatgaattcattcattttattcattatagatatcttggaaacaacaacatgaggggagagttacctgaaaatatcattactccaaagcttttagcattgtaagaaacaccttcagttacatcttttaatcattctgcagaattccttagctttaatatgaatatttctcatgacaacaacagagatgtttctttcaacaatataactggaaatgttcctccaaactatgctaaaacaggattttcaatgtaagttctaaaaacttttgctactacatgagacggttatagtaaccgaggcagcggtttccttgaactaaccattttttttttctttctcaattcaggaatgtcctcggaacctcaatcaatgcaaacactttacttgacaggtgaaaataaaaaccttacaatatctctatcattttacagctctacaagatagaacttactttaatccctagttttcctttctctagttttaatgccctttatgattcttcaatctaaaaagaaagaaaataacaaggcttatatatagtatttggaatttacgtatctgattctaatcatttcaatggtcatggagataggaaatcacttgaccttctgctctgcctccaacaagagagtaaatgtgctaatcaagcaccaacatgtaagtaaaaagtttttaaggcttattgtttatcagttttatgagagtgattgttgttgcttttgtgcatacaaatatatatatacataagtatgcatcaagttttcatggggacaccgttgcatcattgttaatactatagcatagttttttgcctcaaaaattaagttttcataagagcatcggtttttgcaccatgagaccattgcaagagtattgcaatgctctaaaaaaattaaattttttctgacactgttgtagaagcatcacgtttggcctcaaaaatcaagttttcatgggaaccatcacagttttgtttgaaattctgcaaaatttcagctctaaaaagaaacgcgaacaaaatcaataaaatgttgtacccaagtgttgaaatccataaactaataaaacattaatatgataggtgtaagttttggattggattggattttcttaggtgtaaaatgtctaaagtttaattccataagatttgtgacttaaaaaacaactttatttgtgattatcaccagaacaaaatttctctttgtagcatcattctctgttaaaagtggtgggacagaagtagtatctgcatcaggtaccaagtatgcagctgattctgaacaactaggagcagcatcattgtacacaaattctaagctcaactgggcagtaagcaataccgggaacttcttgttcagtccaaaagggcctcaatatatagcaagtacaaattcccaaatcacaaaaactttggactctgaactgtacaaaacagctagaatttcaccaaactcgctaagatacttcggctttggtttggtgaacggggagtatgtagttgagcttcactttgccgagatagcgatgggggacagtcgaacttggaaagcccttggaaggcgcatatttgatgtttacattcaggtaaatggataaacttaacctcataaatcatatcatcaacttttattgacctgcctttgtccagactctgccctaaaacaactcaattaattacaaagttcgttgttttgattgatcattaattagggtgacaaagtagtaaaagacttgaatattaagaaagaagccgggggatcgaaaagtgcattggtgaaaacattcaaagtcaatgtgacaaactcagtcatggatatccacttcttttgggctgggaaaggaacttgttgcatcccttttcaaggcacatatggacctttggtgtcggccattaatgtctaccaaggttatttttctaactttgatcttcttatatcttctgcataggcatgcatagcatggcatagtaaatctcacgttcacatcccatacatatttgtgtgtttattgtagcttcaggtggaattggttcagcttcgaaaaggaacaagaagaaggttggaaaagtagtagggatagcactaggatgtgtggcgggcatggctattatcttgtcaatgttctatctttggtggacaaagcgtgcattacaacatacactagttgaaacggactcacccaaaaaatgattgaattgaactcatcaaagaaaattaagaatggtgtcctattttatcgtatgtatatgtatatcatgctataagctttgttcaatgttaatattaataatgattaataaagtgaaggggataatctttcaagcccttgtctctaaaatgtaatgtcatttacatatatggtttcaatttggattgaatgtccatgtcttgaatagacgttattttgtttggcactcacttttgtcaccaaacccccaacctatttgttgcttatttttctcggtagagttattttttttatatatataataaaaaaaatgcagtttaagaggataagaaattagatgagtttttcaataccataatttaataagatgacctttaaaacaaaagaggagaagaatatattagcgagagtgcgatcacggtgggactcgaacccacaatctcccgctccggaggcgagcgccttatccattaggccacgcgatcgaatactaatatgattaatatacagatataattacttctaaggctagttttccagactagttgaatatttgttttttaacattgataaggatatgtactgaaactttttgggggtacgagagagctattggaagtcagcccaatgttaactacaactaggaatgtcaattgggtcgggtcgggtcgggccgagttttaacttgtgacactatcgcttgtgaacccacataagtttaccgtccaagattttaattttgcatcctctaatcccatcttctttaaagtttccttgtaaagaatattgacggaactcatgttatctacgagaaccttttttaccctcttattagcgagttgtattgttatcactagaagatttgtatgagggtatcgtacgtgtgatgtgtcttcatcagtaaagacaataggcggttcattagattttgctctctttaaaagttttggagaaaatgttgatgtctcgtttttcacttcattaatgtacctcttttgtgcgctattgttgtttcctgtgaggtgtggccctccaaaaataacgaggatattctcgccctctataagaggaggttgtaaccgattttatctttcaattgatggaattcttcggttgtatgcccaaaatctctatggaaacagcaatatttgttagtatctcgcttgtttctcgcatgtctcattggatctagtctgcgaaatgcaacctgattttgttggcgaggtagatattttcgtgagtctcattcaactcagtgtatactgagtaaatagaaaaatactttgcatgcttcttttgtttctttttgtccttggaggatccttttggtatttgggccaataggatttggattttctaccttagtggtcacggtgctcgttgttgcggtacttgtgctgggtttatctcccaagccaaattttaatagcttaattttatttctcgcctcttctttttgcacaaaaaattgtgctctttcattgatctcgttgatgtttctaacaagatgaccttgcaaatcatcccataattctaccctacagttgacaagtcaattgtgattctcgcttgaagggctgttagttgaatgctatcattcaaattcctaactttgcagctgtactgaaacgacttaagtatgccttaagggattctcctggttgtttcttgacattggttaacgaagatgcttctggtcactgatctcttgtagcttggaattgctttttgaaatcctttgacaattgttcctaggaagttatggaatgattggtgaatttgtcaaactaactacttgcagctcttgttaatgaagttagaaataatatgcatcacaagttgtttgaaacattacttgctcgcattatggtattgaagttgttcaggtgggcaacaggatcagttgtaccatcatattgtgcgacatgagagttttcaatccttgagaaaactatgaattcaaaatatcaggatggaatagttatgtctcttcgtttgagtcatatcccggtagtttcccatattctccatcctagtacttcttgaacttatcttctaattgtattacccgcaattgtactggatccacaagttgttggtcatcattttgatttagttgattacgtaaatctggtgcattacagtttaaatgctcacataggtcagactgcctttagtttaaccgctcgtggagattaggatcgcgacatctttggtcataattactcatggatctagtccttgagtaacttttagattgataacaatgggagtttctcatactttcttgatcactataataacgtcatgatccaccttcgtctcgtgtttgcctatgagctctggttgtcctactgtgcctgcggatccttgatcttgatccacctagacatgtgattgaaccagtgtcatgtgactcttcttgcattagccttcttctgaagagatttgacacacgacccctactcaagtacgtgtgtgtactttctatgtcgttgtgagtaggcctttgtggatgccttggaggtcgacctgttccaagttgatatcgagcatttcttccatcatgttgtggaattttctggtttcctggtttcctgattgcgtcttcctagcattttcattcatccgagatgattccgatatatcaggttgttcattcccttgctatgcgaatccatgggaagttcctggaatatcatgtcgatgctcttgatttcgtgtatttccagtatttggtggattttctctatccattgggatatcccttgaattcccaggttgttcgtcctaaatatttatggggttccctgaatcttttcttgtctcctgatcctagaacctcggggccttccccatggtcgccttgcagatggatcaggttaagtttgaagagtcgctccctatgtagccctagttgccgctgcttcccattctagctcgacatacctccaatttgattgagctaggcattgtcgaagttgcctattttctagttccacaagtgggacatatctggttagatcataagcgtctttgctttgctcttctggtggaatctgttcactagttgagttgaaatctccatcgttccttctagaatggggagtttcagttgcattggttctttgtgatccctgaggtttctttccagggtgacgggttgtctcctctggctaattttcttcattatgctgagtatcatctgccataaatacagattttgagttgtgtctctaaggaggatatttttgagttttataaaggttctcaatgaaaataccaaactgttaacgcaaatttttgttaacaaaaaatattagcctttttataataaatgaactacataattaattatagcaataaataagcaacagaaagtttttaacatggttttgaagttaattcttcatagtccacgagtccatcttattagaaaaagtatttggaatacagaatacaacaatatcagggataattatatcttgcttttctctctctagattttttcatcccaattaccctgggttctatccctaattatagttgtgtagggtaattattcccttgggatctattcattcataactgctcatgaaacgtggatattccccacgtttcactattgtgcatatgggataatcttaaataattgttcaactgccattttgtctttatccatagacagttatgctgactatatcgggtgactctcgctaagtatacatcatccttctttatcatttttgtaggaaaaatgctaagaataaagatacaacacttatcgcagttctctttttgctatttcgaaaggtattagcgaggtaattatttcaacatataaagatcgagatggacgaatattgttgttattctttgaatatactcacgggtatgtgagtcaattaggtgcaagctctttactcacgagcatgtgggtcaattagctgcaagcactttactcacgagcatgtgagttaatgaactgcaagctcttattcacgagtatgtgggtcaatgagttgcaagctctttgtttactcatcttgaacaacattaattatgtattatgttcttcccgagatggacttgttgtctcaccaatcttactcgttaatagttattattcttatctcgcttctacctatgtgggagagagtttaaatatttctttcaatcgtaattcctgaggtgagttatttaatgtacatttaataatgcaattctcaagctgattcatattccttctctggtacacgtgtcaacttctggttattagccgaaattaggttataataatgctgtacacccaaatgttcttatatgtattaggttggggtttatgttgtagcacatttcataaggtgtttttaagcctataactctatttaggcttctatttatagggtaggttacaatttagaggttattcttatttataactgacccaaattagaacttgattttttaggaaaatttgcagtaaaagtccctaaaaagtttactatgatgcagattagtctccaacctcaaaaaataacagcaatagtcctcaagattacattttttgtaagtccgttcgtcctaaatttgacggatccattaagttattcaaaattgtcacgtattgagctattattggtccaaataataattttaaaaataatttaaaattaaaaaaaaattaaaaatacattttttttctttttttttctccttcctcctctacctccagccatacccgatccctcttcttcacttccttttttcctcaagctgaatcctcccatagccatggaagaagtgtgggaaaacagatctttaagccccgaccccaactctaaagccccaaatctctctatatctcgggactcgatgttttttcactgccgaagaagtctcgccgtaaaaaatggaggccaccacgggcctcgacgtcgttctctggaatcaaggacaacatggcctttgacgagtttcaaaccacgagctccgaggttcccgtagctcccttcgtcgttcagttgtccttaaaagctcactagagtaaaaattttgggtctgatctagtcgtatctgagatccattgagtaaaatgactttcaaaaacgtattttattcataaagatcttttatatctcgttgatagtttttgcaagcctagtcgtcgacgatagacagccaccgtgcgcagtggaaatccatttagcttggggaccagagtgtggctggagatggggagtctaatttcattcaattttactgtttcagtgattgtttatgtactaaaccatgctctccagactttgatat

SEQ ID NO: 14785 - DNA, 6977 bp, Cannabis sativa
tccaaaaatccatactttattctccaccgagtgtacaacttacttcgattggcaaactgtaggatttatgcatagtttctacctgagcggccagcctggaaaaattacacgacttcttagctgtactaatgaagatttgcagaaatatcagggcattgatctagcacccactcatatagtcccttccatgagccggcatccattaacgggcgattggtaattctattctctttaccttgaggtgttactcaagcatattataagatatcccatcagaatctgatggggtgaaactagaccaaatcaagactttactgaatagacttttaagtgcatggttattccaatatctcattctttacttttttctatttgacctcaaagtaatctaaattaaagtctcatctgcaaagtctgttcaatccagctagataaagatgttcactttactatttgaccttgtttactgccaatttaaatgtagggaaggcaaaaaagaacatgtttttggtcatcttaagttgaatgtgttttatactatttctcaagttcattacaataaatagatttaatcttgtgttatatcatctgttacttgtgaaactctgccaaatctcttttcaacacaagcaattcattcctttacttttttccatgtcaggtatccagcaattaataaaccagctgctgtacttcactggcttcatcataccgaaatcgatgcagagtatatagtgattcttgatgctgatatgatactcagaggtccaattactccatgggaatttaacgcagcacgcgggcacccagtttcaactccctacgagtaagccaaaaaataaaatgttgcttccatttccatactgtctgtttaggagctcaaattgaactttgctcatcgctctaatttatgcattgtagatatctcattggctgtgacaatgagcttgcacaactccatactagccatcccgatgcctgtgacaaggttgggggtgtaatcatcatgcatatagatgacctccgaagattcgctttactgtggttgcataaaaccgaagaagtacgtgctgacagaagtcattatggaacgaatttcactggcgatatatataattctgggtggataagtgagatgtatggctactcatttggagcagcagaggtattaatctatgtagaagttttatttgcgtttttttactagcatttttcttgatacaattctcatttacttatttattgtctgcagttgggtttaaagcaccaaattaataataagatcatgatatacccgggatatgttcccgaacccggtgtccattatagagttttccattatggattggaatttcatgttggtaattggagctttgacaaggcaaactggagggaaactgatgtggtcaacaaatgctgggccaagtttccagatcctcccgaccctaaatcgcttgaaaagattgacgaaggattatatcagagggatttgctaagcatagaatgtattaagactatcaacgatgcattgcgcttgcaccacgaacgaagaaaatgccaggaccccaatttaataatgtcccccccgaaattggaaactcccaaagaaattgcatattcaaggaaatttggtcatgttgatgaaacttatactgtgaaaaacaacaacaacaacaacaattcagaagcaaatcattctcggaaattgtcagagccaaccgagaatgatgatagcaggtttagctcaatgcggttctggataattgttctgtgggcattttctggcttgggttttgtggctgttatattgttcttgtgctcgattcgcaaagggaaaggcacacgaacaaaacaccatagaagcaagagaagggcaccctattcaggttcaatggattgatcggtcaagatcggtgtatccatccacaattctgatgctgcagctgcataatgttcatccaaggagcgcgaaaattgacaaacttcatggaaagaaaagattatgctctgccaagtatatacttggaagtatttcagagccaaatacagagtttcaatacaaagagttaaaggccaattctttgataacattgtgatctttcttcttgtgaattcactggtaagagtttcataaataaacttccaatcatttttttgtgtcttcctaattatactttttgttttagaggcttactttatgtatatctagcagaatttgtcttggacaataatatattaaagatgttgtcgttttatttgcaatggcatgtcgttttagatggcttgtataaggtgagtgagagtgagtgatgtcaactctaaacgacatgtcgtttttgagtgagtagttgtccaatttggtcaagatttggacacaaactgaataccaccacatatgtcacatgattttgttttggaagttaacttgacttgttattaatcattataatcctatttaacacgacaaagcaaaccaaacccaaaataaactcccccaccccacctacaatttattgatttatttattttttaattgagtccaacaaaaatgataagaagtcctctttggatattaatgactagttaaaatgtgatagtcaaattctactttaaatcagttttgtcagtacaagcagtaacttcaagcataatcaaattatacgtgaatagaagttctttaagatattattaaaattctgaaattggataaaagaaaaaaaaagtttgatatatgatcccaaattaaaaatgaaaacaaaatcattgttagaagaatcagacataaatttaaattaataaactaattgcatgcatgctgtccaggaaagttggtatagctaagctattgcaatgaagttgttgataatgggtttctctaagtaatgtgaaagagacaaaatattacattgaaaaatgtcttgtgttcaattttttaggtcagctcccataaaatttgaggttccaatcatacatataattactttaattttatttttgatattagagatgagagattcaaaattaaattttttttattagtaatgagagatttattgacgcggacaatggaagtaaaaaaattgaaggggcatattgtaaaaaaattaaaataaaaaataattttacaaataaaaatataaaccagagagcataatgtaaaaatatgcagagactaaaacataatgtacaaattaatttagtctaaaacactatgtcaaagttaaaacatgttgtaaattaatttacaaaaaaaaaaaaaagtagttgaaaaatacaaaacaaagagcatacataaacataaaagtttttacaaaattaaagtataaatgtagaatatttaaaaaagagactaaattgtgattacttctatagttatatgttgggtctatcagtaattacttctatagtttatagtttcttaatcctcttcaataaaatatataattcaaaaacctcaatgtcactgaaaatagtaaaccaagtttgattcttaacaaaattgttaaacatgaattaccaaaccatctaattcttaagttctacttccacaaaacacacacatttagacttgttaaggtaatgttgcaaccactggttgttcagcttattacatcttcaccctctctacttacttccatacattctaaccaccaacaaacaactttcttgtttcttcttcgatcagttaatcttaattaaggccaaatttgtctctcttaaaacactttctcatctgataaaaaaaataaaaacaaattcaattgcttaacttagtccaccaccttacctttcacatcttaaaagtaggtttattcaacttcaaatacacaataatttagtgagtcctcattcttcaaatacacaataattgttagtacttttacccaagctgtaatattatttatggcaataacaacattttctttcataaaaaaagtgcctttttttaaaaaatttcaaattaacccaaaatttggccgttggaacttgggaagaagcattcaaaatgtggggtccactatacggtgaaatagattgaagttcttccgaaaaacatggttggaggagaccccaccatagataaaaaggtttcataccaaaggctgaaattttcctcataccctttagccactgtttcccacaacatggagttgaggtttctccctttttgctttttttatttttagtttaaaaattcaaattcaaatgatttgagtgtttaattggaagaaagaaagaaaaacaacacagactcacacaaatagatacatacaagtaaagaagaaccaaaagggttgttaaattttggatcttttttgagttttaacagacatgggagaaacaacttgtctcatgcaagttcagccattttcttatgcttctggtccacccaatgaagccaatgaggtaagtttcagtgactaaatcatcaaagacatgatgggttctgttctcatggtttttctttctccctttttgggtaacttttttctgtggtgcaggggaacccaattcatgcatttgggcaatcaatctcttttgggaggtttatgtcagagtccttagcttgggaaaaatggtcaaccttttctaataaccgttatgttgaagaggctgagaggttctctcagccaggctcagtggctcagaagaaagcttttttcgaagctcattacaagaatttagcagctagaaaggcagctgctgcagcagcggccttgcttgaaaaggaaaatgctgcagcatcagcaaactctgctgctcttgataaacatcctcaaccaacccaagattcaaaagtttcaaactttgaagctgttgttgatgaactgggacaacgaaatcttgtggttaatggaaatgggcattgtccaaatgttggaaagatcgaagcttttaacagtagaaaagtggttgaagtttcaagcaatgttgaaaatcaagaagaggaaaaagtgaaagagttgaatgtaacagcaaagatggaaaaatccatatcaaaggtgactgattggtttttttaacagttcaaagttatggtttttattttatattattttattttattcctttttttaaaatttttggcatttcttgcagcctgaacaagaagtttccaagaagaaaataactctttcttcttcaaaatcttcaaccaaatcttcagctttcacaagattatcgaccaaatctgcaacttctactactactgccactccattgaataaaagactagtaatagagcaggctgataagaagagatcatcaactccaaaatcccttcacaaagctataaatttcacacccattagagagcttaatagaataacctcatcagtcattagaaagattgagaattctagaatgggtgccagttcttccaaggcaaataaagatctttccactccattaagaaccccaaacatggtacctctttcttctctgaacttttcccatcaaatactttgtttatcagtttttttctcaagtatgcttaaagtgattcttcttaaactactgcaggtatctaagaatggggttcggcagcagactctaaacactccttgttcatcaaacagaaggttctacatgacaaaattcataatctattccatttatttttccttcttctttgtttaagattaactcatatgtaacaagactgcattttgtgactttacagggctacaacaacaacaccactcaatcccccaaccgcaggaaccaaatcatctggaccaaaatggcggttgctccctacagagtaatctttttttcttttctttatatagatttttaatattgcaaagcatgtgtatctttgacagctttaagaaatacaatcttctggattgtgttagaaagatgaagttgtggacatgtaatttgatttgaagccaaaaactactttaaactttaaagcctcattaaaacatatatcaaaagtaacaagtatgaatcaaagtcaaaacaaacatcttgtattgagttgttcgatttgcttttgtcttttggtttttcctttctttgtccagttgttcaaagtttttcagtggtagcagaaacaaaacaagatctccattttcatccactcctttcagcttgaggactgaagaaagagctgcaaaaagacaggaggcatggctcttttctctgcctttcttttccttgttttacatattattgttaatacagtatggacttaacttattaatgtcatttccttatttaatctgtttcagaagcttgaagaaaaattcaatgcgaatgaggcaaaaaccgagcagctacaaacaaaagtcaaggtatttctttcacatggattgagttttcattatttggttgaaaaagtacagtaaagtgcatataacacagtgccaaaatcaataacatatacgcaggaaaaaccagaaacagcagctgggaatttaaatccaagcctttgcttcaaagccaggccattgcctgatttttataagcaaagaaaacctcaacagaatgagatgaaaaaggtatggctagataagcctatgcactatccccttaaacttcatatattacaaggcttgatatttcctttggtgggaactgtttttacaggttccggttactcgttctcaatcacctaatttgagaagcaagcctactcctaccaaagttgagaagagaacttctcaaactcccaataggccaccagtgaagagcaatggctctaaacagattcagggaaagaatgctcgtagtccaacttgttctctcatttcacggcccacaaggacgactacgataactcatgagaacagatctccaaatattcagcagggcttaattaaagccaacgaatataagctttgaagaatccccggatattatgtatgccaaaagtttctcctgaataatttagacataattcataaattcattccaagttccactttgtaattagtattgagtacataattcttttgttaggactt

SEQ ID NO: 14786 - DNA, 5709 bp, Cannabis sativa
atttcatacaaagttccaacagtagaagatctatcagaatctcttgcagtcttctattgaaccaaagtgagtttttagctacagtagacagttttttattccacacaagatcattcctatgcctccacaatgaccagcacatcaatatcatgcccactaaagaaacttcatcacctgtccaagccttacaaccttcttgaaatcaggccgtgaaagtacctttgtagctatctccgcctgaaccaatgacttccatccaacaaacaatgttgattctgggaaagctttacaaaaagaacacaacaaatccacactaatagtcttattctttagctacagattagttggtaaagagccaacacaagctctccacatcaggtctcaaaccaaatttgcaacttatatgctgatttctcagagtaaaatccattcatttccttactcaccatgatcactcaccatcaatcataagtgaatcaacatgacttttaattatttttttaaaaaatttctaaaaaaatttattaaaatagagtaatgagataggatatgagaacttttttcatagggtaaggtcgttaaataagcgtaccctaactatacccaacccgttcaaacctagtttatgagatttcataattggagatgtttgctatagtttatggtcttctttgaatgaattttttgactatttatcttatctaggtttgaaatattagtattcatcgccgtacagagagttgagtggattatacaactagtaatgatttggagataattgagcttggagtacaatctaatttcaatttattagtctgcttatattaatttgggaatcttataaatatgtcagtgatgtaaagtttcttacttctccagtttcattctgttctccaattcaaaagatttcaggttaaaataaaggagattgcaaaactaaaaaacttaccaattgaataagttgtaattagcactcataaatataagaccaattgtccaatcaaacttagcagctagctaatcttaatcttattctgaaacaagtaaatacacattctaatttaattgtatatgatagaaatagcaaagtgagaccaaattataatcaatacatttaagtctgaagctaaatataactatagtgataggagtgatcttatatccactagtttgtgtgtctcaacaaaatgaagcaactcatgatatccattgaattttaaagccaaaaaaagaaaaaagacgtgtagaataagtatgagcaaatttctgatataaatctcttagaatacgagtacttcatatctactttcttggcttattctaaagatcaacaatggattttccaatattagattaaatgcttctaatagataaagagaacaataatataacatatatggaaactcaaacacagattcaaaaacacaattaatggctcacaggccctctttccccatttgaaagtatcataaaaaccaaagtacctaaaagtaaatacaacagagtctcttgaaatattttccatttttttttaaactaaaactgttctcgtagaattctattgtcctctctaactacaaacaggctacaattcacagaaacataaccaactcaggcctactatatatgttattttgctcatcgtccagaactggataagctgctacaagggcatcttgagctccaatatacaacgagttataaatcttccagtaaacttctctgacctttcgagcaggatgaaagagaccctggagacagtagtttagcacaaccgcagctcccaaggccaccctcatgccttcaatggcttccatgacggcattaatgacgtgaggcgaggtctcgaatatgtttggccacacataattcagcaagtgaaccaaagcgtcctcgcaacccaaaccagccactcccaaagccatgtgcttgacagctgaagctgctgtttgccgatgaaccagatctctgtccatgagagcatcctccagcaatggagtaactgcgtatatgtaatcttttcccatttcgccaatgtactcgaacaggaaagatagcgatttgaggacaccattctgaacgttcagctcaggaacacggtactcgttcatcagagctggcaaaactgtgaaaggagaacaagtttctgcaactatggcgatagctacggtggtgcagacacggttttgacgttcctgaaccttcagattgttcaataaagttgccaggacatcctgtggaccgatggcttttgcaatgtagccaaatgtgttcacagtagctcgccggataccctttttgtgggccttgagcatctcaagaagttcaaaacaaatcctcatccactccctagctgggacaaactctgcaccacggtcagcaattcgacctacaaggtcaatacagttttcttggactttctcgtgcctgttcttcaaaattggagtcaatctaggaagcaaatctttaataggaggtgtcatctttgtcataccaatgacattgacaattgctttcaatgctcccaagattgatccaagaacttcagggtattcttctcccaagtactcgtacagtacaacaccaagatggcccataagttgttcctcttggcactgcttcatgacaacagcaatccttgaaataagatccgcagcttgctgtctcacctttgcactcttgttattcaaacgccacttgatagtaccacaaatctgaggcaaatagggttggactctctgtccaagagaatttaccactgctccaaacccattaagcataacattagcatcatcactggtctgctcttggaaagcataaagaattccatcgattaaaagctcctccaatcgagggtcgatatcagatgcacccagatttgcaactaccttttcaattgtctccataaccattcgtctatatggttcactctcatcttttagatcctcaacaattcgtccgacaatatcagcaacaccaactttgtttgccatctctacagttgtttccactagttgcctataatttctcctatctaatgccattctcctaacccaaaagtttttaaagaactccggaagaatatcatttctgatataatcagcctcaacaccctctgtactcacacactgcttcaccactttcagcactattttcttcatttcttcatcaggtgactggaactctcgaatcaatattaccatcacttccttggtatagtaactggcataaatggcatccatcaaaggaataataaaaccgatggccttcaaaaatgcagccaagaccttaccacgatgtgatctaatacccttccacaagggctttagaacagagtcaaagctctcaataccataaggagcggcagcctcagcaagtgcagcaagtgacaatgcagtaatagtcctcactttttgattctcgtcattgagcccgtgctcaataatttcaacaagagacctcaaatgtggaagaacagcacaaccaatcaagatagcaatctgctgcacaatcttaattccagtatgtcgagcttgccacgatttcttactctgacaaacagctttcaagaaaggtaacagagcaggaataccaagggcagaagcaacaacactaaaagctctagcagttgtatttctaacatattcatcaatgttgtcaatatctggacgcatggcagcaatcatagtagccagtccagctgctttactaaggttggagataatctctctcccttccacacgagcatagtagtcttcatcaatcaacaaaggctcaatgacgacaagaattttgtgcacgtagggtctcaccaattcatccaatttatacagcactctatcaataaccttgaccaaaagatgtctctcttggtcttccaaagtgggttgcataagcaatggcagaatgcggttaaacaatggaccggcaccaaactctcgagctttatcagtaagctgtctcaatgctgtcttcctctgtggaggtgtaccattcttaaccttgagcagaagcttcataattttacgctccttctgttcatcaggagacaattcttcctcatcatcctcattcaacaaagccccaaaatactggtaatcctctggcttcataaatggcaagccacctgcagattcctttggaacatcaaattgctgcccacgattctcttctgggatggaataaagaggagttgccatcggtgttggggtagcaagaagctttctcgcaggtgtcctaataggtacgtatgaagctggggggtccaaaatcttgtatccctcttgtggaaacatagaatcaagctcttcatcggttaagggacggttcctttcctctatatctttctcccatctcaacaagttatactgttctggagtaattgaaccccgcaaattaatagcccctggcgttggcgtagcaagttcagctgctcccaccggggtcacaccgggtgtataagcagctgctggtgtagctccaggtgtggcacttcccattgttgctggtgtctcatcccacctagacctctgcttcttaggagttggcgtggctagccctccaagcttaggggttgaatcccaagacatcccagaaggtgtagcaccaggggtgacagcaccagccggagtggcatctgaatccaccaaccgcccaggcgtgggagtttcatcccaccgattcctcctcccagcaccagcaccaggagtcgcatccccaagtctccctggagttggagttgtgtcccaccggtttggtgtcgtatcaggcaaatcccaatcggaagtcttgggcttcttcgcagagccatcatcctgagacaggtcccacctatttctcctcttctggggagcaccagcagccacaggggcagtctcacccctctcagccgctgccttagcggcctcttcttgatccttcttcttctccgaaataagcctaagagtctcctgctccttcttctttaaggccaattccttcatgacatcagcataggtcctcaccgaggggtccggtgtcatctcccccgatgcaaaaggatcatttcgatcaggcgaaatcacctggttcaacctcctctgacgatatgcatcctctcgttgcaaaatcgaattgggtttcttaggccccaaaccagcatcatcgtctcctcccctggggacatcatttatgagcgacttaggagcagtgtaagaagctaacttgcgcacaacctcattgtccatagggtcgttgttctcatcatcgtcggtgacaggaatggatgagacataagcatccctatcatttccaccatagagatccgtatcgaaagtaacagagttaagcgaagcaagctgctgctccatcttcctgcgttcttcctgagtcttcgctatctctgggtctgtggacgccattgtcgccttactagaagatatcaaaagccctaaaaaaatataaaatataaaaaaccctaaaattattaacctaaaagcaaaataaagatttagaaaatgttaagaactgatgagaataccagtcagtcagagtggagccgtcgacgttggatcttgagaaaggaagaagaagaaaatgaagaagatgaagatgggttttagatacgatagagagacgagagagagtgcgaatggtctgtacatctcatagggtttctctctcttttttttattttttaatttatattataataaaaactaaaatattatt

SEQ ID NO: 14787 - DNA, 8199 bp, Cannabis sativa
aacgttactctttcaaaaccaaacaaaaacccattaacaaattttcaaaacccaaaaaataccaaaaaaaaaaaaaaaaaaattaaacaaaccttccatcttggacacccaaaaaactttctccttggactatcttctgccaaagaagttcgttcaacacattttaaaccacatttacactctgatggtctacattcatacatattcatagatctatctccacttttataagaataagatgaaaaagacattgaaaatttgaaaaaggaaaaacacaggcgtaaagatcgtgaagattccaaccgtgcgtgaagcccaaattttatttacccagattttttttaaaaaaaaaaaaaaaatcacctaagcgtgaagaacactagccgtgcgtgaagaatagagaggaaataggaaaggacagctagggttttgagtgtttataattatctttttataatgattttatttaatttgttgtttatttcatttatggtaaaaaaaaaaaatatttaggttacattaaaatatctacatcaccaagaaaaatatttccatgtggtctttatcgatgtcagattgtactggctgtgttttggacgcgtgtcattccagggtcgttctcatttaaattaccctatccctagtcgttggatcattttgcacagtacactaagatgcatgctctgtatggtagcgtggcgtgggagacaacctctgacatcgtacataagaaaggtccaaactcgaatcattataaaagcacttctttttttgagagagagagagagagaactaattcatttccatcaacaaattaagaaaattgctttaaaaaaacaaaattaagaatctattaagctaacagtccacatagaaaccataatatgtaatatatccccaacaaaccattaacagaatctcaaatcgatacataccctactcatttacaaatatgtatcgattctgttcttaaatttgaaaggggaaaaatggtgtcctgcctatgtactttcctacaattttgaaccatctgacactatttcaccttcaccactttctacagaaggtgaaagtcgcggcttctttgcaggtttctctccaggcgagtctggaatcaccacgccatcctcaatcaactgcacattgtcacacagtccaataccattggttgccacactggagtcttgagacactggcatacccgagtaatcagggaatgaaggaacaggaattccgttttcattgtcgttctgcatggcatcatggtagcaagaaccttcaacggctgcagatgcggctagcaactcacagggagcagaaacaaggccttccggtgtgcattccatgttttcgactggtaccaattttggctcatgacattcttcctctggctttggactcaaacattcagcaacatcacaaattttttttattccttcatctgatgaatcatttgaggcgcgtactgatggttcattggctgagttgatttcctggcattttgcttgtaaagagattcctatgtcatagttatgtacactagtatctttcgatgaataaggaactgcacatgtttgagaagcaactccggtcatatgttcaagtccggtggaatctctagaatgcaagtacataaattgctcaccagtttcagcgtcatcctattatcaagcacacaaacaaatcattaggaatgcaagaattgcaactattcaataactagaaaaaaaaatgttgataaccacttcatcttacacaagagacattagagaaacaacctaaaagccatagatgcattgagaactgattatgggtggacatgtagttcagttcaactggtaagcacaattaaatgtttacgttgtatatatctctcgggcaacaaaaagaaaagttattacctgcatagatggtatagttccattgagattataaaaagaagacttctcattaaaagattggcaatgtcccagtaatgatccggcagaggttccaggttcaaaaagatctctgagaaccaaactagactcattaacacactctgggttcctcatggaagatgctgataaaagagtgatctcaattccttggccagcttgagagcttgttaaactctcttgacgacctagaccaggactgcatctagctgagataaattccacaccttcattttcattgatttcatgaaatttcgagggttgaacctcatcactgcttgttgatgaagaaacatctcgagaacggttttcaaggagttcaaaaatcaatttctggattagagtacgctttagggaagcctcagagggtggaaaccagttgacattaagctggtaaaacaaaatagcacaaaacaatacaataaaaatttgtaattgcttaaaccattacatgcaaatgatcacaaaatcatagtagcttcatactagaagctctaaaattcatcaaaaaacgcacaaagatgataatgttacttacacatatacttgaattgaggcatacaactagtcataccctagtctacagaagaagaaagaaactgggaaaaacaaactagagaatggagaacatattttctcgtgttacatgatgtggttacaattttatacatgtatcatcacaaacagcaactctgtaaattttacaatcaatacccattttatgcatgaagtttacagagattgcccatgtttaacataattgttgaacaatttttacatgccacatttataaaatttacagactaaagaacagaaaagacctaaaaccaaataaattaagatgagagagagagagagagagagagagagagagagcaaatattacttacaaagttggaggcctttgttattttaaatggactgaaattatctggaacttctgctaaaaaaagctctaaatagtggagcaaaaacaggccacaatcgaatgaattttcctgttgcggcaactggagtacacaagagtcaacatcaaaacattttcaatcgatacaatcaatatccaaactagaaatgaagtcaattcgtttgactaaaatgggcattgattgtaaattttacaatcaatatccaggttactaaaacagaatgacttcaataactccctattttaagttagactagaaacagtgacatatttgcactgtctaagattaaagggctgatctttaggatttccactgatactaaccagatctagtgaacaaagtagataatagttcactcttcacaagaagaatgcattagggataacaatttgccaaatgcctgtaaatatgattgatccattgactgtctatttcatgccaaattcacaattattcacatatggtgcgtgaacagaaaatttgaaagacattatatgttacaaagtcaagctcatgcaatgacgtagagcaaacaaaaacccttttttcaaaaaagtgaacaaaaaaacctttagtactccttaatatctgaaacaaaaccaacaaaaggattctaacagagagccttcaatactaaaacttgaacattacaaacaaaatcattctaaaagaacacgctattaggtgaatctctaccttccacttgtatacatgttaaaatgttagacaagagggaggggaattgatacctctagtgagacaaaccgcagattgaggaaccttgatgaaacttcatcggacgtttccttttgcctctctttccactcttcccacaaatagctagaattcaaggttaaatacgaggccttaagatacaggaaatttgaaaataaaaaataaaatccatttcaaataaacaattcatcataaatgcacaaaaaaaataattaaagttttaatgttgttgttatcaatatacaactaataaagagcaaaagaaaaataaaaggtaccgaagtgtgattttaaagagtcggatattgctcttaaaacaataatgaaaactaaaaaaatttataatacaaaataaaaatatctttcttactaattttcattaacacagatctatgcacctaaaaataaagaataccatgaaattcagaattttacgatacctttgaataagatttttgaggccagcatgatttcctttaattgaatccatatgcagtatacaaggtactttcaatgacttgtctaagttttcatctgaaataaaacaaagacatgaataggaaaataaggaaatgtaatttaacaatccaactataattcaccataaatttagccacttcatatgaagaaaatgcaatatcatagtccaactaaaactcacccttagatttagccacttcaccaggatgacatatgactatgagactccaatgtagactgacattgcaatgtatacacagaataaatcagcacccatgtttagagcctactggctactacaagaaggaagctttattcaaacagtcttacctgaagtttacagggataaaaacaaaatccttttcaaataaatgaactctccttgtccatttgcgaactcgttgaaaagcagccttgccatcagaagcacttgaaggatctttgtccaggtcagctaactttcggaagaaaaaactgttgaagaagtggaatctatgtctttccccatgttgaatctgactctttaagtacctggtgataaatacagtttttaatgtaatctgactcttcaagtacttgatgttcatatcgaatgaacacaataaacaagaaatctaatctgtatgcagcctaatatggggatgaaaaatatggagacaattgttttctaccccaaagtggttaacaccataaaatataaagaagacaactaaacacatgcattgacttactggatgtagaagtcaatgatcgtatcattaacgtatgtatccggctgtaataaatcgacatctctcttactaatggaaacagcatctgagtccccttttggatagacaacatcttcaaatgactcgttaaaactgcataaccaataacattaaatcaaagacacattacagaagttgaatgtaaattcacaccagtaaaatcaagttattttttcactactgtaactaatctaatatcagtatagatggcagacaaactatcacaaaactagctacattctgatcaagaatatgcaatgaaacaatattgagctatcaacttaaattgcacgcacaagggtctttacttttgtctaaataaaaaccaagttagcagaaataagaaaaatccctccctccctccctcctgataagccacctgtcacttatgtgtatgctaggaagaggataggaaacttaaagataggggtgccacagggaattaattggctgtgtaagttgttttgggagtagtggttgtgggatataaataatgtgtagcttgtttgggagggtttagaaaaggttttgctaagtgtaaggaccaggctctcgaattcctggggaagtcagtaataccagtaccattttcatcttcatcttcttctttcttctctgtactgaattaatagataggctaaatcatgctggcctcaaaaatcatgctggcctcaattaaagaaaccaaggaaatcatgttagaatttacgataagatgcatggagttccatgttagaatttgggataagatgcatggggttcctaaaactatgcacctaaaaatcggatactcagagtttagtttggctctgataccatgttagaatttgggataagatgcatggggttccatttcaaaacaaattaacaataagaggagtagcccattcattgggactaactctaataaagacaatggatcgtctattggtgaacccagctctgtggcggtctgtccagatcagcagcctccgaaattcccaacgaagatggcagtacaacctctctcaattccgacaggaccaccatttcagctgggctcaattcaggccggccaagttcagggactcgattaccgtcctacgaggatggagataccccttttcactggcaacaacctcgatgataactctataaaaatagaatcatttaactctttttgtgcattaaattaactttgttcttaagcatttttaatttattttagtactctttttatttaattttatataaacattaattttagttctttatatattaattttcataactttgaatttaatttagttttctatgttataagttttaatctcaatgttgtgtatttttgtaaaaaatttaaatgtatattttggacttattgtcaaaattaagagaaatgatgttaaagtccatgaactcatggaagcccaaatatcttgtacaaagtattcatacacactaaagctcacagtgtattcattgtttgtagtgtggataatagaagaaagtaaatgggccacgtgacccatatgtgaacccatatgaagagcaagcttttgtaacatatatggaaagaagaaaggaaatgggccattaaatgactttgtaattttggatggctcaattactttctcttcgtatatgtaatagtaagccaaaaagaggagggggaggcagaaacaaagaagaaaatgaagaaaaagaagaataaaaagaaaaaaaaaagttttatttgagtgttatttagggtcttagttttatattttaattttgagattggcaaaaatcaagaggaagaagaggaattcgaaagaaaaacttagagtcttgtgacagctctaaaatgggtttttatttctatctttcttttcttttaaactttgtaatctttgcacaatttattatgaattaatttttatttttgctagaattattttgttgacttgaaattgtgatttgatattttgttgttatatttaagtgaattgattttgtttaatcaagagtgtttattttgtaattgcttacttttgcttgatcactattagtaaattgcaagctaatcttgattttgacaataataggattagtagaattacttgaatgattatcatattggttaaatgtgatttgtaaatggcataggaatatgttatttaccttgtatgacttagaaaattgtgcttaaattgagattcttgacattaattgagcttaggaatatgttaattaatttatagaattataacataaatactttgaaaagaagattatgacattctaaattcctagttgacattatcaatttacaataatactcatttgcattattctatcaactttgcatttttacgcaattacaataattctaccttgttttcttctcatagtttgtgttctttgttttttttttacatattctcatcgctttattttattttgttgaaaatttgtgaataattagttcctgtgaattaatttccaatccctgtggagacgatactcgatttatcactttattacttatttgacgattgcgtgcacttgcgtatattaattttcacaacacccgacggatggatatatcgcacaatggtacttttgattacgaaaatgcctgaatcgatgatgttcgatatgacaatagttggccttgatggtgatgccttgtcgtgattccaatgggagaaccagcgctgcccaatcacgtcctgggcaatgcttaagcacatggtgcttcttcaatttcgcgcgattccaatgggttcgttgtcgaaagagctactttcggtggttcagaccaccactgttaaggacttgggttcaatgggaggttttagcttctcggtacccagatgtgcctgatcgtcttttgaaagggtgttttgtccaagggctcaaagatgaaattaaggcaaccctacacattttgcaaccccaagacttggcccatatcatggaaacggcccaacatatataataattctagcttgttttcttcttatagtttgtgttctttgtttttttttacataatctcatcacttcattttatttttgttgaaaccaatttgtgagtaattagtttttgtgaattaattttcaattttcaattcttgtggaaacgatacttgatttatcactttattacttatttgacgattgtgtgcacttgcatatattaattgtcacaacacccgacggttggacatatcgcactgagtggtactttttgattacgaaaatgactgtatcgatgattttcgatacaaccatagttggcctcgacggtgatgccttgtcgtggttccaatgggagaactagcgctgcccaatcacgtcctcggtggttcagaccaccactgtt

SEQ ID NO: 14788 - DNA, 8554 bp, Cannabis sativa
tatatttctcttttcctcaaaaattgcaatttgatggtgattacttgccagaaagatatgccttgatcacataataacgtttgacaattttatgaaaatatataacagaaacatggcatgagattgttgaaactaatataagttaggtgataagaacaatacattaatagcaattattattattataactaataattgtaatataaacaataatgaatatgactattaataatgggtaaatcacaaccctttccagaaagaaatctatacatgcaacaaggacatatataatattctaaggcagcaatcaaattcaatggaaattaaattaatgtccctataccacttcgagctccattacaggtagagtttctactaatggatatgaatagtatgtatagtcaatgtttgatccagaatattattcccattaaaaaagtgcatgatttgaaagaaaaacctctcataaaccccaccaagtcaaacttctccaaagtactagccaagccagtaacttgtattatcaaacaaatcaaaagcttttagccaaacccaactaaaccccacatttttattattatctcttcagttcaagaatactgattgatatatattacagttccatttctactgctgagagtacttattagttagagcacctaagctttgaatgaatgctttacaaacttacagtacttggccagactttgacaccagcaaaatcttttactgtaaacccaactttttcaaacttgcctttctcattattctctctgaacttcaagtaatccaagcaaacaaaagggttgtaaattctcttattttctttacctacaacatcatttggtgccaagatcactttgtcatcctcaaaacaccagaagaaagctatagaaaaccggttctgaggccgcctcaaaaccacccggtgtgctgaggatcttaacttctcattgctccaagcttgcaacatgtctcctatgttcaccaaaagggtcccctcacatgggcttatgtccatccattttccctcctttgacctcacttgaagccctcctattttatcttggtacacaattgttacacagctcatatcagtgtgcattccaagcccttcaacctcatcttctatactttcaggagctgaatagttgtttattctgagataaccatgacagttgttgaactcagactcaaagaacttattcttaaagtcatcccctaagcacatcaataaaatcttcataattttctttgacagttctgccatcttgctcccatattcttgtagcatctcactgttaagagaatataatacatgagggttttagctcatttatattgaatatgtaatctaaatatacatatatacctgaaaagagaactctgtttgtcaaagagcacatcagctgaactttgagcacatgcaaggaagtttggaccagaaactctgaggctttcaaagtatggagaagctaagaaatgaggagtataagtctttatagaagagaaaggaccaagtttgagtttagtttcagaagggaggctaaagagatcatttgacaaggaacatattttgttgtaaagatcacttgaaatcccatgattggttatgtggaagaatccccaagttttgcaggtttcagctaaggaagatagagaagaagggtctaattctggctcagaaatgtctaatatatgaagtttaacagaagttttggattcagacattttttttttgtgggggaatatagatgaagaaaaggtttactttgtccactaattagattgggctacctattaaataggcttccactagctataaagattaaaagtaacactttttacaggatcatttttaacaagagatgggacccaagtaaaagttatccactagctacactttcttttactagtaatgcaaatattaaaaatggtaaaaggtacgagtggtgcttaataccatcttacatgttaatattgctattaatttcactaagtaatgtaataatttttagagagtaccgctaactaatcacaaaatgatatatctaaaaggtgttaagtaccactgatgatactgaaggtaataacaatggtaatttacaaatatatataattatgtgttgatatgtttatgtctagaaagatcttgcaatatataggtacaatagtgttatagtgtcatgtcactaagatattggaggacataaatgacagaaatagaaaatgggaaaccaattaatagtttcatccattttaaatttctttatcagaacctaattataaaatttgggttctctaaacaaatagtcaaggtaagataagatagccgatggtgattgaaaattttcagttatatagggctgaagacagcctggtaagttggtatcttgctgatgatataaactttattagttttgttaagatacaaatatttatataacttggattcttgtgaagaaagtatttgactggctctaactcttgtgcaccaagcatgtgtagagtagaggttgaaaaaccccttggtttcaattactatataattaaatcactctaaattttaatcattatctaaaaagaaagagatataactaagagttttcatgcagcatttgatccaaatgaaaccatgtatattgatgttgtgatggtttggtggtgatgatgatgtcctttaaatgcaactatataagtgatatatatataataaatatatatttgcatacattatccatcattgtaggcacatccaatcaggcaaagatctgaatatggtttgtttgtagaaagtgacaaaattatctctaaagtaagatattgcacaagcaaaagaaaacccaacaatgaatatttatgaatataaaaaaagaggcataatgatagcttaaggctaaaaacattgaaccaaatgccaataaattgactgcactaattctaattgcttcagtacttagaattgttaatattaattaaatatcataatggagttcataagaaagagcatgacacagaagttgatacaataaggacagtttaatacaatttgtgctatatattattcactaatggatttgtactgctgactttcacctctccccactaccttgaaataatgataagaaagctttattagttcaccgtggagaaaaagaaaggtagggcttcaatgcaataccactatagaattacagcacaatagcaaacccattagcccattatatttgttatcctcatctgtcataatgaaaacaaagaagtcttagccttaattatacatccattaagtatattattaggtacagttatgcctagtatcacagtaaatggttagggatattatataattatttaaattatgtatctaatatttaattctaccatataacactttgagcactactgatgcgagcactgatgccttttagcacatttttcagttatttcagtagatcttaatttttctttgatggcatcttaaatgtacattaaaagacaaattgatatatcaattcaacccaaaaaactgaattgccttattagtgtcaccagtaattgtccagttacaatttataaacgagtttttaaatatataaacggctttgtataaagtagaccataccaaaaggttttaataactgtcgggaaccaacgaacgaattcttctgtaaacaaaaggaaagtcaagactcaaaaagatacacaaaacgacacgacagtaactttaacactcaaaattgctacccaaaagaacccttcaaaatacatgtcgtttcgtttcagaacgatatatttgaccgaacgacaaacaaaataatgtagcgtattgcagctgttgtcttaaagcgtctagaagggggcatgagagtgagacaacgaataagtctatagtctataaaaactcgaaatcttgaatgcgaagatcccctcaaaatcacatgaatatgggccgccatgggcctcaaatacgtagcccactaggaaaaaggagggaggcctcaagacaatttttgtcaatattaatgaaataataaagattgttacaccaaagatatcaaagaattttaaaagaagatacaaaacaagtaaacttattatagtgttatgaggaatttggttttggtcccagcttcaaaagttgtcttaaaaatttgtagaggggattctaatatttaatctcattctgaaatttcagaaaacaaggaagaacattttttaattcaaaaaggcaaaaaaaataaaacaacaacaattattttttagaaaaagaacaattaatcagcaatagtaaatgaaataaggtaacaaaacgtatgtcacgactcacaatttagtgtgtgaagttatagtttgaagctattgattacagggtttctataacaacaattaagttatctttcgactataacttaaaacgcttatatattgagttaattgcacaaataataattgttcaattgagttatttcgccatgcctaaatatatattcccatttaaagaaacaccaatatacttccatgaaacctcacattcactcctttcaaaagaaaaaaaaacctcacattcacattcataatccaaacaaatggaagggggaattcttgaagtacttcttgtcaatgctgaaggtattagacacacaaatcttgttggtaagccaatctatttttttaactttttttattctttttttatttggaatgtttttctaattatcaattggtgaaaattgagtgactaaattgaaagagtttttgtagggagaccagactattatgtctttatagagtgtggagagcacttgtatagaagcaaaatatcatcaggtattgtttgtgtgacttcattttcactcttaatgattccattccatacatgtctaccttatttttagtcattttttcttttatatttccaatgcaggtgaaaatgaaaaggcttggtggaatgaaaagttcacatttgaatttccaatgtatgattggaaaaacttaacccatctcaagtttacaattatgaacagacaactcttctctgatggtcaatttgttggtgaaactatgtaaaatattgcattctgtaacaaataacaagcatttataattttctagtcactaaaatatagcctttttaaacttggtgaatattttgggtgtactatgcagaattcatttaggtggaataatcacagaggggtgtgacagaggatttctagaagtaaaaccagccccatataatgtagtacttgaagatgacacttatagaggacagctaaagattggactcaaatttatttcaaacgtaagtaagaatcacttaaattaatatttaattacaataaccataataataataaataatatatattacccattattatttttattatttatttcaatttgttattcttgcagaaagatgtgacagagaaaacaccagagcaaattacagaggaacataagaagcctaagcctactgagtgtggtagaattgttcatttatggagaactttatggtggtggtcttcctttttctattcaagggattcagaaacacagccatagccacatttgtgaaaataaaacatcatttcctctgcttcaatttggtgatgtaattaagaataaatcacaagggtttattttctcaattttacttttttttcacccttagacctcaggaataacttggaaatggttttgaggtatacttgggttgagatcttaaagtttcatacacaaacacttgttttgaaatgttttgatggcaattaaatgacatttatgttagtattaatttttccacatgtgagttggaggctctagaaacatgataaaaatcagtagtgtagcattctggaccaatattattagtgatataaataaaaatatattataaattttaaggacaaacaaacattagaaaatgaagaattaatacaacgtacatttaaaaagaaaaaaaaaaatagatatgggttctaaagtgttcttttttttttttttttgcttaacttaatacacgtaaagcatataaacaaaagcatgcatatgcattgatttatgagttggagttagccagttaggttcatgcattattagttagaaagaagtatttgactttgattgttaattaaatttatatggtaatatatacatatatatatttgtgtagacttgtagaagctagctataatagaacatgatcaaacgagctacatatatcgactacaaaatggtaggcacgtctatataacattatttagaagttgaccgacaatattgggatttaaaaaaaaatatataatgtatttattaaaattcattatctttttcctttcattcagtgttaaactacttaataaagaagattagtgcaagttgaaacgattttcatgagccttataagtattcaaagctataagaataagaccaatctaactaaatctttatgtaaattccaattatattctttaatctaccacatctagtatttcaaaattcaaaatattgttgattgtgaatcctactcatcatattaactaacaaaaaaaaaaaaagacaaatgagcataagttactttttactttcttttttcttcaaagaatatgtttggagtggtaaattttgaattttaaatactatatagcatgcctttcaaaaaaaaaaaaaatactatatagcatgagaaaatataaataatttcgtgaacactatccaaaacaataaaatattaaaaaagacaatattttgaccttacactaattatatttcatttgtcagataaaacttcttttaacgaattggagattaatcatgactcgcatgcatgtcttaaaactgtaatatatattttattttttctttgtgcactcttcttcataaattatagtacctttggtcccctcaaggcctcaaccaaataaataatttatttgtaagcagaagaataaaagaatcagaaaaataattaaattttcaccttccaatggctcaatataaatcccttttaaaacaaaaataataataaaagaaactcaatataaatgcaaataaatactaatgagtgttttatttaattgaatatggtcaaatttaatttgttcatttttttttatataaaaaaaagggatcacccctagtttaaatgcaaaaggatacatggaatattaataattttttcatttatttttaagtatgatgataacattaattatcagaaagaaaaaaaatgatgatgatgatgattcactattaacttctgttttttatttcccccacgtagtcagaatcataaaaaataataaagaaatacattaaacaacccaataggactctgtatatatcaaggtcctactaagatgcactcttctgcatgtcgtgggtttactttctcaggaaccaaacacatttcaatcttcaactctccagccatttttctttctgggtttttcttcttcaccaacatctgtggctcagactagaagatcagacggttgatattactccttttctttcgaaaagaaaactttctcttttttgttgttaaagacaaggtattggaccagctaattagccaaagacatgcttaggagggaactgtttcaaactgtcttagttcaaatcttcaaattcaaatactgccattaaaaaggtaattaatattctaaagaatggtgtgaccgttacctttagaaaaaaacaaattcaaatttcagtttgtttcgtctcaagaaagttcttccaagattgttttttaatttatttaatgtgttatgaactttagttagatttgttcagtaaaactgttttagttcctgatcaagaaaactacctgtgagaaaccactgttttgcttttttatgaccaaaaagaaaagaaagattacgcctcctctgtctctttttcttggggaccctttttcttttttctaatttacattccaagatagataaataggcagttcctgggtccgaatttttgaattagagtcccaccaaaatgttgagaaactgattatgaagttgtgaacttttttagagcccacttagctaatttgtgcaaaaaaatttgtttgcaggttttgattatattagactagaaaaattagtttcattcagaaatggaaaatttatcaaactatgaagaaagttatgatctgtatcagccttcgccttcttctttggatcaaattgacaaatcaaccacagaaactccaggatactcaacaattagtggtgattcttttgcttattgccggactaattcagagacctctgctttttctgatcctacagatgaccaaagttattcaagtgagccttctccttcatgttggcacgccttgaagtccttaaattccagcgccggagttaataacgaagctgtttttaccagactaggcatgaagcaaaacaagtctcttgttggtgatcataaactcaatgatcaagaggtgttggatacaggtgtgtttttatagctagtcttgttatgtaactagtttttgttttaaagaggtatgaatatgctgacttgagtgaatgaaatt

SEQ ID NO: 14789 - DNA, 8877 bp, Cannabis sativa
tatatactccaaaattgttagtcaattgaatgaagtctttttcatgcacactatttctttcctacataagtgacagcatcttacctcataacttagccaaagagaaagaagaaaaaaattgctaaaatttctgattttcaattagaaatagaatagtcccaacttgtaggagtaaaggtcctaccttggctagactactactgccacacccacacctatcaagatcagacggcaatagtttcttggatcattttgatcagtaaagaaactaacttgacttattcatcccattgaattattttcaatgaagggttagtaatagctttagaaaaggggaagaagcacttataatgtaactttcatgttggttaattatattataatatattctttcaaaaaaaaaattatattataatatatgatgcatgaaagaagagttttacatgaagtcattggtattaggtgaggaaaaacattactaattcccatgagttcagaagaaaagcctttgtttttttggtttttatatctatattttggtgcagaaaaatgcttttgagctatccaatcagagaaacttcactccattctataaggaaaaattaaactctacaaaactcatcagtaatgagttctttttttttttttttccttttttcaacaggttaaggcaaaaaaaaaaaaaaagtacacatttttcttgatatatattatatacacttgtgcagtaattaaagcttaatagaatggatatatagtcaataaatgagaactaactatgtgagaaagttttagcaaaatatatatataaagaagaagaaagaaataaactacccttttcagctatgtttctctctctctctctctctctctctctctctcaggccataaaaagagcagtagacctttctttttttttttttttttgaaagggagcagtagacctttctgattgtggaagttagactacatatgaatttatttgatacggtactatgggggcaccacagaaaataattacctgccatgcttacttaggatcatttatatattagtttggtaactctgaaacttttgtttttgttggtaatctctggtcctgtctttcccttttcttttctcttcattcttggaaaaaagaaaatctggttctcccgtcatcaccatcaccatgtccatgtaccacttgatttttttcatctgggtcctcttgtcatcgagtttttcagtcattatcggttcagattcttggtgcccacatcagattttgcagagagaaaaccaacagtttgagcagaaaacagataggttctgggagttcaaagaggaaaccaacacctgggttgaagttagattgccttttgatctggtctcttgtgttgaagataactgtactaaagttggttcaattcgactgaaaaagagtaataacaatgacaaagagaaccaagaagaagaatctgatgctgctttagaaaagatgaagagttctaaagatcagaaagaaacttctgatgatgatgatgatgatgatgatgatgacaagggtgttgttcttcctttgagaaagagaatttctttgaccaagatgtctgagacttctgtttggatcactagtcaaagtgggtgtatctatgagaggttttggaatggtgtgcagtgggtagtagcaccacatgacttacccatatccgaaggacatgcagcttctatttttattgttaaccacacaattcttgctctatctgaatcaggctatctgtatcaggtactgacaatccgactgttaagacatatctatgaaaatatttgtttttcttgtttttgatctttggtcctggtctcctgacaaactggattaaacagggtatatataacttaaactatgtaataataataatcaccaaccacataaccagcttgtcacatgaaacaatggattattctaagtactctattatactgggcccagtactaaacaagataatttgaaagtggttttaccttattacagtaaccatctgattcataatatgcatggcgttttgatttcttctgttttctgttttttctttttttctttttttctgttttttcttttttcatttcagatgcaactcaatgaaatttcccaaccaatttggcttgagtttgtacctacactctttcaaaccacagatacagaaatagaatcatcaagagtcttgatcaaagctggtgttgtttcacatgatggagagtgagtaaatgatttttttaatttgagagagtgaatgaatgcgaagaaataatctcaaattcccttcactgaatgaagaaactcagcaagcatgtgtctccttctaataactccttgattttgctttgctgcattgactgccaggagagtttatttctgcactaggagtgggacacttttagaacttgctgagattgaacctacaaggtaagacttttctataatcacttcaagcaccaggcagttaagctagctagcccctaaatttttttcttgtacttattctgatgtaactttaagtaaggtttctgctgtaaatgtagaacagatgggtaaaccatggacaaccaccaggtgcagatgttgcagctgtagctgatgctggtaccataagaaaagaagtggtatatactataaggtgaccattgtgtaaagctatcagtttttgctaaattcatatatatatatatatttgctaagagctaaattcatattttgattaatgttataacatgagaatccaatgcagctctataggaaacctatacgaatatgataggaactcaaaaccattgtggaagaagcatatttggaaagaaggagctgcaaaagatgcttctttggaaccattaaagggagctgctttacatggcttgattagagatcattccatatctttgtttctgttaacaaaggtaaatatatgcatgcactcattatcatgaatgatgaccattttgaatttcgaagtgaaattattaaggaccataaccattttgaagaaaagtaataatcttatcatttatcaatgtccttattgatcaggatggtattttggttgagagaaggttaaaccaaaggaagtggaaatggttagtccatggaagtcccaaaaatcagcacctgtcatctatcacacatgcacagcacgaagattcaaacgaaaaattcttctcattattttttactacatcttcagggtctgttttcgaatatcgaataccaaagagagcaggtgattcttttcatcatagatgagatcacacgaacattacacattagctcagtagataatgtcaccacaattaacaagaacagtatcaaatatgaatcttgtactgaatttgattattttttatctcacatgagaacaggtaatagtcaagaaaatcaaatggcagaaacatgggtgaaccatatgcatcctccacatgccaaagctgcaagaggaattggtggactacaatttcaagttggcagaattgtttttccactagacgatggaagacttgcagagctgcacatatctggcattggtggtgataatgtggggccgattaactcagctaatgtcagaagaaaatccacaatgaaatatgtatggtcagtactagatgctcctgagactgaaggatggaatgcagaatactgcaccgaggaacgtgggcctacaaattgtatcatggggataagagatgagccaaatgatttgggaacagcaagattggcgactagaaggagaaagggaagccaacaagattacctgattcctagtgtagtagcatctaatggtccagcaaatgctttggacaaatatagatttgcagacaattggattgaaagaaactttcgtttgagagtaatgcaaggagggagatcattttttctcataactgatggtggctttacttttgagtatctttatactgaacatacatggatatggctgagacatgattatcctgcagctatcaaaggtgcagtaggaaactataatggaagtttgtatgtcattgacacagctggtagtttactaataagagaaagaagtggcaatcaactagcatggataaattgtacagcatttaagaaaggtggtcaagtgactggtggccctccttgggatggaatcccaggtagagctctgaaagtcacaccagaagatgccctcttctttgtgagcaagaatggaagactactacagttcactgtaagttttaacaaacaataacaacacttaataatactaacttggagactaaaaattaaaaatcttctgtaggttgcactgaggaaattcaaatggaaagactgccaaaaccctccaaacacaagagttgcatgtataatagatcaggaacttttccgggaaaacatagtttttgttgtaggaacaaatggtcggctataccagtataacaaagtaactgatctctggcatgagcattaccagtctcagcatttgattctgtcaagattgccaggaacagcaatgaggccctcatcaatgtccttaacaggctcacttttcatgttgtctgaagatggtggactagttgagtatcattggaactcattggatggttggaattgggtggagcatggtgctccacataaaggggtaacattggtcggttcacctgggccttcctttgaaggaaaccaacttttcttgattagttcagatggaaatgtgtacctgcgctacgtggatcaaactgcatggaaatggaaaaactgtggctttccttatataaaaaatatgaatgatgatcaaagacaagaaaaagtaagacagaaatggatacaagatttttgtgtggatgaagatttttcaaccaactataaggaatctgaacacgttgatgacctcagtggtaattgtgatccaaaagtaagtatctttctatcgaaaaggaaatcttattgtgttgttaaagtaaataaatggttgtgtgattgtgtgttcagatagcatctataaggccgattcctttctctgaagattcagtgatttttgagttaagagacggcagagtaagaaagaaaccattcttaagacttttgaaaaaatgacatgttcaaagtaatatcaaagagaagaatattgcttactgttgatagtttgatttttgttcttttcagttgggagaattgaaacgagttgatagtactcaatggatatggtcccgcacaataggcactccaacaagcttatgcatggaaaattattggactgctctagcatcgtgagacaatgccaaagcataaaaaactaacaatgtgaaaaattgaacttagaaaaaggaaaagaaaaattatggcttcacatattgaggaagtaggcacattttctaatccattgtacatagaagaatcaatagaaaaatttacaatcacactatacacaagttacaataaacccatttagagatgtactgttatgcatcaaacagcaatagaggtttcttcttccttttgttatttttgtttttccttgctcacatctcacatatgtgaaaaaaaaataaatctaggtccatttattcgtaaatatgagcaaaattttgttaatttctaaagcaaccctcaaacaacaccagacgaactcaattacattaaataaaaaatttgaaaagaaaaaaccaagaaacagtgacagggttttacaatggagtacactgaaaatcgatagccttcgcaatatgtatatgatctgtataaaagctatggaaaatggagaaaaagtccttaagaaataaagttagcataaaaactacatcaatcttacaaaatcatcattcatctttactagtgtcttcaaatcagaatcacaccatgaaaaagcatccccaagttaatagaaaacaattcactacggaactcattacttgaaccattttataatatgggtaaagtgaggggaatccttgaagaacaaagagggaagccataaaacgggtgcattgcaagcactgactagaacatctggaactcaaataatacagacattaaacccccctcttccttgagaattcactctccctcacaactgagcataaaccaaatcagtatcttctcctgggactccttgagcgacgctctcgtggaggcctgcaacatttcaaagtcaaagagaatatattatttatcttatgaggtccatatgtgccacacagtacacaccaagcaaaatatgttagaagataatacagaacgttaactacagtactctaaagtttcaggccttcatagatgcaatcagtcattaggtataaatcttaatcaggtctaaatgaaaggagaaagtataatgagaaacttggttttagatacataataattttagttgacctattaaaaaaacattgtgtaaggcaaagcagtcattcaaatcgatattaatgtttcgtttgaaggatatataaatgcggtaaactgcatcttctagtgtatgttcatagatcatctaaatgcaaaccttatatttttcttcttgttaggtccatcaaggaaggagccattgctgaaggcccagtccacactcacagtctgggtgagaagttcagctccattcattccagctatagcagcttgtgcttcctcgaaactctcatactcaataagtgcatatccctgttgaaagaaacaatacaagtcaactacttacaagaaatttattgatcaaaagacaatatttcaacatcacctcaccattcaccaaaacaagtacaagaggaggatatatacacatactcaaataagaagacacgatttttcactatttttgcaacacctaggaatagtagtaccaataatccatgggactaggatgaaaggtattacaaaacttcatatagagacaagaaacaatagaatgtcagtagaataagcatctgattaaataggatcatggaaattatgaaatgatcacactagaatactagctaccttagaaaccttacgcagtcaatggataggctaagtaatcggtggaaagggctttaaatataatgttcacaccgtaaacttggaaagctaacaaattttgcactgaaatttttgttatgtaaaaaccctgaaccctcaaccttgcaatggtcatcatctaaagaccatgtcctttaaattaataatactttgcagcaataataaacaattaaagcttcaacaatgcagggatcttaaaaaaccgtaaatgttcttcataccttgacaaaaccagtacgacgatcaagattcaaatgcaaattcttgatttccccaaactcgccaaacgaattctgtagatcatcctcttgtgcctcctcatgcactccggttaccagaataatccaaccttcaattgctgtacatattttaagagaagagttaacaaatggtagtgtagtttgcttagaggaaagaatacgaattaagaagaaaaaaattaaaaatgcccgtaaccgtgcagtttccacgactagtcttttcgaaccagataaaaaaaaaaaaaaaaaaaccagaaatgagttctcaattcagaaagctataataaaaatagacaaattcgtgccaaattccaaagtaccaaacataaacttcaattgatttgcttaaaatctataccttcacataaatataaaaaaaaaaaaataaacatagcataaaccctaagaatatacgatatagggaattaagaaaaacaatgaaaacaccaaaacttttgtgcaaaaccctagcacaataaaccacgcacgacagattgagcggagattaaagagaaatggcatgagagataaaggagaatacttacagcgctggggctctaggccgtcggaggacttaagggagtcaaaatcggcaccagttaaacggctgttgcggtcggcgttgggatcctcccgaaaacctcttcccttggtcttcttttgggagagtgaagatgaggcaccgccgccagttatggcggacttgagcttaggaagaggggcacgaggagaagcggcggcgtcggcgtctggggcaccgtcctcgtccatgaggtcgtcatcttcgggttcgaaatcgaccgcttcaacatctgcgttggccatatttgattatctctctctctctctgaagctttctctctctataatgtgaaaacttgtcgacggccacttttgtgttaaactcgccaaaggccctatattatgatttttgtgggagttaaactaaggtattcaaaacgacaccaaaactgctaaaacataaagggaaaacgactataaacattgaaaactgacattaagataaaccttatgtgttgtttttgtaatttctcaaaccgtaacggcaagattttaaaactacaaaaattataacgcaaaaatacaatgtaataccgtacaattagagtcctttacattatcatatttatccaaatattaattaataaaatttaaaattaatctaataatagtttaacaatatataaataattttattaaaattttaacatcataatatattagagaaattatccattatacattaattttttttttcatttttaccttctaattttttgttttgcacttttataaaaaacaatttctaaaaaaatttattattatccttatttacttcctggttcccaaccttagagcgagagaatgtttggggttggataattttttgggacttttttattagtatatatatatacacaaagttttttattcatttttacggttctttaataaatatttcatttatatataaaattgattgggaaatttacatcctttactaacttttccttttttctttcaaatatactgtgacacggcaaagttaacttttttactgtttttattttttttgttcattttggc

SEQ ID NO: 14790 - DNA, 8543 bp, Cannabis sativa
  modified_base (5416)..(5441): a, c, t, g, unknown or other
agccctgcatcaggaggaccacactggctcccctcctagagaatttcaagatgctccaaattgagatgtgtcacaggcgtacaaacttgaaaactcacctagccaaatataagaaaatgatgcaagtggccaaagtaagtgatgatgccaagtgcttatgtttctccctgatcctcatcaagttcgctgaggattggtggaagaggttgactcttggatccatacactcctagaaggatttacaattgatcttctgaaaacaattcatagttgcccacaaatatgatttggaaatgggatcaatcaccaacatcaagaagcatgtggaagaaagcctaaagggtttcattcaatgaatgatgaaggcaacagctagaaccaaagtaaatgaagacatgaagctcatggccctgtagtctagactcgcactaggatccttgttgtggggagaaatgcaacgaaagagggccaagacactgttcaaatctaaggctaaggcccaaggctttattagtttagaagatggatatcaaccgacatttggagtccctcctacactagctcctgtagtctctgcttctagattcacctcatccactcccgttcccgaaacttcatagactttaatgatttataggccctccgcatcaatacccgcactcactcgaactcatttctctaggtatggtgcagcacaaattggatgcagggtggctcctaaacaaacaaaggcggaagttcctgaataggacatgagccaaacccaaagtaaaggaggtggaaagggctccagacgaggcgagaattcaaagaaagttaagaaagagtatgagtcaaggtacactaagtactccatcttagtggacactcgcgataatgtttataaagtgacctacaatatggtccactacagaaagcccccacgaacacctcaaggggggaaatttcaagagagatccaaactaaaagtgtgaataccacaaagaggttagaaattccaccaacgactgcaaacacctaacggatgagattgaggtgattcatgaacaagtaattattctcggacagcacagtaccataaatcctccacatggggtaggtcatcctcaaggcccaggactgtaacttctagcactccctgctctggcggctttgatcgtgttaaccattgtggttctaggaccaagaaatccatatcccccaaggctagcatgaaccaccaagaactatcataagaggtccttacaatagctagacagggaaggagaaacatgcgtgttggtttagtctcctgcccaacatcctcgaacaatgagtttgcccatcactttcacagaggaggacactcgacacgtacatttccccataatcacccgttggtcattgaagctcaaataaaaaacaaaagggtatccagagtcctggtggataacgggagttccgtgaaaatcttgtttaaattcatcttccaagcaattggactcactaaagtagatttgtcaccttgtcccattcaggtgtaagattttaatgggcatgccttgatgcccatggggaaaatcaaattgttagtcattctcaaggggaaaacaatgctagtgccttcaagcattgtacatttatagtggtggattgccccacagcgtacaatgcaatacccgaacaccctgtcctagtagattttggagcagtaacttcattacaacatatatttatgaagttcccctacgataatggttgtattgggacagttataggcaaccaggagagtgcaaggaactactacaacgtctctatccgaacaatattcatagtccaataagaaacactcgttgctcctggaatagaaaatcaagcaaaaattgaagccatctaggagaattttaaagaaaaactgaactacccagttaggaatggaacgaacgtaaaaagaactagaccaagaatcatactgatctccccacaagaactccataggttgtagcacaaagtaagtggtgaaacacttcaactcaaaagagttgttggatcaaagatctctcacgcttgaagtgcaggctgacttcattactaccgtcagtaggctggggttacccagatccaacataactctactagtcacatgtaatgctttgtaaatttccttcttaaatgtaaacctctgggctaatgaaatgaaaatagaagaaaaattacacaagatttcacatgtttgttcacacacaagctatgttttaaataagaaccataaacttggagacgtccaaacttcctaagtcacttaggggtagtatacctagctatgtgccctaaaaagtcttgtattaaacttgaagtctattgtatgaccaatttaattttcacctttattcttggaagcgaagccatcacctgagccccagtacatcttcaagcctccttcttggaaggaggaatcacttcaaagtctatttaagagctcaaaatggtcctaaaaaaaaacatagctaatatgcctttaacatgattcctcaagaaaaacatcgtttgaatgctattacagtcgctttggcctgttggccatatttgcaagtttcccatgaggagtaagagatgaagcacgtctggaaacccttcgtgatccagcagctctcgcaattcaaacttaggaaatatttatctaagtgctaaatcagccatgtcactttggattaaggaggggagatcaaaacattaatacaagtctagcctcatctccctaaaaagaacctggctaggactctattgtatgtttggtctcccttgctctcactaatccaaataacataagagtgttatgatatcttgcttaaggtagttaattgggaagaatgtagacagaaagcaaactccgcgactcctgtagcgatttaggaacgtagtttgtaattcctacaagtaaggttaattcaccaaaagcttgaggaatgccacgatgagaactttaataaaagttgacacctatcgaatgtatgaagttgcatacttcaaaggttcaacgaagcagtgattgagtcagaaagtatcaagctttggctgttggaacaaaaaacttggccaaatcttaaacataaatatatcagttggcatagcaagaaaacaaaggcaaaaagaagcgcgcaatgaacttggaaataaagtaagcataattacaatagacgtttctaagattattatagacgacctctcagtaggggcgtaactaaattatttctacaaaactaaaattaaaaaaaaaaaaaaaaagaaagaaagaaagaaagggaggagttatgagatgaggttcatttctcagtttgggcgacatgctactcctacacttggcttggaaggacttccttggtggaaacacaaggctgctcctggtgtgggactaggggcgcattgtgagtcagagccaaagggtctgttgggttatcttggggaagaccttgaagaccttgggaggtggttctcgaagaagccactacctctgctgagtgtcgtgcctatgtatggccagttgaatctccatctgacttgccattattgttttcataaaagtactttctaagatacgtattttttcgacagtaagaaccctctgtagacaatcttcctggcctccctctagatgcctgaggatggaaggatccttcttccacaagccctggagcagcaatgcataagacaagttaacaaatcaaagaaaaagtgttttggcaagattcactaacttgatagcatcacggattgactgttcaacagtctctctagccctttgcatggcccccaataaaataaaagctttaatcccattggctagttggtgggaaattttcctctctagttacaggatagtgttcaagtgagtgttgctgactgtgcagatgcctacgtgattataacttgctgctcatgtttaacatgccaggagtctttttctcttgtcaagtcctcgacatgtttgtttaaatcctaaacttgacccaataagccctggatcactggccctttcttgcaaacttcactttgtaaagggcacaccttgtttattgaagcgagaagagtcacatttgtgtcagcaagttgtgcttcaagcatatccttttctgtgtcagccttgcaaagatcgtcctggagagtcgacagttggaacttaagttggtccagctctaacttattcttctcatcgaaatatcactggagaatagggatgttacatcatatatttgaaatttaaagtacataactaataatccctaaagaatagggctgtatttgtttatggggaattcctatatttatgggtagtttgaactgttgcaggaatgttgaaggcgagttagaaggtttatgagaaaaacacaaatgttggcatgcttctgcacacatggtcggccatccttgttgaaggctacccggtgcttggaagctatcacccctagccggtcagctataggcccggctaggaccttgctggcttgtgaacatttctatcttagcttgtgtctatcatgcagtaatggaatctcaaaggttgggaggcagcacggcactaacgtggcaggttagtgctgagttgtcttcaacatattttttattttatgccatgtggaggtgccacgtaaagtggaaaaaatttaggataatacctactatagggtaggtgcctaccttgtctcaattaagacaaggtgtctcctatcctgacaaatttttgtcttaataacttttatcctgtcatattttgtcttaacaaattttatcctcacaatttttatcttaccaaattttgtattaacaatttttgtatttttccctatttaattaatttaaaaaatttactacaaaaaataattaattactattttccattcaaaataaatttttccaaacagcattatacaactctttatccctactcttgatagtatttcaaggtggtaattcgggaaccatggacctataattctaagctctaataaactagattatttattgagtctcatcaaccaaataatcatatttattaattcgtgattactccactataaatatagaattgagctcttagtcattatagaattatatttactgagttttactacagtgtccatttatataaccaattccagtgattagccctccatgtattggttcttaattagttttggtcaagttaccgttttacttttccaattacttttttatcctttagtaccattaattcactagtggaagtatactttagatgccaaatttgtgtgcaactttctaattctagaattaacacataaggaacaaacattcaatccgttaggaaagttaggattctattattgtagatcatgttcccagccttccacattattagattcccaaaacagaagctgtaagaatcatcttctctgagaannnnnnnnnnnnnnnnnnnnnnnnnnaataacatgaacatgagttcatgattactcaaaatttatatcgatctactattgatcatcattatgatatgaattatgtctttatagtaaatgataagttttataaagacagatttattcatatcagtcctagttatatatcatctctattatatatatcacattcacttggatatcatgctacatcagtaatccgaattgagattacttgcaccaaataacgggcatcagtgaaccctactagcaaccattgattaaagattcctaaactttaatattgtgctgactattgtattcatggctaagtgatcttaattctccgtacaactacaagtcaccgcctcatatatgaatatataattttttaatatttatatgtaaattattcaatgttaaacattcatgcatatattaaaatattcaactcttatttataatcaaaaatatctttataggcatttcaggacataaaatacttgacgaagattaaaaatggaataattttttttattataattattatataataatattgtatattcaactaaataatagtttaaaataaaaaaaatctattttttctatttgttaaagaacttgaaatggtttttttcttttaatttttaatatattacaaatttttagaaatacaaagatacgtgttattttcattttaaaaaataaaatataagggagactaacaatttatcttttaattattttatataagtaataattttaaatatatttaaataaaaattacaataattttttttttgagaaaatactttttatatgaaatacttgacaaaaattaaaaaattaaaaaatatatggtttgcatatttaaaaaaaaattacaacttattgagcatgattaagttcttcaatcatctacgtaaaaataaataaattacactaactttggaataaactaaagtgaaaaaatagtgatctatatataatctgaatctatgtcagcacaatagtttctaaaccatgtgttactttttaaaataactctcacattctaaagatataaagaaaaatttataaaaaaatgtgaagaaaggagaaaaaagagaaaatacaaagaaagattcatagtatgtcacctcaattttgtttagactttgtttgatatatttttatataaatatatatatatattgttttaaatatatttaaataaaaattacaataattctttttacaaaaatgctttttatacaaatattgaaaaatgcaaaattgtgatttgcattcattttttttaaaaaaaatacaattaattggacataattaagttcttcaatcacccacataaaaataaataaataatactaactttgtgataaattaaagtgaaagaatagtgatcaatatataaccaaaagtatattacaacaatagtttccaaaccatgtgtgactttttttaaaataactctaatattctaaatataaacaaaggggagaaaatacaacaaaaaaaaaaattatagcatgccacctcaactttgtttggactctcctttatatatagtacatgattaagttgatcaatctctcacatagaaaataaataatactaactctaggacaaactaaattaaaagatagtgatctatataacatcaaagtatatcatctatacaatggtttctaaatcaattgagactttttgaaaatagctctcatattactaaaagtataaaaaatgagaaaacaaagaaaataaaagaaaactcgtataagatgtcacctcactctctttgttctttcctttatatatatataaatatatatatatataaatattgatatgaaattctcacaaaatttaaacaatagaaaaaaatttagaacactttttattttcttttattaaggtaaaaggagaaaaatgcctattttatctccgatttgaccatttatataatttaaactaaacttatagaaaaataattaaaagaagtttttacatcacggttattctatgttaaattttcacggttattctatggttgatttttagttgttccactgttattttagttgttctgttttgttgtcttacggttttttttttataaaaagacagtattaattttgtaaaaaagtccccgtgacggtaaaattgtaaacttttgtctaaaatccagtatttttgtaaaaaattctaataaaaatgttaaaataaaaaaaaaattaattcaaagaaatagttttgttctaatattctaaaattaaaacaataaaaaaaatataacaaaatataaatatataatcaagagtgttcaaatagtcatatatgacattgacaatcactttttacaaataaaataaaaaataaattttaacttttgaaccaataaaaattaaaagaaaatattttagttgtaaataattatttttaatttgaacaaataacaatatataagaatattgaatagtacaaataaaattcttaaaataaaattattttatatatattgatattaatatattgaaatgaaactctcataaaatttaaaaaatagaaaaaaatgaataaaatatagaaacacttttctattttcttttagtaaagtaaaaaaaaaaaccccctattttcatctctaatttgactatttaaataatttaaactaaatttatataaaaaataataataagaaaatactaaaataaaaaataaataaatttgtacaaatagttatgttatatattttttaaattaaaacaataaaaaaattaaaaaaaaatacaatcaagagtgttcaaatagtcatatataacattaacaatcactttttataaataaaataaaaaataaaattttaacttttgaacaaataacaatataagaatattaaatagtacaaaaaaaattataaaaataaaattattttcataaatatatatataaatttataaaaaaaattaattattttaaaaaaaatattgataaaatacttattgggtaagacattagtcaatcacctataaaaataaaaataaaaaaacaattgttagacactacaacaaaaaggactttttatcccactttttacatttgataaaataagaagtgagataaaaa

SEQ ID NO: 14791 - DNA, 5946 bp, Cannabis sativa
actttttgactgctcccccccaaaaaagaagagagacttgttcttgctctaaaaatgaagaaagacttgttggaaatcgccggttgggttggtcggaagcaaagtgctatgttggggcgtggggacgagaaaagaaacggcttcgaagaataacgggaatgaccatggtggatacatttttcggttcttcttaattacacattctcatttctgcatttttatttaatgaaaaaattaatttgtttttactatgttggcacctccattgctgctatttctcaatgagacatagtagtgttgtttggagttctctgattattttctcttctggcaaaaaaacgacgacaaggtggatggcaacgactagccttctttttatttatactcttcgcattcacagttacatatcaccgtaccaggtgaatctccattttgcagtatgtatctctataattgttactacacttgttcagaacaggatcaacttcttctgccaataatgagcgaagtcgagcaatcctagccccaagagttcgttgcgaaaatggtggagatgtctctattttctttcaacctgacatcttctattcaaattttctagaccaagtcttttgtatcattgtcgttatcatgtttcgattgtaattgatctcttctatgttagtgatggtgcaattatttcaggcatccattgatctcttcgttaatgcttttcgcccaagatcgttgctattagaatgcttagtatgtatttcgacttcttatttaacttttgaatgcgattcttcaacatattgtctttgagattgtgcgaccatcgttttctttgccattttgtttatgcccctcgtattgttgtagaatagaaaaagtttatttctagaactccctattatcgttgttgtatgattttttgaaagacattagaagtcgagatgcttcaatggctgagcagctccaagatctgagctaccgctaagattcatttttctttgttgaaaatgtttgattttttttgtttgctgatactggaattttttctaggttggggaatgatgagattgtgctaccgatgtgaatcttcatgtttctttaaaaagtattgttgataatctcgaacaaagatttctattgattttcgttgatctcttaatacactgggatcaaaaaatttctcgtgtatatttctttgtttgtgcttgattgaacagaggttaattctctatgtatcgggttcgtcacattatgattctcctccaaaaatcataaaaaataatgcacaaatacccttcttctagtgccaaatattgtcaaagtaattttgacaacactgaatctatgcaactattcaaaggttacttgaatacccaataataaacatgcaagtactcaaagaatattgtataaatatatacaagtatgtaaataatataagatagacacaaaaattatagtagttcagcaagagcttcgagctcgacctacctagtccacttttgaaataatactattgctctttatctttattctttatgagcccatcctcctttgaatggagggggagaagtccctactcaaggtagtaggtggaggttacaacaatgtggtaataatgagactgttacaaatattaataaaataactatattaattacatttattacaacacttataaagtaagtgtaaagctcgttttaatgacacctgaatgcatggacatttatttctgttgattggtgtattcgaaccatttctaatgatactgcagctttactaaatatgcaaggtgccttccttgatattgggagttctcttttatctaatattgcgaggtccttttgatactgcaaattttctatagtaaagtccttcttgcgagagaggggaaatttatcccaatcacaatgtccaactattttatcttagtaattagctatctttgtgtcctcactagtggttctcattaccccaaacctactttcttttcagacaaaattaacaaagcttaaatagtcatcacatgttgatactgattgagtttaggggcttttgctgactaaatttatcccgtaaaccttctcccccttcgtaatttggagaggcgtcattcctttctaattctgagtgagtgtttgacaaactttaagcaaaaatgttagctagttagagcactcctaacaacttctatacttttatcctttaaagtacatcacaaaaacactactttctctatttcacagcacacttttacattacattacacacatttctttatatttttctctacatcataaaattaatattattattattttcaacactattaaaataataaatttttaacatatatacaatatacattaataaaatattatttatatattattcaagagaatgcactattcgttctctacctaaagtaagttatactggtttaagtacatctttgtcatacatatatgatttacaagagctaatggaagctttttttttttaatcatatttaaataaaaattaaaaaatctattgtgagtgctcttagcaggaacaagaatctcactaatttttttttttgatgaatcaacagtgtattcattaatccaaaaccaattatattttacaacctaatagcatctttacaacctaatagtatcttcaaatagaagacccgtgtattagaaaactatacataataacttctccaattacaaacaaattatatataccactttatatccttatggcctacttttttaggccataaacatgagattctagttttaatatcttcttttgttttatggaaaactctacctatatacacagaatcaacaagccacattttttttttttcatttttagctctccaaatctgataaacaagagaggctgtggcagtagagagaacccacttttgaatttggaaagcttagctctttcaatcccccgagtgagactttgaagagaaagagagttggcttttcacctgagctaagtcttcaactcatgaaggcaattttggctgaaaggaacaactgttctaaattttcaatttgcaccttatgaaaaacacattgagagtcttcaatcacattgatacggtgtagcctttcttttgttttcagcttgtcctgaatggtcaaccaaagaataaaattgtatttggggatatttagtcttccccaaacttgtttgctccaactaactctttcttgagaaaaatgtattagtttatatcccatggaaatagtatattttcattcgacaacaaattttgataacaaagaatttaatcttatgcacatcacatttttcgaataccaactactcgaggacttgcatattccaagaatctcagtaattgcaatgacgacaaattgcttaagctttagcaaagtcatttttgttatgtattttcacgtataaataatttgtctatttttttacccacaaatacattaataattataaattattaatgactccaagtttatatgaggtttttttttttaatttttatctagaaactcaaaagaattattcttctttaatcatgaaacatgaaagtggacatggagaattatttcgacctatatattagaattatgatatagatatataagacggggtacatcgaagaatgcaatacaatagagcccatagataagtcatcatatatgtattattatataaaaatcatgatcaagtcagtgtttcttgtccaaccagggagtaaaacatctaacactaacatgtaaaaacgatggcaaagacattgttaacctaaaaaccctaactccaaaccttctcctactcacttgatgcctgatattcgatagagcagccaccgctaccccattcagctccttcaccgatctcttcagcttccccttgaaaccttgatctgccctttgttgattagacaagtggtaactgcttaagaaagcccttctcgaactccaaaagtcgcgaccatcgtggttatgaaattgtatgattccatatgaatcatcacaattatttaattgctgttcattttcatcactgatgaacacttgggcatggagtggtcgactgcagcagtgggacatgtcactattcttttgaatatgcacgcatatggacttaattatttgtgttttgtaaaaggattcctacataataatttgatatatatagtgtttaagtctattcttctaattggctacatcatattttattaatctaatgcgtggaagtgtgaggaaatggtgatatagtttatttgtacaaataattcacatttttgtgtaagcaaatatgtcatttgtaagtttcttgagtatatgtataaatggccaatagggtttattaacttatttgttataacttacaagatagtggttggtcggcaaaggaaaatatatatgcaagtaatatagttggtgagattttggtgtgatgatatgaaataatgagaactctttattctcataatttatgactttgtaaccttcattaagtccacgagatcaccaaccataccctcacaccattcctccatgacacaatcatatttaaaacttactataatatttctatacctgccaaccaagacaccattagtaaaatccaatttccctgcagaagtcataaacgttgctggagaaatttaaataggaatgaaattagtaatttcatattaccgaatggagttttgggttcagtcgcggactagagcctttcttttaagacatttgtagcactgctcaagattgtacaagatggcatagaaaaatcatgccatccttaggataaaattctgtctcgaactgccactctacagtagacgagatacaaaaaccaaaatatattaataccactgatggtagatcgaaaatcgttttatagaaatctatttttgtttatataagagatgtgtttctcttgttagttcatgagttgcactacatactgaatagacttagaaaaaataaatgggaaaaaatacattttaatcgaacatgtcattaaaatcactacaagaaatgtcacatttgtcagcacatttttgtgctgacaaaagtttggtattgcgctggtaaaatgaaatttacttctgatgtgttggaaaaaggagttggcgaaccaacgttggtattagaacttttgccagcacaaaatcaaaagcgatagcaaaaatgatttttcccggcgcgtaaatacgctggtaaaagttagattttagccactgcaaatgtgcgctagtaaaactttgacttttttgccaacgtaatttgcaaaatggattggtaaaagttacttttaccagcgcagtagtgaactgtgctggtaaaagtgacatttcttgtagtgaattgataataagactatgtaatggtaattagtttaattaaacacgttttcataatttaaataaataaataaaataataataataatttttttgtaaacttgaatcgaacggacaacaaagctcatgtgatgagtcaaggatgtgtcttgaccaattcacacaactgagtacccgttgggaccccaatccaagggctaaagtttctctttatatataccttgtaaataaaggctcatattgatgagtgacagctatctacataccacatactaaaatacttttttttttttttttgaaaattcactaaccttttaaaaagtttgaacaagaacaaaagaaaaacttaacttttaagttgacccattcaagcacgtggtatgatatcatcaccaagacataatacaagtataatatagttctcccctataagtattattagggacaagaaaaacaatcatccctaattaaagggtacaaaagctcccatcattttctaatttttacttttagggttgaaaaatatgcaagttagaattttaagaaactcaatttaggtcaaacttgagaaagttgtattttttttttttttt

SEQ ID NO: 14792 - DNA, 9097 bp, Cannabis sativa
tggaggccagccttcggagatggaggccaaccttcagagatggaggccagcctttggagatggaggctagccttctgactgcctattgctgactcgccctgctgggatgtttgggcatgccttgctttgggagttttgatagaagagtgaagcatacacacttttcctccttcttcctcggacatcatgtcataaagggagttttgaatttccctcttttaccatgatgttagttagagtcatcgttgttgcgcttgcctccaccattctcgttgtttgagaattgatagagattgtctgcgctggttggcatgttacacaaaatatgatccaaattacttatatcaatcttatgtctgaattttaaaaaacttgataccaaaaactctatgtactatgtatatgttataaacaaagaaaataaattggagccaaaaaggactttatacctaaattttttagcttggtcatgaaaacttgctaaaaccaaatgaaatttgtgaaaagaaaagttttaagaaattcacatagcaaacaaatcagtgttaaagtcttggaccttcgccaacgagatcgactcaaaaaattagtcatggaaattgatttcacaccgttgccaatcttctaaaaccaatgttagatgaagatgggattagtcatgtaatgatcttcatcgtcgtcttcaacctcgttgtatgatcttttaccgagagatttctccatcgcaatggagacagactcgagtttgctgattctatggaccacgtccttaaaagacaatctccataattttcaaaatatgattagtatagaaaatttgatatgtaagggtagatatacaatgaaaaatctaagcttttaaatgcaaaagttatcatgtttcttataatttttcctacttaatcatcactgctgtactcttggatgtaattttatagatatatcataaggaaatgaaatttacatgttccggcttgagaagtaaactgttctccaaaatgacgacctttccactctcacagagtattttagcacatcttcgtttgtctaaatcaaaacatttctccttgcagatctgtacaaattgtgagtaagcgataatattttgaagattctatctcagccttgatttcacagcctaacttttatgtatcctcaatcgcaagctccgaccactccacaatgaaatttttgtcgcaagaggcagtgtaagaccgtccaaatgaatttagtcttgaccgatttccttttccttgagtttttcaatcagatttcctcccatttgtaatgattgcagctccagtgacatcgattcaagcattactctcttgtgaacagagcgaatggagatggaattgtcaatttgcaaatactgaattgccgatttgttcactttaattttgatttcttagatgtccacaaaatgatatgttttggtcaatagcaatatgggtttggtttaagggagaagaatggtgacgaatcaatcacaatatagatttagatgggtcaaatattagtcaatttttattattataagattgagtaacgtcttaacggatgttaaactctctgttaaggttaacaaaaaaataataaaaaaatcgttaaatcaagaattgttgttacataaccacttttaatatattaaaatatacattgtgatgatgatatattttctttttaattattgttgaggattctgtgtgtatggaatcttatataatagtgttttttttaagaatagcttatataatagtgttgagactcagttttggtggtttagtataaattatacaataacaaaataacagtaaatattgattagtaaaatattgattgtaattagatacatatataaaatgaatatttaattatcactaagctagtacttatattatctttgttggattatagttgatgataggctagtgtgacatgggttgtagtgatccaaagtaacaacaaagtacagcacatactaaattaacatactaacatacttatcagaaaatcagaaaaaaaaaaattaaaaaaaaatactaaattaacaattaataaaactagattaattgaagacaaaaggggttcaaaaacccaaatcaaggagaattaaattattgatttattgaagggatatagtatattaggtataaaagcactaaaaaaaaatgtataaaacctctacaaaatgtaactataaaatcgttgaattcctttctccaaagaattaaattaaaatccactccctcctacgctaaaattcacacttttcttttttacatttttcattcatttcataacctcatcccacatgtgtgcactatcataatatttcataacctcatcccacatgtgtgcactatcataataacttgagtgaaaattaatgtcttgaaattggtattgtacatgaaaaagaatgccattactcattagcatttccaaactaatgtatataatccaaattggcattaattgtactttgtataggaactaaaaacaagcagagtttaaagggctcctgctccaccattctccatcttattatttgagtctttagctatatttttctcctaaattgtgcttgaacctcagataaggctgttttaacctcctcatcctctggtgtctcttctagcaaagcctcataatcttgtattgaagcttcccaccttcccaactgcacaccatacaattcaaacaagaaaaaagtgtccttaattgcttaccaatattctattcacactataacttaatttgtgtgcgtttaaagtcagcaaaacatcaagaatttaagaaagtctacttatattaatatgtggagtttctcgttctccatactctctctattactaacttgttaataccatacccaaatacaaaatttggattgaaatgtaacccacaaacgaatttaatatcaccgagtctagtgtatggtagttttggtgaagtgtaaactaaatatgagtaataagaaacccatataaattgcacacactatttacaatttacagttgtgcccacaataacatgttttttttttttttgaaatgtcacaataagatgtatttaatcttcacaataaaattaaaatgatatcattcccatttaaaattatatattactgttattatatgtgaaaaaatgtgtctaagcattcatctttatattttatggatcatattataagtttatagagataattatattgcacaattttttttataagatttacaataataagacacaaaatattatttttatttaatgcattgatttaataccactttttattttttttatttttttgaaatgtaataccacttcttataaaatataatatgtaatgatattttaatttgatttttcatattttatttaatatattatagctaaaattaagcaacttattttaaaattttctaacggttagaataagtatttttcttttagatttatcaatttgttagttaaggggaattactttataaatatcatttttaattttttttttcaaatttatagtttggtttactccggtagtttttatgtttgttgctatatggattttagttgcgatttaagttacttcattaattgctatatagatttccgtaaaaatacaaaaatatatatatatatttaggtataaatatgtttaattagttttatacttatctaaaaaataaaaagaaatatttaaaattggatatatgtttatttgacaataataaatatcatgaaaaaaaaaaattacacaatttgttatttataaataattttgtgtacatataaagaatttttttgttatttattttacacatttttttatttataaatagcttgatttatttataaagagtttgttttacacattttttttcagcaaaaccatcttaattttatattttttaacacttaactacaaaaataaaaattttgacaacaaaacctactaaactctcattttgttttgctctttacacttttgttaaaaaatctcaattaagtgctacagtggactgaccacgtatacgtacacttgtgtacacgtagcaaatttttagtggtctacataatattacgtttgaaaaaatagtttaaaatacttaaaaattgaaataatttttttaacttttttttttcttcttctttctttcttaaacatttggaaaaccctaaatatctctttctctctcacagctctccctcccaggccctctgtttctctttctcgtctcttcgtggtggccctcgccggaggcgaagcacctaggccctcgtcaaagctccttatttctcttaagccatctgtcatctggagctaccttgccacctaggacctcaccggagccgaagctccacgtctcttctctctctctctcgatctgccctctctttctctcctcgatcttctccctcctaggccctctctttctctctctctatcgtctcttctctctcttcatggtggacttcgtcggagccgaagcaccacgactctgactgagccatctctgggtcccattgagctaattaaagctcgattttgtttttcccttattgaaaagttttagatcccaattgagcatctccaggtcccaatttcgtttataatttttgatttaggttaaagttgtggtggctgttgtgatttatggtgatatattttttttttttttgttatttttggtggtggctgcaatggtgtggtggtggctgcggtggttgttcttccaatggctttggtggtagtgactgtggtgacggtgataatggagaagaagaatgagaaggaagataggttagagaggagcaaactagggtttcaggaaaaagaaaaaggaaaagacaaaagaaaagaaaagaaaagaattattttttttatataatttttaaactattttttaaaattaatattgtgtgaaccactaaaaatttaccacgagtacacgtggacaatttactgtggcacctaactgagatttttttgacaaaaatgtaaagagtaaaacggaacggaagctcaatatgttttgccgccaaaatttaaatttttgtgattaagtgttaaaaaacataaaattcaagtagttttgctgccaatatctttattttttttttagatcattttattttgtacacatttttttatttgtaaagagttttgttcattattactaaatatttgatacgtaaattagttgtgataaacttatttaattacaaagagtgatttgtatatttgataattttgtaattattttataaatatttctatttatttacagaaatttttttacacaatatttttctaaacacttttgtttatttataaagagaatttgtttacacaatttttattatttttttattaactattaattatttaattggtaaattagttgttataaacttatttgttaatttatgcattgtattactatcctcatttaatacatatatattatttaaaattaaaataatatatatttttaatacaaataaaagaaaatttcttgattgttgtaatttgtttaatttaatatttttagttttgaggtattttaactttaatactaaggtaaataatactgtgtcgtatttatgtaatttttttctttaggttgttgtatttcattagaaagagccgttagttatattaatgtgtgtcactatcggtacccctataatacaatactagttattagctaaattaaaaaaattggattagaaaataatttaagtatgaagtagaaagtagatgttgttagtgaaaatgatgatatccaatctataagtaggagtagaagtgtattgagttagtcaccttagcattgcaatcagctcttcttagcctagccttggcataagagggtctaaggttgagagcaacggtgcaatcattaattgccttgtcgaattggccgagtttagagcgacatgccgcacggttgcagagcaacactgagttgtaaggatcatgctctagtccctccccataagccacacatgcctctgaaaatcttgatgccttaaacagctcattgcctttcgaccgagctgtcgctatgcctttcgcctttctcatcaccccatttgcttctctgttgttcacatccagtctacctgccctttgagctgcttccacagcatcatcaaatctttccacaaacaaacaaatttaacttgtttgtaagttttaaccaatttctctaaatttgttttagttatgtgatattatatcagatcagtattgagttttacctgcctgaggccaaatcaaccagcgctcgtgtgactaacaagctagcattgccaataggaccaagaactttagtacattcgtccacatcaaactttggacctctcgacagtgctgtgtctgcctcttggtgcctgtggagttttaacaaagcctctgcttgtagagcataaatcttcacataaaaatcacaaccaaaacaaacacaagacaagtctttcagctacaacaacagcaaaattatttgaatatgtaaatttggttgttttataatattaataataataacctgtggggctgaatcagcaccagctgatatggcaaaatccgcttcctttataagtgtgttccaatctcttgttttacgagcctcggtgcacctgttcagatgtatctgaattgatttcaccttagctagatcatctctatcagcctcttgccctgcatgtttgtaatgatacgtagctttttctggttcccctaatctattattacacaaacgtaaatgtacacacacaatcattaaccagaagcaaaaccaacaaaaaggtaaatgtactctttttcataatcttgtataacttcttagactgattacgaaaaagtaaaatgatctctaaaatttacaacaacaatcaaaataaaacataattatgtgttatcactggttgttgtgtaacaagtggcgtcgacaatccaaataaggtgtcgagaattataagctactttgtagagaccaaacttagcaacaacaatcaaaatgaaacattattctgtgttatcaatcccttgtttggccaacagaaagatcaatcataagttcaggctgaaagtaccaaataattaaaaaaaatccaaattattagaaacaagtaattgaatatttcctatcaaaaaagtaattgaataattttctatcaaaaaagtaattgaatatttcactagtgtgaaaaatgcaaatatggtgtcgagaattctgatctattacgcagagactacaaaaagattgtatttcggaaaagaaaaaagagaaaaaagtatacctaagatataaggttgccaaacgaagatgagctctatgataatggggttcaattcttagagcctctctacactccaaaacagcctcaagaagtctaccaagggcagtcaaggcagcacttttattactcctataggaagccttatttgggtcaatagaaatagcagcatcatacaaagccaaagcctctgcaaatctcccattcttgtaatcttcattccccattatcttcaacgtttcagggtccattctagtcgatatagctctgcacaatgacccactaggaactggttcactggttttattattattactactagtagtagtagcagtaacatttgtgtaattattattaattggattctcctctctcgacctctgcttcgaatgaacgtgattatgattattgttttgattatgattgtggtgattatgatgatccagaacagacccattaggctgctgctgttgttgcctgagattacccaaattcccaaaaagcataacattgctagaagaagctcgaacgagggtactactacctttattcttctgatgatcaataatcatactctcaagctcaccggatattgtaatggattctttaggtacctttctattagtaccttggttaacataagcgtacgccgacgttttgttctgcgtttgataacaagtctcctgctttctattgtcgtttgtgataatctgttgctgttggggtctctgattgtttgtcgctctgctatttacaacgtgtttcgggtgatggggttgttgttgatgttgagcagatgaaggtagaaacgaaatctcgtcggaggtaccacgacgtcgtttggagtcctgggtggctgtcgttttggcgaattcattgttgctgtttttgtcgtttgatgatggaatagaactttgagttgtcgtttttttggcccataaactttttcttccgaaaactgcatttatgaggccacacccagttttcctctccggcgagatgtctcccattcctgttatcaaacttttacaaacacccctcttaaggggaatgagagacagatacaccaatacactatatctatatctatatatctctggtttttgtcaatgctgagaaccataaaagtcaaatctttggctaaattttcttgcttaaagaaacaagaaaaatacataaaagctttagggacaactaaccccagaaaattatctgacttaatgcaagaaatgtgtgcctttgttttaaaattttgtgtaggagaacagtgcatgacatttttttttgttcttttccttccttgtgtctttagacagaaaatgtaataagaaaaaaaaaaacaataaaaacacaaacgagttatgtttgtaggaaccttaattattattatttgatttgtctgacttggtttgtttggtggggaagttggaagcaggagactcggtcttggatgaaataagaatctctagatttttagaaacaggtctgactctcgtcattctatttctatgtatcatattggaggccacgttttttttatttattttatttaataataacaataatagtaataaaatttattatattagaaaaaacattattattaataatattataagtaatcatagaaggaaaccacgttaatgtaccttctgagtatgctatgcatgtttttaacaaacaaccagctgtgtgaattaagtctaaattaagtcaaaaagattctcgtcttctgaaaaaagtggtaattattgtgtttgtattacaatcagttttttaactttta

SEQ ID NO: 14793 - DNA, 5110 bp, Cannabis sativa
  modified_base (3020)..(3023): a, c, t, g, unknown or other
tcacttttctacttttaaaaacagaaaactgattaaaaaagtgttactaaacgccacctataaaaacaaaaaaaagacaaggaacaaattaatcatgataaatataaattaattatagtgtattatgtaaaaaatatcccccaaaaaataatactacaaaaataattggatgagaaagttaaaatgaagagaaatgatgtagtaaataatggagcatcttgcagatgagttctcaggacctcgattgggggtggtgacttgaatgaaattcttcatcaatatgagaagagtggtgggccagctcgagctcaagggtgtgtcgatggttggtggggcgcgaggactccatccatatccgtgatgattcttgaatccttaaggaacatgtgggtcgatcctactctttttgagggaaggttgatgttgagtgagtttgtgatcttaaacttgcctcgggtgattggaatgtcccactcatcgtggaactttttgatgatgcagagactaaatccattttgtctattcctcattctagctttgatcgacaagatagactaatttggaatttttctgataatgactgattttttgttaaggcttgttattggagctcagtttctaggcttggttggggtaaacattcttcttcttcagggccatcgaagtggtggaattttcttcggaagttttctcttccccctaagatcaagaattttatctagaaagtaagtcttaattttgttccatcctatgccaacttgaataggcatggcataaaggcttctatggtatgtcctatttgtcttcaaagtaatgaaacagcattacaggcgttatggttatgtccttctcttaaatccattcggttcggttggagtttgaaaggtttggataatttaaagatggcttccagtttaaatgaacttttggttggggttatggatattttattcaaggtaaaagttgaagaatttcttgtcctctgttggagaatatgacatcgtcgtaatacatttgtacatgataataagcttctttctgatgatatggccagtagctgggctcttaactatctgtggtgatactaggaagctcaaactcaaattgctccactagttccattgagcttttcactaatttctcttggtcatattgggggtgcggtttctaagttgattttggaagagtacaatctatttgttgatgttgatacttgctatgaaaggtggcaaattagtttaagggcgatggtgtgtctcagtatgatggtggcatattatgttcagttgctacccctatcttgggtttgcttgaacctcatgtggcggagacttctgcccttcttcataagcttctcctttgtgtgcaattgagatatactcgtatcaatatattctctgattgtttgcgcttggtaaattctttttcaaacaagagaaatgcttgcaatgagtatgacattgttcttacttatatccttcacgttcaaaagtccttttcccatatctctatttctcattgtaaccaattgctcattttctagctaaatttactctttcatttgaaacttctcaagtgtagtctggggtggcaaaacgggtttcgacacggcacacgaacacgaacacgacacgaattttacgggttagggttaggaaaattagtaaaattaaaaatattttatttttttttaaataacaaactatatatgcataaatgtatataagttttttaattgagcttaaatttattatttttctctacaattttagctttaataatagcaaaacgggtcacagtgggtcgatacgaacacgacatgattttttacgggtagggttagggttaagataattagacacgagtaaaaaaacaggtcgacacgcatgacaaaaaatataaaatgagtcacataaaatatgacacgaacacgacaggatgacacgttttgccactgttcaacttactttaaatagtttatgcttgtattgatttcacaatctctttgactttgtgccttttgaatgaatttatttatttttctaaaaaaaaaagagagaaaaaattgtagtaaataaatcataaaaaaaaaaaaggaaaaactagaactaaagtataaaagtaaattcgtaccaaaactaccaatcaattcacaacccgaagtttcgtaaagaaacccccaccgcacccggcggccgtcacgctccaatctccgtcgccctcgacctccttcagctcgccccttcgcaattttgacctaactcaggtttgttcttcgttcccttttgtacgattgattttggatttcttggcccaactccatctctcatcagttactttcttcgaatacttgatttgcttactgaaactgtatctgaacttaacgagggaaggagtagagtaagagtattcatatctacatggacttgctttgcagggtcagggtggacattagaacagtgtgtttgagtttggagagatagtagtggagtgtggaggcaaatcctgaaaattattgaagaagaagaagaccacacaatgcaacagcaacagcagaagaagaagaattttagaaagagatgcgtttcccctgaacctgagaccgacgaaggccaagatgaacaagaaagaaggtttctttctttctttaactgcagttttgaatagaaaacgcacaaactgtaatgcttttcggggttttaattttgggctttttttttttttttcacagaatggctttggaagaggtgaaatttcttcagaagcagaggcaaaggaagtcggggattcctgcagttgtcgggggtgaaagtgcttttgatatcaaaaatggcattagtaaaaaggccgtggacgacacccaatctcatcgccatcagtatcagtctaactctaaggcccctgccgatccctcagatgtcgacaaggacaaggatgacctcgttcttcaagacacttttgctcaagaaacagccgtcatggttgaagatcccaatatgtatctctctctctctctctcnnnntctctctctctctctctccagtttcaagcttacaactttattttccatgaactatcaatttcaggctgaagtatgttgaacaagaattagcaaagaagaggggcaggacaatggatgcaactgatcaaattgagaatgatttgaagaatgctgaagatgaactctacaaaatccctgaccatctcaaagtcagtattcacttttccttctcttgctatatttttcacttgtattaggtaaatagattgatttgattgcattttcttttacaggtaaagaagcgaaactcggaggaaagctccactcagtggactaccgggatagctgaagttcagcttcccattgagtaagccccattgctctatctattctcattctgttgctgagcttgagatacgtaatcatgtcattattacttattcactgtgatgttttgtagatacaaattgaaaaatattgaggaaactgaggctgctaaaaagcttcttcaggagaagcggctcatgggccgaactaaatccgaatttagcatcccttcaagttacagtgccgattactttcagcgtggaagggactatgctgaaaaacttcgaagaggttgatttcgcatatatataactttatcataatattgttagtgtacacatattactcatttatcttttctcattgttagtcactgttacaaattagtgagtttgtttctgccttctatgcagagcatcctgagctctacaaagacaggagctcacaagaagaaggtggtggtgcacccagacaagccgatactggcacagaggcagctggacaaaggcaagctgcaactgatcaatttatgctagagcgcttccgcaaaagagagcgccagcgggttatgcgcagatgacatggtttcttgtgttcctctattcttctactaatgatatctggtccttgattatcaacaagccctttgaccatttggtggatgcttcattggagttgctgaatgaatctctgctcctgccttcatggttgaagagcgttgcggttgcaattccagttccggttccagttccagttccacacattatgagaagactttttggctaccacacaaccgacacttggtgcccctaacttacatcactctatgtcaaacgtgcaatttccctcattttcaattaaggaaatctaatacatacctttgttttcttcttcttattattctaaataagatttaagcgcaaatttgtttgaaaatgtcctggtgatttaaagtcatttcatggttgagaagtaattcttatatatttattaaaaagagataaattggattgccctatggctctctgtgctgtgtatattttcactatcagagttggaaatgagtccaacttcttttaagcctttcttggtgggctttctggcaaaaaacgcagagccacaagccaagaaggcgcagtacataattacttgagtaaaagtaaaacaagaaaacgaaaagataataaaatagaatacagaataatacaaagtttagataaattagtagcagaggcgagctagtggcggtggtcctgtagtagttgagcttaaaattgaactttggtggtgaaagactggccgaacttccaattagaaggcactgcattgagaacggttcgggtcttaccatttgtggcttgaatcttaaatgacaaggtttggccgttgagatacataaggctctgccaattggaaccccagtttctggacatggtttcccatttgttggttttagagcctttgatccatacgttggaaatatctccagttcctcctacgttggatatgagcactaattcaaagtagtctcttccgttaatggtgaatctgatgcctccacttttcttgcatccaactctgaaaaacaccatatttatatgagacaaatgtattataatatcaaatgggctagtagcatataacatatttagttagtacatacttcctatagaagatgggaacgatcccggctctgtatttggcaatggtctcgaatgcaggctgagacatgtcgaaatgagggcggggagggttgcaccagccgccgttgtcactggctt

SEQ ID NO: 14794 - DNA, 11718 bp, Cannabis sativa
ttttaataaaatattaattagatattaaattttacattataattgtgcattagagcacaaagttaaaatttggtgtaaatatactacaaaactacttttttgtgctaaatacagcacaacttttacatctctcattggagaatggagatggtctaagacacaattaattgtacggaatgaattagagacttaactaatttgtgaatttcctaccaaaaaaaactaatttgttggagttagtatgcagtatattagaaaccttaactctcgatgtatacggtctaaagaaactgggttaacaaattgttgggaagttgcgaattagtctagtagaaatgtctactgatacataatatacactcatacataggatccccagcagccataatgtcacattcaacaagaaagaatgtccaatccctagatatgcttgtataaatatattgaactgtgtatatagataacaagtacaattcagtaaggtgaaatctatgggaattgacaagacaagcttttcaattcatgttttcagcagagcgataatgaaatatttagtacatatttatttcattaaatgcagaggtcaattcagttcgttgcccccaaattgttcttccacacctaaaatgccccaaattttgctacagtttagcaataactaaaataataaacaagaaaaatacaggtgaatatgcatttgcatgggaactagacagccaagatacgttgaacaagcaacactatatacaacagctcatgtaacagacagacaaaatatagttttataattccttttctttgtaaccttcttatcccccaccacacaatgctttgccttcaaaattccagagaaagacgatgacgggcgagaacaggatctctcgagtaaccttatagggtagttctccaccacacttatcaagcattgaaagaaagctcaggctcctcccagcccaactatttgcaaagatgaagagacttaccggcgttgctggcacatctgacagacaggagctgatctgacattggcaaaggtgcaatgttcacaagaccagtggcctgtgtcatctatgtttctgtttgatttggatgttgttgccttgcttttcccggctttccccttactacttgtacctcccaagctctttgagtttgctgtcctgctacacgcaccatgtgagtccacatcggataggccattctctagagctcgaactaaattttcaaagtagtttcgggtaacactgtttgccaaaacaaataattagacaatttgagaagttgtttatctccgtcatatatgacaatttcaattacaaagggctgagtattttctcatccatcaaggactacgataaactaataaagcatgtgcttcaaagatctaacagagttaaaatgagacaataatcaagtgaaactggactttctgattcagagtaaaaaggtaagtatattgttggtttggcaactacctggtcagtccagcaagttttgtgcgaaactcattaaagtcttttgattggccctctgcattgaggtaaacatgtaactccttctcagcacattgatgaagtctttccaacccagactcagcctcacctgaacaaaaagccaaagttaaaacttgaaagagggcaatatgatgaaaagtttagcatcgaactcaagaaaacaaccccttcaaaaaaaacacactcaagaaaacaactaaccttgcaagtattcaaagaactgtctcttggcatgttcatgctccggtaaataatatccataagcatatgtccatttcaaaacacgcctgcactcaacaatctgaaaaggaaaaaaaatagtatttcatttctttgagccaagaagacataccctaaaaaaaggtcaataaattattttacctgaagccaggcctctgttatgaactttagctgtgactcaggttggcactgtatgtcactcagcttttcaagctacaaattcaaataaattgaaaaaactaaataagtagccataggaacaatctcaggcaagtaaatgtaaagcaggataagtttaagaaaaaaaaaactgcctcggtccaataaaatgaataacataatggtgaatttaagataaatattgcttaagcaaaacaaaggaagaaatattgtaactcaggatagttaaaacttaagagaacaaaactatcataattgttcgcagattgttttgaaaatcgggaggcaaggcgcaaaaacgtacatgaggctacgcctcagctgttgtcattgaggcatacacctcacactgatgaggcacatgcctcagccttgggctgttgtttcgtgggctcactgggcttttgtttagagctatttttcagagcaatttttaggcttttaatgacttgaatgggctttagcttgagccttttattagcaatttttgaataaatagaataggaaaaataaatgaaaccctaagatgacgtttggttggaagtaatgaaaacataagaataagaatgagaataggaacagaatcaaatttaaaatgcataaaaaaaattgatatctagtattggaactagtattggaataatatttccttcctatttccttccattttccattttaaaatggaatagtcattccaccaaaatgattgaaaattcattcaattggagtgacattccaatactttaaaatgcaaccaaacaaaagaatggaataaatatagtttccttttcattacctccaaacaccacctaaaaaccttaaaccattgaggcatatgacatcccttcagcctctaaatcacaaaattgcgacagactcatggcagccactcccaatcatctccttcatgcactatctcctttactaatgtcaaaatcgaggccgctcctaggctagtattggaactaggaatgtcttttttataggtttagaatcttctattgggatgtaaaaaatcccaagactaagtaactagcttattttcaaaaaaaaaaaagtaactagcttaacatccttagcgatcctatttttaacagacaatatctgaccctattttgatctattacctaatttaatgctcttattatttgcagctagaggttattcagctattttctgatttgttattcagcttgaggtttccatttaaatcgcagctctctctgtatttcattaattcaaataataagacatacttccacagacacagtggtgtttcattttctctttgaaaaaagaggaactaaagatgaaactcaagattggtgcaaaagaacaaccatttgaggagcatatgagtcccacattttaatacatttataagaatcctaaaagaaagtcatgcatggtcaaaagtatcaacctctcaaaaattaccataatgaaagagagaattggaagaacaaactaattataataacatccacctattactttaagtgctctagaacttgatcatgaagctattaacatatcatttgcatcataaatagataattatcacatcaagaaatgtacagtttcatagcacatacactagatcatcactaaactaataatattggttcagaaaaaaataaactcgtaataatgcttacatgcacgctctgcatttgctgtaagtctgcaagtgctttttgcctagactgcaattaagatgaaaaataaaaaatcagactccattaagtgaataataaagcatactatttgttaaaatctcactacaaagatggaagggaaatatctattaaatgaactaggaataaagaacatctaaagagacaataagatcacctttggaaaatgggtttggatattttgacgggtagtgggataggattaaataatatttaccaagtgattttgtagtggaattagaaagtggttttgttgtgaagttagagagactattgacaaactaatccaagctaaatcatccctgaatatgggataactcaaatctcattgaaaaacttggcatgatttatcctatctaatctctcatctttatgtatttatattgtaaagacaaaacaaaataactatcacccaacttattttctctcaatactatgttttatcaatttttcaatccaaaccagtccactttccaaacgtatccaaagggttatatttcaagataagttatttcatgctttttcctttaattgaaataaaacatgcagaaagaataacagaaaaaagaaaaagaggattgcttcacaaattgagtgctcaatttctgctgcaattcattaccagagaatcatctaaaaaactgaaacatcaataaccaaaagaatattagcatattttgtaaactggtacataccgattggttagttgcccatctttcgtaataatgagtatacctctctagagaattcttggccatctctcttcttttctcagcctcatcatactgtaaaattcactcacttacacacagcacaaaaagtctaaagaaacatatctcaagtaacaaataaacatttaagctgcatcgataaataccactccctcttgctttgctgtctcgtaacggttgcatgcatagaaaccaccagtcctctcaccatggtccgaccaagcaccaaggcagagcctagatgcataaattgaattgcattaggataaagcaaccacaggcaaatttcatctcgaaagaaattagtcagagaaaagaaatggcccaaaataccaacaaaaaaaaaagataatacaaatagtaaaaataatgggcttcagaaatctatgataaacaatgttctgaacaacagacaaaaggctaaacatatacaagtgatattaactaagaacaagaacagaaaagtattgcaacaaaacaccccttcatagaattacaaaacaaaaagttaattagaaaacccataattccaactaaactgactactatcttcagttgcaaagaaacttaccaacaaaactcaaatttacaaggtggagtgcacgtaatatgcatacacccttggtttttctcaatcggccgtttgcactttggacagggtttagaattagccaatatcctgaaaatcaccaaagatgtataaattagaacacggcatttgtaccaaaagaagtcttaatagagcatcttgtaaaggcagtgaaccgagccgtttataaatcccaactaaacctaagactacttgtacatgtactcatgtcatgatgtgaacctgcagttaaaattactttctccctgaaggtagccctgatttcagaaataagtgattcactcccatagtcataacacaggaaatccaagtagggggaaagatgagaaactcacttcatgtgagccatgacatgtctaagaaaatcacaatcggagaaaataaaaaaagaaaaaaaacttagagtagccatgatttagaaaaccaaggtggggatataagatcacctcatcttttctagaattaacctccaaacttatgctgtcatttctcttttaccaatatcccagctatactatcattaagcacttacttgacatgcttataagttaaaactatttgagttggagggggggatcaatgttgcatggcataagattcaaagctaagttgaaaataatagctacagagaataaatgcattttttatgacacctgatttcccactcaattaaccaaccagcacagcaccaaagatttgctgccttcaaaacaattgcatcttaatgacagggtccccaagttactggtagccccaggttttaatgcatatggaaaggaataacaacaaacaattagcagaaggatgctttgatatttgatactaggctattcatttcatagacatcatattgctaaacaacatcaataatgtggtccaccatcttcagacaaaaagtaaaattacaatgtaacaaaagttaaagtatggccagacataataactaataatcatgtcatgtaggcttgtaccaattcatattttcagattcagcactattcttcaaaatccatttggcaacagtgccacaatcaactggccggtgagcttcctccgtacactgcaaagtcaaattgtaagatcagacatttttaaaaaagtaaaaaagaaaaagaaggtacttctacgtagttacccaagaggaattgaacaagccaactgagtattaggactaaaaaaaggaccataactttaagttccatatatttgagaaagtctctttcagacaaacagtgagctcaacaacatatctcagaagtcatatctatgggacacaatccacacacaatccacacacacacacacacacacacacacagagagagcgagagagagagagagagagaggttacattccagcaaaaactgtatgaacaccgacaagtaacatcataacttccgctaccaaccacaaaatctacagcataatcgcaacctggagctggacaccatttggtctgcaaaagtaacccacaaaaatataactctataaaatcaacaaaccacactttcgttattttgcataaaatattaaacagcactgacttagcataatcataagtaaatgatgtctcaacaagaataatcatcatgtacagccacaatgtcaagcagaagtagagtggggaaaaacaattaacttgtgatgaacttacaaatatacaaaatattgtagcggaaataagagagaaactgaaagccaagcaaagaaactgtacatacagaaaatacttacgaaaaaagtacatatacaatttttaatcagcaaaatgagcaattttatgtatcaaaaagtcttgacgtgtaaagcttcagtaggacttgaaactacaattctacattttcatcagctaaaaaaatacttgatcacactctatgcttagtttaacatgttcataatcataagtaccaaaggaagatgtttctagatctgtatttctaggttattatacaagagtgtgttccacaattcaccaaaatacaaagttagattaattaccttcctattatcttcaacataagatctaataaagtaacgacaatatttctccttgtcttcatcagaagataagtcattgatcatatcttgaccaacagcagcagcacaagatggatcagggcatcgcaacatcaaacatccgggaccatcattaatggatgtactaatataacctaaaagaagggggcaggatgagatggaaatgtcatatcgtaagaaaaacttccaaacattaaaaaaagttgaagtggtaagtaatggattagcagaccactaagtggaaaacaaaaaataaatagaacaggagcaggtaaaatagccagatcataatcaacttcagcttcatgttaggtgctcagcactgaccaatgtttttttcaaaaaaaaaaaatcatatattttcatttcatagtctgttccaatcaaatactagaacatttttttcttcttttctgaattgtattacatttttagagtaatgatagaaacactctcaatttgcacactcaaattaatatgtaattaatctaatatttttagagtaacaatagacattctcaagttgcttactcaaattaccactatgacgtgtaattgatcttatccatggatattttaagtgggtactacatatttaattgtatgactaagaataattacacatcatagtgtgtaatttgagtgttcaattggaagtgtatctatcattacacatatctttataaggaactcaacatcactgctgattgttgtagctaatcactaataaactagttagaggttaaacctgaaaggcaatggctgattttccaaggcaaatgggcaaattttgattctatgggaaaacttaatatgcaacaacaaaacagagctaatcttccatgataaatgtcccaaataagagaaaattaaattagatttaaactacaaaagaactattaaacaagtgacatgggctaggtaggactccagccataggattaagaataggcacaaaagtcacatcatcagccttgaataattaaattctacaaaccttacaataaatcatgacaagctcatgataagactaatcagaaattaaacttaggttggtaagttcaactgagaatattactgttaccaccaataagaagtaaagtttcactcaaaaaatgaactagattcaaatgtaaataacacattctgaagctgatctgtccagcactaagtagtaaatctgaaatctggtaagttcaactgaaaatataattattaccaacattaagaaggtttcagtcaagaaatgaaacagattcaacaatcggtaattcaggtagaattttcctttataacagcaaccttagaaatgtaaataacacattctgaagcaaacctgtccagcataaactacagaaaggatgaccacaagcagcagaatgaatcttatcacgaggatgggcttcaaaacaaatcccacaagtcaactgtcaaaaattaacaagcaataaatattgtatttcagtttgagagtgcacaaagtcaataagaagacatcagcataaccagcttccaaaaaaaaaaaatactacttatccaacaaactaaatgtgacatgcttacttctttggcattaggatattcaatagctggtctctccagaaagccaacagccctccgaaccttgtcctcgtttgcaaaccactcatcatgtactttactaacgctcctgttgatgaaagaaacaacagtttagtaaaccaaacatacacaccaattcatcataacctcaacccaatcgaataagaacagaaatacaagttcgggcttaaaacaaatataactgaaaaataaattaattcttccatgtttacctgagattatagatgtagaatacatgtatacatatcaaaacaaaaagaaattaatatttagattatatactaataacagccacataaatttatcaattatagatgtagaatacatgtatacacatcaaaacaaaaagaaattaatatttagattatatactaataacagccacataaatttaccaattatagtagcggagtagtatgctagctgcaccctttggaatagaaagcacagtagaaatcctcattatatcttcctcctgacgttggcaaatatcttcttcagtcaaaacagtatagctttgctgtgacaaggcaacattaaattacatcagcaatggccagtggccgctattaataattatacagaaaagtagcaacactttgttgtcatcatgccaatacactttgccattctggagtaaacatgtggctagaagtcattatgtcattccatttttcaaagttgctaatttgctaacaaagtctgcaaaattcacaaataatgcttctaaaattgttaaaggtttggcctttagctgctgaactcaacatgctaatcaaatctggaaaccaaatatccatagagatgttactcttaaaccaaaaaaaaaaaagaggttcatacagatgtacacatccataacagctgaacaagaattgaacacttcaacataaatattcttatcctcgacaccatgttccttttctttagaaaaaaaaaaaacaaaactttacaattctccaaacttgcttaaccccatgttttgaaattaagactgttgacatactacaaaatttgaatatcatgaaactatggcaatctctatgaaggtgtccaggagggacttcaaccactgtaagacctagtgggagcaatggttaagctaccctattgtgtgactactttgctactttgctaagtgaagatagtaaacaatgccataaaatcagcccaaaaattgtgaaacgaacaaagcagccagccaacacaaagatcaagctcaacaattactcacacaaacaatagtaaagttaaatttccacaacatttttatataaattaaaaaatttcgactacagctgaaacatgcttttcaaagaattaggtagaaaatctaattaaaaaaagcaatttgccaaattcatgtagaataagaagcacccaaccaacacaaaaatcaagctcaacaattactaccacaaacaggagaaatttaatttttcagaacaattttatataaattagaattttcccaaaacaactgaagcataacttttccaataattaggtagaaaatcaaattaaacagaagcaattgccaaattcatccattcttctaatgaatgcactttggtaggagtacaaaggtaaattgataccatatgaccttgacgtcactcaaaattatgtatctcaaagatgatacagacacaacaaaatcgacctaccacatagcaatcatatatgagcaacacttcctagttcaatccaaaacaaagtaaattactgtaatctggaagaaaaaaacgcaaaacaaaaaaaaaggatcataaaaaagaaatctttccgtaaaattaaagcgaaaataagaagtaatctccacctgatatcgattagtgataacatcatccgaatcgtcagaatcgttgtcgatgaactcgtaatcgccgatgtcggcgtcgtcgctgtccatagcggcggcggcatcatcgtctccaccactataaaaatggtcgtcattgtcgtcgtcctcatcatcgttggcatcgtgcatgtcgaagtcatcctccgattccatctcaataattatctgataggatttcccaaaagcaatgggaaaaattaaaaaccctaaatttgagaaaaatgatcggaattcgatcaggaattttttgcagagtgagaaaagtaaagggtagattttatatataggtatattgagagagagaagaagaataagaaaaaaagatgatctgttgagtttaagtttgggattcgttcacataatacggaaatgagggattctcaaagaaattttcttttggctttttcgggagagagaggtaaccacgcataaatactgttaataaagggataagtaaccaaaattttaagttattttctttagcaccataaatatggttaataaaagtaaccgaaattttaattcataaaattttgtaattttttctaattttattagtagagacacaattttaaatttaataaaaaaagctttagaagtaactaatttcagtatatttgtagtataaattcttaagttttgttctgtctctgagtagtgaataaatacttaaatcgtatttttggcaataaaaatacttgttgttactagtgtggaacttccgtaagtaccactctcttttcttttatgctatataatgtgctagatgatgtgccatattataaaaataaatatcacatcactcccaccattaacaataaatattgtcaaatcatatatcttaaaaataataataaaaagctaaaattaattaaccacatctctttctccctcgccctctgtgtgtctcatactctttctctctctctctcaaaatatttagaatgtcataacccgtttataaattaatttataataataaactaacggtttaaagtaaatgtgagttaattaaaactttagtgattatttcttaaaatataacctaaatctttttcaaaatattattgcgttgaggatcccttctgttataaattttaactaaaataccactgtattattttattacaaaatattagtacatattcaaaatactacaaaagttgaatactgtcaactgagcacaaaagacaatggggttgatatgtacattcgtcaagagacctctgactcatggttgat

SEQ ID NO: 14795 - DNA, 2922 bp, Cannabis sativa
taaaaacttaacagagagtccaaaatggtatttatgaaaatgttatttaaaaaagagggaaagaaactttcaatttagataaattaattaaagtctttttatattaaaaaaaaaaaaaattaaagtctttttaataaaaagaaaaaagaaaaagaaattgcaagagttttgagattcccaagtataatttaagtagtgtgtgtgagttggatgcagttacacatgtcttcaaggtaatactgtaattaatactaagcaaagcaacctccactacaccttcacacccatctacccttttcttctctcactcactctctctctctctatctctctttctactactttactcttcttcttctttgttctttgtatagaagaagaaaatggcagactgggccccagtactgatcggagttgttctgttcgtgttgcttcaaccaggcctgctattccagttgccaggccacagtcgacccatggagtttggtagcatgaaaaccaacggcaaagccatagctgttcacacactcatcttctttgccatttatgccattctaatcttggccctacacgtacatatctacactggctgatctcaatctcaatctcaacttcttcttctgggtttgttaatttaattagtgtttgattgattctatgttctaattctaaatatcacaactctctgtactctgtttcaagttgtaatatgagctctttcttttttgtttgttagttcagatcctatatagataaagaaagaaaagctttattagtctttcttgatttgcgttcattcaataattcatagactcatcatagttcagcttttttgagtccagattaaaaataggttcaaaaactgtggcttttcttttttggtggcctaaaaaatgtggacatgttaatatatgatatcacactcatggccattaattagttgtgtcatgtcatgtacattctgacccacatgacaagtatttctgcattatttctttcgattaattagtctagactctagagaaagttagtgctaattaataattatgctttttaattttgcataataattacataaaaagacttgctttctcacataaattaaacggttaatcacattaataaaactaattgggcggtttcttcaagtttttgtttttatattttgtaataaaagattttggagactgtgcttttgtcggtgtctcgtactctcatcacgtgttaagctttgaatttgggaatttgaagtaatttttgccataaattatgcatacatacactatgatgatgtactatatattattttttataattgacaaatattaatatttgttacaactttagaacaaactaattaatttcatatgttagtatcgccaaaatagtttctgactatagctaactctctacaagtttgaaactggttaattaaaagaaccaacacacaacagtacagaattcagaaaacatttgataaaagttggccgttcatatatatggatctcaacaaaaataaaaagagagtatataataaaaagatgtacacatatataaatatagagagattggatgatgatgatgatgttataactaatttattattattagttaacatgtatgtgaataccaatagcaatgatcaagatggtgagtatgcagaaatatataacagcatgaactagaatagcaatcccacttgtgttcatatttccaaactccatgactcttgttcttgctggtaattggaatagtaacccaggtgaaagtaagatgaatagcaccactgataccaccacaggtccccaatcagctcccataattaaattctctatctcttttatttctctcagcttgtctctctctctctctcttctcttaataatgataataatatagtacttatgatgatgatgttgatttgagaggtatatatatgtatagaagatgtgctcttttatatatatataagtaaattttgcttagtgaagaagggagagaggggttttgggatgctaaacttgatgagaaagaagaagcacaaaaagggtttcaaagagaagaaaggtatgttattaattgttaagcatggtggtattgttgttagacatggtggggtggactcactttttgggaattgaaataacaaaaacccttttttccttttcttctttttattatttcatttacatttactacttagctaagctaccacttattgttcacaattggtctctttttgctagctttagaaattgatatggaggtgtgtgggaaacttttgaaaaacttttcttttcttttgttattcaattacataaaaaatctaattatgcaaaatgaagtgtaaagttagttaattttgtattgttgtataagtaggtgtgttttgcttccattgtttgttttcctttttttaatgtgtatatagtaaaaccttccaatgggtgcagaatgtggggttgtataacaaattaatctaaaatatatgaatgtaaagagaattagtatatgacatatatatatagagtatataacatgacttgaactagaattaatatgagacaatgggtttggaatatttaggttctaaaatatagtaacatatatatagagagagagaataatgatttacaacaacaaacatcttaatatgtaaagaagcgcatatatacgttgtgagagtttgaagcaagtgctcatatatattagacagctagttgtgttgtttgtgttgcaatatactaatgttcatgaggccatgcatatattgcatgccatgaggtagtgtattaaattaaattaatagtaattattaaattaggtagtgttcggtaaccattaaaaaatcagttttctgtttaattaatcagaaactaagaacaaattataaaattttgttaaggtgaataaagaaaaaca

SEQ ID NO: 14796 - DNA, 7097 bp, Cannabis sativa
aaactactaaatacaagttaccctaattcttttacacctaatatacagctaatattctaacaataagcatagagttgatggtgttgtaaccgagctaaaaccaactcgaaatcacgcaagtgctcctccaaagactggctgtaaacaagtatgtcatcaaagaacaccaaaacaaattttcgcaaaaagtcccgaagcatatcattcatgacggcttgaaatgttgcaggagcattagtaaggccaaaaggcatgacaagaaactcataatgtccatcatgagtacgaaacgtcgtcttctcaacatcacgagcaaccacctgaatctgatggtacccaaacttcaaatctaacttggaaaacacttttgccccatgtaattcgtcgaggactttatcgatcacaggtattggaaatatagcagccattgtttcacaattcaaagcatgatagtccacacaaaatttccaaattccatttttcttcactagtaaaacaggactagaaaatggacttgtgctaggttgaacgatccctgtttgtaccatgccccgaacaaattgttcaaccgcatctttttgcacttgagcatagcgatagggccttaccaagatgggtcatgctccctgtcgtaagatgatggaatgctctctagctttactaggcagcaagcctgttggagtcgaaaaatctagctcgtatcactgtattaaagcggctactgctagcgccattgctggctgctcccggtcatctttggttgactccataactcccaagtgaacccaaaatccctctccctcatgctccactgaataaatcatagctttgagtgagattggagatttacataggctaggatccccttgtaaagtcagccatctaccccccatatcgaaccttatcaccatcgacttccggttcacctgcatattacccaaagtctccaaccacttgatttgcaatatttcatcacccaaccccgaccccccaaattctaagggaaagaaatcattcactattctcaaagctcccaaatctaactccacttgcgcacaaattccctccgttcgaaccttaccgccagtacccaaataaatcccataacaagtggtggttgtgctaggggcactagtggctgcaacaatgtccaaggagatgaaattatgagttgccccactatcgatgagaacagtgacaagttgtttcccaatgtcacccgccaacttcattgtacaagctgaagaaatgcccaccaatgaatttaacgacaacgttacaagcgtttcttccgtggccaccattcttggcgaatttggattaggaggtggggactcaatttgaacctctggttcttcctcatccatagtcaacatcacctggagcaatttttgttcacattcatgccctccatgatattatttgtcacacttgaaacacactcctctagctctctttacgtggtattcagcctcaaacatccgacgagtgccaaacggagtagttggttctgaaacgctaattcccgatgttgatgaagaagtcaacttgatggttagagtcgatgaaatcgatttagcaaggaatgggcttgtgactatggggttatagattgggcttgcccgttactgcctttggtggtgggccagtaacataattgttgcccctcttcaattcgttgggccatttccataatttgggccagaccttgaggttgaagaatatgtagtgggtctttattctctctcttgagccccttaacaaaactaccctccaatatgtgttcgagtacccgagaagccattgtctcccaccttatgcgatactccttgacaaaagtgatctgcataatggagagaaactcatccgtgatggacccagaggcaatggaccccattggcgccgcacaaaatcgcaacaggagcaaactcttcaaagttgcccatgacgtaatcggacgcctcggattctcccattaaacctaggtgagagcatcgccatcaagccctacaatagccatttccaacatcatcggctcggtcatttaagtgaagaggaaatatctagcgatagatccattcgtcgggattgtcccaggagaccagcagaagcttcattcaaggcgggcagtaattgttcttgtgcaggtggctaaagcattgcaatttggttgatgccgaagcgacaggaggaacggaactcgcggttgctgcaggtggaggcaccatctaaaccatcagcgacatgacgttggcaattggaggggtgtttgcactatcgtgagcagtgggagaccgattggatgaatgggtcgactctttcccttctactgtctttcgattacgatcgacaatgttcgtcgttgcctctactcttttcggtccctgtatcagctgggtaagctggccaaacagctgatcaatcttcttgtccagccttgcctctaattcctcgggtaacctctgaagctcaaccataactctttgagttcatgttgaaattctgcctgaacagcatcaattctctcctccaacacctctatctaagtgtccttctttggtcccatcttggtacgaggctctaataccaatttgataggtatttcctgtcaaattgataactatagcagcaagaagaattaaagagaagaattaggaaaaatggcctgatctgatattgaataccagggaggtcgagagccctattctctcccaaacaggttacaaaacctttacaaaatacttcacacacaatagaatactgaagtcccttttattctaaagactagccgagtacggtgcacctcacccacacacaaaataaactcatataacaaccctttcacacgcaaaaccaaggccactatgttgttgctattcccttcttacccttgctccttttatgcgcatacacgtaagtcaatggtggtctatcaaaaaccttggttacaagagatttagcataaattatgctaaaaccagtagcgaccaaaacaaaacaaaaccaacaaaatacaagaatcaaacctacaaaacaaacttccaatctctatataaatctaagaaagagaaatcattagtacaatatacttcactaaagagaagagctggtaactagtttgtggaaagagattgaataggcctctctaccatcactactatatagatagatagacatttgtacagaattttaaaatggcattctataatagatgatcctaggaagataaaatcaagtctcaattcttgatgaagcaaacagcagtagatcttcaatactattgtacatgttctgctagtcaacacccattctattttcaccaattgtgcccagcacacttaaactttaaaaccaatcatactgttccacataacattgaaatcatatatgtcaccaacacaatcacatggaactatataattggaggaaaagttttccatgctgaaaagcgtcagtgcatttgttttcctaaaatagttggttttagaatactatttccacaatgtgataacgcaatgtctaccccaccagtcatgcatggctcaacaggtgcttcagcactgttttgatcacgtaagtcaaccaaatgcagaaaacacacacacaagtgctcaggaagaacaatttagaagataactgacatttaaaattatcatattaacaatatgttcgagaatgcactaaaaaatcatggtagatctctcaaaagaaaaattaacaaaacattaatatataaaatctttgcataagattaagacaggctggcacccttgctctatcttaggcagcaaaactttaaaattccaatatacatctctttttgctgaagaaactttaaaaatatttggcatgaaaaggatcaaatcttattaaaaagagaaaaatgaaaagaaatcttgagacacagataaccacattctttcattatataaaattcaagaagataagagtatggtaaaactagtaagataaagagaataaagaaaaacaagcagggcactaggtagcagagatcaaaaggaaaccataactaaacttttacttactcaaaaggtggctccacctcaataccaagagtcaggtgcaaggaatatccagcagtcccggaaccagtttcagtgcaggcctcgtgaaaaaagcctctgggaatatacagaacatcatcttcactcaatgaaaaaagttcacatccagctactggacagtcagctttctcaagaggatcatacaaacgaggtaactgcttgtttgactgagagaataccttccattgcttactcccaacaagttggcatacaaaaacacagtgatcatcatagtgacatgccaagccctgagaatttggtggtgtcaagtacatattggcacctactgatggctgaccaaacatagatgctaattcatccgcaatagcagcgatagttttaaagcgaaattccatgccacgtaaagcaattgtgtaaccctctttaaaggcctcttcgcattttaaaatattgacctctgcacatggagagcttgaaacaaagttgaagaaatgctcctcactttgcaaacctctgtttgttctcagaacccttatgtcttgctggtatattataggacaacccaatttatcctttacctccttcaagaaagttagaatgtctagttcatctgaagcaatcgggatacaagataccatagttttaaggatagaagaaaggaaagagggaaatggtttggtagcatttagaaattgtaggaacggagagaaaatttcacccttctcaactgaagcattggaaagagtccgtaaaaaaatgggtgatgattcccattgttttaacacaaaatcattaaaattggacccattcgaatcaaaaatatatctttgaaccatctcacatggcagaggcctgattaaatgacaatcatttttaatggatagcctaaagatgctttctgctagatcttctactttaatgtagctattactaaagagtcccacttggctgaatttcatagggttgcaggaaaacatttggctatgaacttgttcccagagattccttagagaggccaagaaagattgagacaactttcctggaattttttccagttgttcaatgttgcacatgtttattaggttgattgcaccattgagaagtagtacagaaagctcatcacccttacatccaaccttcatacagaaactcttcctctctgcaaagcatagaggaactgaagtagttgaacacttgggaacctgcaagaatctcaatctaaggaatgtaaagtgaatgatcaaacttacaaaccaaaatagtcaagtggttatcatagaagaaaattctaattcaaataagaacataaacattgaggaagcaatgcatattaatcaatcaatatatcaaggatcaaacaattacagccctctttacaaaaaaaaaaaggaaaaatcagcctaaaatattttgttctccatcaataactatttgtaagacaagaaaaaagtataccccaaagaaaaattgaaggacttgtaaaatatatgggaaaaaataatgttgcgatctaaccaaggttttcaaatgttatttcacgactcattggtaatcatcgcacataagaaatgaaaaacatcatcagtagcagacgcacaaaatgaaacataagaaggatcaaacgaatgctaaaaataaaagaaaaatgtatgcttccaacttctctactatagaaaatggtgaattgaattgtgcgtattattcatgatggcatatatttatacaacctaggagaaactaaaatagaaaagtatgagagaaaataggaaaagaaataattacaattgaccctattttctagttaatttatagctaaaattctaacactccccctcaagctagagtatagatgttaattatgtccaacttgttacaaagataatcaacatgcgtcccattcaaagcctttgtaaaaatgtctcctaattgttctctagtttttacaaatcctgtggagatcaaatcttaatgtgcttagttcgctcatcgaacacaggatttgaggcaatataaagaacagcttaattatcacacaataattttgttggtactaaagtctgaaatcctacttcagccaaaagctgatatatttgcataatctcacacacaaattgtgtcatagccttatattctgattctgcactgaatctggacacaacattttgccttttactcttccaaaagaccaaattacctccaacagagacacaataatctgaagtggatcttctatccaccttggaaccagcacaatatatatttgagaaacactcaatctgggtgtgcccatgatcctagtaaacaatacatcgtccgggtgttccttccaagtaacacaaaatttgctctaaggctgcccaatgacgaattgttggcgatgacataaactgactaacaacattaactgtgaatacaatatctggatgaatcacaataacataattcaactttccaactaatctgcgatacttctcaggatcttcaaatagttctccactcgttaggtgcatagcaagattcattggagtactacaagattttgctcccaatttttctatctcagttaacaaatcaagtacatacttccttttagatagaaaaatgcattatttactccaagtaacttcaactcccaagaaatacttgagcacccccaaatccttcatgtgaaactgcatatgaaggaatggtttaagggatgagatacctctagtatcatctccaacatcatccacatacacaaccaaaataataataccggcaattgatcttttatagagcaaagaatgatcaaacttacttttcaacataccaaatctcttaacagcctgattaaatttaccaaaccaagcttagggactttgtttcaaaccataaaaagatttgtgaagacaacagactacccatgactccccttgagcaacaaacctagaaggttgctccatatacacctcttcctaaaggtctccatgatgaaaagcatttttgatatcgaactgatgcaaaggccaatgatgagtagctattatggaaaagaacaatcgaacagat

SEQ ID NO: 14797 - DNA, 8704 bp, Cannabis sativa
aagagatgattaactgtttaacatactgaaccctctaagttcaaattttggccgtaaaagtttaaattattgaactaacagcaaatttaagatgtcatcccgctaactaccactatggactgcatatgtatacatttttgtacatgttgacacatttatattggtatacctaatatttttattttaaaatttaaaaatattataaaagtaaaaaataaaaaatattatcatttttgaaataatttttataatttttaaataataatattaggtataccaatataaatgtatcacgtgtacaagagtacgcataagcagttcatgttggcagttaactttgaaaaatagatgacaccttaaatttactaatattcagtagtttagatgattttaccactaaaatttgaacttaaagagttaactggcaagtaaattgatagttaagaggatttaacgatataaaacactcacttttataatctttctacattgtaatgagtattaaaccatttgcattcaatactcattacaccccaaaaatacaaaactaatatgcacattatgcattggaatacaaatataaaaattagaacaaatatagctttatattctatagcatatattgaatcaaatttaactcaaaatatataacaacatatggtcaaactatatcaagaatctcgattgagctgatgccaatctatcaataatatttgtagttcttcttgccccttttgaccgtattgctcaatttgctctttaatagtgtttagtgaggcttttctctctacaaaaacatttgtaatacttttttataatccaggagacattctttcactaaaaaaaatcaaagcaaaattctacaagttataattcttagaaaagaaaaacaatttattctaaatgacttattaagaattttataaatcccctaaattaaaactaaattacagagatttatatgaattaaagaaaagaaagagagcagtagtgaccagaccaacaagcatagcttgcaaaacatccatattgagatcatggtaatactctcaggaggtcagtactactatactactaatgcatattcagccataaatgggtcactatactctaaaagcctcaccctttccttcttcacatgatcattatcacacttgttagggtttttgagttcaaccaaaaccactcctttacaattacttcctttcctctctttattacttgcataataatcattcatcatctttttcatcatataaccacattaccggcctttatgcttacaatcgccatacgaaatttatcgaagattatggtaagtaaagaaactaagacccttttcttcttcttggatttacatattactaccctactaaagtttagatttttactcaaaatcttaccccaagaatgaccatcattcctaaaaagattgtatttaatgttatgtcgtttcgatgaaattgccttcaataatcaattttttgtttgaaaaaggaaaaagaaaaaagggaaactgagaaaaaggtagatgtgaaattattggtatgttatgttatagccataatttttaaaagctatttgttcacgttaacgttataacaatcaccattctgttaatttgattgggcatgtcgtttgaatgagagagagagagtcactcaatcaaggcatcacgcttcttcaatcagtcaaacagtactacaaaattattattattataataataataataaaagggagaattattctctctctgaagttaagtacttcctcaacaagcagacccaaagaaccaaactttataagccatttatatatgatatttcatccgtaacttcactcactcactcactctctcctctttgttttcgaattctggctatgagattttaaaggttagtggctttcttcccaattttacccagttatgtatgtttgaaatttctgaaagagtgtttttttcttctttcgctttctgtctttttctcaatgatagatagatgtaatgtgagtaggagttctgggaaattgttgatatgctgattttatgtggaaaattgttttttgtttggctgataattttcgattcagtatttggttctttaatcataaaaagcaatgaccattttcattttctgttttagtcttgtaattgtgaaagaacttaaatgtttggcttagtgtttgttgttgtgttaggcttttaaagttacatattcatattgatcagtcctgaatatgaatgcaaaagaggaacatgaagtttctgcattatgtaatttagaatagtaatagcgtttttgtgggttctaatttttttcaccttactgtgattatgatgctatttattgacatcgaatttgttgtcctggtagaaaacacaaccatgtgatcatctatgcatttgtaatctttttccattttcattattcagagttggagagtgtgatgtttcctcatgagttgaataatttgcagattgatctgagtgcagttctgtttttatttttaaggtttcttgtgtttgttggattttctttttggtgtaaggtttacaagtgtttttcttttgttgaaataatcagggctcagttagagtttgaatcttgaagctgtttaaggataagatggaattagaaagaaaggaaaaacgttgtgtggtaactcaaatcagtattggcggatttgatcgcaatgtcaaagcaaaagaccttgttaatttcttagaagatgaagttgggcttgttttcaggtgtaggttgaaaacttctttgacgcctgcagagtctcatccaaattttgaggtcattgatactgcaaatcttgagagagctgacaataacagtgtagtaccccatgcttttgtccattttgcctcacctgattcagcaactgatgctttaatgattgcagaatctggcaatcttatgttggatggcaatccactaaaggtaagtttgggacctgagaatccatatagcatgaaccagaggaggagaactattagtccgaggaagatacctgatgtgcttcttgagattggaactttagtcaaacgagatgagttctttagtgcttggagtggagctcctagaggggttgattttgttgttgatcctttcaattggacgtgcaaattttgtttcaccaaggatactgttttctcatttaaaggcatggccaagctctcaacgatgaaatgtgattttaaggtggagtttttggttagggacattaatgaaataaaaacttacactgatacatcatatttggtagttctgttgcatctggcttcatctccgcgagtttggtatagaactgctgatgatgatatcgacatacctgctccatttgatatgttggatgatgatgatccttggatacgaacaacagattttactcctagtggggcagttgggcgatgcaattattatagaatttcagttccacctcgtcatggggcaaagttgaaaaaggccatggaatatcttcgacaacagagggtgcatgagagcaacttaagatcgcctcttaggatccggaaggaacctgattatggggtgtctatgtcagatcctttcttctgcattcactacaagaaagatatttcatttgagattatgttcttattgaatgttgtcatgcataaaggaatatttaatcagtaccagttttctgatgatttatttgatttactcagaagccagccaatagaagtcaatgtgtctgctttgaagtacataatgtgttccatcaagcgcccggtttataatgcatatgaaaaactaaaacatgtccaagaatggttgttgagggaacctaaactcttgaagattcctagacagttggatgacattgctgaagttagaaggttggttatcaccccaactagagcctattgtctgcctccagaagctgaactctccaatagggttcttagacactttaaaggagttgctgatcgattcttaagagttacctttatggatgaaggaatgcaaaccataaatttgaatgttcttacttattttgttgctcctattgtaaaggaactcacaaataattctttcccccagaaaacaaaagtattcaatagggtcaagaacattctgactgaagggttttatttatgtggtcgcaagtactcttttttagccttctcttccaatcaattgagggatcgttcggcctggttttttgctgaaaatggaatagtatctgtccttcacatcaaacgttggatggggaaattcaccaacagaaatgttgccaagtgtgctgctaggatgggccagtgtttttcttctacatatgctactgtagaagttccattgacagaggttaatttcgaccttccagatattgagaggaatggttataatttttctgatgggattggcattattactcgtgatcttgcaatagaagttgctgagaaattaaagcttgatatagacgcaccgtcagcttatcaaattagatatgctggctgtaaaggtgttgtttcttgctggccatcaaagggtgatgggatcagactttctttgagggctagtatgaacaagtttaattctagccacactatattggaaatttgttcttggactagatttcagcctggttttctgaatagacagattataactttgttatcgacattaaaagttcctgatgaaatattctggaaaatgcaagagaccatggtttctaagttaaaccaaatgcttacagatgcagatgtggcttttaacgttcttactgcgtcctgtgctgagcaagggaatgtaccagcaatgatgttaagtgcaggtttcaagcccgattcagaacctcatttacgaggtatgttaacttgtgtaagagctgcacaactttggggccttagggaaaaggcaaggatatttgttccatctgggagatggcttatgggttgcctagatgagctaggggtgcttaaaggaggccaatgctttattcaagtctctacaccatcacttgaacactgtttctcaaaccatggttctagattcagcaagagaaggaataatcttgaagtaattaagggttttgtagtgatagcaaaaaacccttgtttgcaccctggagatgtaaggattttggaagcagttgatgcccctggtttgcaccatttgtatgactgtcttgtttttcctcaaaatggtgatcggcctcatacaaacgaagcttctggaagtgatcttgacggggacctctactttgttacatgggatgataatcttgttcccccaagcaaaaaaagctgcactcctatgcaatatgatccagcgcaagcgaagactttgccacgcgatgtcactcaaagggtaatcatctaccacttctttatcctatatttatggagtgtgagagatttcaaattgctaaatctcattgtggatattattgataaactgttttcaaaagattacaatcattttaatttctttcataacatgacgtgcttatgaagtttctgccatcaactttgtcataaaagatcacattgtgccataatagtactttgatgaataagatttttatgaatttaattatgaaattttccaattcattgattctcacttaactactatttttttatcacttaattctctgtttattctgcaggacataatagatttcttttcaagaaatatggtgaatgagaaccttggggcaatttgcaatgctcatgtggttcatgctgacaaaagtgagcatggtgcattggatgaaaaatgcatcaaactagctgagttagctgcaacagctgttgattttccaaaaactggaattattgtagcaatgcctccacatttgaagccaagagagtaccctgattttatgggaaaagaagcatatcaatcctacccttcacctaaaattcttgggagactttaccgagtgattagagatgcgtatgatgaagatgtgtcagcatcttctgctctgaattttgcacccaaggagatcccgtacaatgcagacctcgaggtttcaggagcagacaatttcattgacgatgcatgggatctcaaaatctcttacgatgggcaactgaaaggtctgatggaacaatataaagtgaggagggaagaggagattgtaacagggcaaatttggtccatgccaaagcacaatagcaggaagcaaggggacctcaaggagagactgaagcattcttacaattcattgagaaaagaatttagacaaatgtttgagaagatggaccctgattttgagaaactcactgatgacgaaaagaatatattgtatgaaaagaaggcatcagcatggtaccaggttacctaccatcctaaatgggtgaagaaaacacttgacatgttagagttggattcagctgaaaacacagtgttgctaagcttcccatggattgcagttgattacctcacttgcatcaagattaagaagtgtggagttgaaaatgttgacactaccaaaccgatcagctcattggcaaagtaccttgctgatcggatttgattttgaccccccaaggtttgtggtgacaaggccattctgccaattgtttttcctttcgaaagtaatagttctgctgcattctgacaatgctgtgagggttggaattcagtccaatttatcttcattttggaggtgaatctatgtcagagttagagagaagggtaagtgtggtagcataataatctttgtaattttgtgtgatatattagcatgagcagtaatgatatgtcactctggaaagttatgctttctcagccccattctttcaatacaaaaaacagtgtactgagtaggcataacatgacatgttgagtttagagtatatattgtgtgctcatattgtattattatcttaagagaaacagcttagcctcattacaaacccctcaaaaataagaataagtgaggctctgtcaaactcaattggtgtttaccaaagcttcatagcaatgttaagacttgatttttacatcagtgggattattgataataatatgatttatgtttgtaaaaagttttctcattatgattatgatggcatagacttattatattacagctgaagccaattctcaatgattttgcttggtcttctttgccctctcttgagctttctttttggactctcaatgaggagaagaaatagtaccaaataaatatcattagattaggacactattaaaactttacattataaaaatcattacatacaatagtaatatgtttcacaactactcctaacctaaagagagaaaaccaaaaaagggaggttgctgttgattttgtttatattaatatttttagttttttttttcacaatctaccaaaggaatattgaaaacaaaataaattcttctcctatatgtagattttcttttttttttttttttttcaaaggaaaaattagatttcttttaaaaaaaaatttactaactaattatgtaatatcatatcaatacatgtgttggtatactttggattaaatattaaatactttattattaatttaaaacccattttaatatttttttaacataataaatttaagatattaaataataattggttttcaaaaaaagaaaaaacaacaaaacccaaagtatatatattaaaaaaattacatggttcagattaattagattttatttaaaaagaaaaaaattacatggttgagaataatctgactgcaacacaaatgtactgtttaagtattttgttaccaaattttttaaatggggaattaactgtaacttttataaaagcataaagtttaaaggttttgctgtgattttttttttgggtcaaaataatcaccgtattagattaaaattgatgaagaacactattacttatggtctatctaagaaagaataaacaggaagaattgacttgagaaagttaaaaatttccttaagaaaaaaaaaaagaaaagaaagttaaaattgattattaaaaaaaaataaaagaaaaaaaaaataacaggaaggaaggagaaaattctaacacaacttcaactaaagtaccaatatgtcagagtattgctattaggcaccagtagtatctagcatcttctagacatgtcaccttacaattgtttagcgatactccctaaaaattattatgttaaattatatgggacctgatacttaattacaccaataattcaccactagtgccttttagtatttctcaataagctgccagcggtgatgcatcaagtgcgaagaatgctagacctccgatctgaatgaacatctgaacaatcacacctatcagccaaccgaaagggtatgtgctaccaggggaagatcgaaaggtatgcaaacctctagatcttggaatatcacctttaataagactattaaagagtatgacttcgaacaacatgaagacgaagcctttgtatacaaatacattaaaggtaatgtagtgatattccttgttctttatgttaatgacattctacatattgaaaacaatgagaaaggttatcagacataaaaaaattgttagttaaaaaaattctaaatgaatgatttaagagaagcaagctatgttctcagcattaaagtctatagagatagaaagcagagaatattagcactttctcaagcaacttatatcgataaggtgctcaaaagattctcaatggatgattttaagaaaggacaattacagt

SEQ ID NO: 14798 - DNA, 1430 bp, Cannabis sativa
aataataataattaaaaaagacattatgtgtgtgatattgaatcaatctataattttttttctttttaaaagggttatgttattaaaaactagagatttttgagaagcttataattacaaaaactaataagtttgtttataaatataatcatagatccaagaaatatataaataaacacttacatggtcttgatcatttttggtagaagatttatgatcatcatcttcatcattattaattagtggatgatcttgattatgagatttattatgagactcaatgcccaaacactttaagagatctctaatggcttcttggatgaaactacatgatgatgataactccatttttatcaaagagaaactatattattaatgactcaatcaccaatatatgcttcctatatataaatataaatatattaaatataaaatttaatatatatatatataaatagacaaaaatgcccttgaatatccttaaattattattgattgtacatatattcttggaaggagagaattcattcacatgtgaaataatttaaataatcaaatcatataaactttgaataataaagtgaaaaagtaggtcacttgactagtgggacttgtggctatatataatattacttaattaatttgatcattttaaatatcaacatagatcaagtcaaattttaacattattattattttaactattaattatagataataaaaaaatagttagagaaatttaatgattattttaaggaattagttcaacaacaattattcgtttgttgaacttttttaagaatgaattttgcacttttagttttgactttgtatgtattcaatttaagtacctattaagtggtattttctttcgacttggcataaaaataaataattttgaaaaatttacacaaaatattatttttagtaaaataattttcttacattttttacaaaatattttgttcaattttagagtttttatttatttaattacaattttacattatcttataaaaacaatataaaaataatatacaaataataaaaatatatatattaaaaaaatatcaatagttcatatttttcataaatgaaaatatataaataataaaaatatttaaaatttcatatgccaaagacaatttgagtatttattaattaatatattttgttgaataaattaattataatattattatttcttctatatatgaacatataaatatatatatttattccttaacataaaatcatcacaactattcaacgttaaataatagtatatagaatgtagtcaaagcaatttccacgttgttagtattttatattatttgttagtattttatattattattagctatatataaattaatatatatatatatatatatttagtttattgcattatttggtaaatatgtcggggg

SEQ ID NO: 14799 - DNA, 5194 bp, Cannabis sativa
cataaaccaagaatttcagttatatagacacactttatatagaatagatatatagagagaggactttttcccatttaattaacgaaacgttttattatattatactaattaaaatatcacgcacttgttctgtctgaaagaaaaaaaaggcaaatcacttattctgcagtgaagacattataacaagaagtaacatgaatgtcctttgtaataaaaaggcctatttcacaaccgtttgtgtccaaaaaaagtacttacatataattgggaataaaaataaagtattggatatgcttccaaaaatgggtttccctgaaagttcttgggaattcccatcgatattaggttcctttactcaaaactctagtggttcaaataaatattaattgtgtttagctatagttacttaatttaattaagtttatttaatttcttccttttgcatgccccaagaaactaattaatccaattgatcaatcttgtgcgcactattgatgagctccctaactgaacctgaacgtacacattttgtatgatataactatatataatatttatggagcaaatgtatacgtctttgtagatgagctcacatccgtcttcaccaggcgaaccgcaccacacgaagatatatatatcatttgacataaatccgtaatacaaggggaagaagtatttgttcaaaaggattataaaggaatataataatattgtaaagtgcacgaaggcacaatgtgaaacataaaaattaaaataaaatgcttgattcatattaaatattattagtcaaaaaagaaaattagataattacgtggggattgcaaaaacatataatctgatacttttgtttgttgggtaggtcaaagtatacttgaaatagctaaacgactagttattagctctgagtcgtataatattaataattaaggaactaaggaaaggagggtttgcctttggcacgaaggtcatcgctccaaacaagttaataagttagttattattggaaaatgctcttgccttaatgtttttctggtacttcctatgcaacttcctcgaaagacatccaaacagctttctcaatacacttaataaatcaaaacccattccagctgccaataacccttctccttctaaattctaaactttcaactaaaccaaatttaactcctttcatatgtaccctttgttctcatccattgccacctctctttcctacataacttcccaaaacatatatcttatatatagatatgtagaaccacattgatcatatcattaattactcataatattttattataattatagcttcgatcgatttaatattatcatataataattaattgatatggcgtgccaaaacggaggggttatgtttgaggatttctttccggccatggtggacaagttgggagctgaagggttcatgaaggagctgtgtaatgggtttcggttgttaatggactcaaggaagggagtcatcacttttgagagcttgaaaagaagctcagcttttttgggtttggaaggattgagcgatgaagaactaatgtgtatggttaaagaaggtgatttagatggagatggaactttgaatgagatggagttttgtactctaatgtttaggttgagccctgctttgatgcaaagctcagatgaattgttggaggaggctttgattagtggtatttagtaattaataattagtactatatatctatatactacgattaatttatctacttaattagttttaaaatggatattttttttttctatctctttaatttattaacttaatttagaattgttggttagagtctcgtgttgtgttggagagcgtattttgttttttcatgagttgtttctgatcattctaatttgtattctgattcttagaaagatcattatctatttcatgtttggtttcatttctttcgcgttaatcctaaatattataagttattagtaccacaaactaaagagaagattggattttatcagtgacggtcgactatagtataatttggtacttaattatcgactgatcatctcgttctgctatcacttccattggaaaattatttatcatatatataattatataataatatatgatacctcggccagtcgatgtgattagatatattagatacggagatacactgtacatatatataaattaataaatataatcacaatccctcatcatatttgacaacacaaatatagttttttttttaaaaaaacaaaagtcaactataattcttttaaaaatgaataattatcatttttatccataaatttttaacattaacaagttgtatagcttaagatatgtgtttattggatttggatttacccgattcaatccagttatttattgtatattaaattttgttctctaattcacttttatcaaattgaatcatccgatctgatccaattcaatggatgtattagattagatcaatggattaactagtgtttctattggattggattgaatccatccaatctattttaactatcatctaagttgatttcattgaaaacctaataattatacatacataataaacattagtttaattcaacttaattctcatgattctataataaaaccactaaaaaataaaacttattcaataagcattgacaattttattagcatttagatagatggaaactaataatgttttaaatttaattttttttttctttaatctcgtgtgatcaatacatattaaatcaagtagtatattttttaaataaaatatataaaattataaatatatacttttaaaatatataaatataattggatgattattgaatcaatttgattcggttattcattggttcggatgtcccatccaacaaccgatctgatctgattgaattttcaagaaattctactccccagtaaaaaagttgaaaattttagtatgtgatgtaaaaactaagggtgggcaacatgcaatccaattcaattgaaccgaaccgatccaatccaatccaattacaaaaaattagatatccaactacagttggattggactgaatgctaaatgttggattctaattggattggatcggttattggatgtcaatctcaaaatttaattaaaaactgatccaatccaattacatgtatatatgttaaaaaattatttatataataaaaaatattgataaacattatattaattatatttttattagatttttttattgtattgaatttttaacacttggttattttgtgtatttattttcatgatgttttgttttattttattatttagaaatattattgttttaattatttaaaaattttagttacattacacttgtaacgatggtatgtttatagagtattaaacttaaataaagcgtgatacttagtttttactatttttttcatatttttaagttaatattaaaacttaggtgtgtaattggattggattggattttgaggtctaattagattgaattagatgatgattttctaaatttaattactgattggattgaatcggatgaaaagaaaaatgttggattggatcggatgctcaaccctagtaaaacccatatttttttctacatgcaattagctatttatctacccaaagttggaaatggacattatacatcttcggttgtcaagtccaataactttgtttgtggtgtggatttgggcctgcatagtatagcccatgccctttggttaaatccagccctggcctgcaacttttcacaccggatcttgttcttttgctctcttttcagcatgtatagaattagttagttcaccccccaagtgtgtgaagtattgttcttttttctttcttctatttattcttatgttacgctttagagcaaacgataaagtccaagaaagtaaaataagacaaattttactttataaaagatcgagaatagtgtaattttgtagcatgtttaaaataaactttacattatatgctagttattatagtttcaaaatatatatgtatatatataatagttagcgtccaataatgctcgagttacatatcagggtacatatcaatcatgcacattaacacacacctacgccactgattagtattaatatatattttttcttcaatgtagaatgggaaagagaaattaaaaagaataccgggtacatgttaaaagatttattagtacgaaaggaagttccatcataaaatatgatgcgatccacctaagcctcatatgtaaactcagaatgtattacgtcctactcgtagaaaatagctattaccgacacataattattgatatccttaattagaaaaccatgtttcatgtttacattattatcaattaatatatgttttatgaagtcattattaacatatcctcgtagtgattagcccaaataagcatatatatttgcacaaaatgttctcttgtaatagtggtgaggcgtatgtgacacgtgttatatatatgtacatgtatgtactgtataaatatatatataggtcatctcaacatcaaattgtgtaggtgagtgagtgacttcttagtcatggtcttgacatatataacttacaagaaccactaatagatgattgccacgccacgccagcatggatattgttctagccacccaacacaaccctctcaatcatcacaaactttgaaccatccaatgtagccacagaacttagagaaaacatttaatggtatcattaaaaacaagtttgtgtgtgttactagctaggagtagctaggggtacaataattgatttgtcaaggactgtggaaagttcccaagaaaaatcaaaaaaagtcataaacggaaagaaaagcttgtctttactctggctttggtttcatctataataagtgacatgcaataggagtaacagtacgtacaatgcacaaggaaacacaagttgcaagaaaattgcaaaaaagaaagggagttaaaaatcaaagaaggtagcattaggtgaatagatggacctcccaaatgcccccaccgggccacaccagtgtcccatttgcggttggtgccatcagatgtgtcaaaaaaaatttggtattgttgttacagattcacttatttacccttaagttgaataacaccactcatagggtttgacaaatatacccttacatcagatacaacaaatatcaagactaaagaaca

SEQ ID NO: 14800 - DNA, 4230 bp, Cannabis sativa
ttttttataaaaaataatagaaattatgagggttattttttagtgacccctcatatttttaatgacccaaattagagaacactaacaccaaatttttaaagtcattatgtgcatgtcactaaagctcaccctagtgacccgtacttttctgtgagtcactaaataatattactaaaactcaattttgtacttagtgtttcaaaaaaaatgtaaaagctaaataattaattattataaattgctttattttaacttgagcataagaacattataatcaagaagaatttaataagtgtaacatgtatttacaaatctagcacaaaaaaaattattggacaattagataatgatttaaactcatctcgcaaattcaactagtaatactaaaaaaaaaaaaaaactttctattacacatttctaattcagagaaagcagcacaaggcaacaaataaaaaacaaaattcaatgctgcatgtaaggatgaagattctgaacgcttattagatcaagtcaaaactttgcaagaataaagcttgaaactttagcgagcttctaacactgtaacagttatgtcatttacagaaactcctttcgatgttgaggtatcgctacctgtatttttgaaaataaatgcaggtcttttaggagattgaagaggggtctcatgtcccagcatgaacacaacctctaacatggttggtcgatctacagcaagctcctgaacgcataacagcccgatttggatgcatctcaagacttgctcacttggatatggctcagctaatgattcgtcaataatctccaaaacttttccttctatccataagtcccagatctgaaagaaaggtacagttttgcatgcataattgtgagaattaccagagctaatggaatatgcatcatcaagtgattcatttagatatatacttacttggccaaccaaattaagggaggaaacttcattgaaatggctgttcttcttgccagtaatgatctctaatgtcagaaccccaaaactgaagacatcagattttattgagtataggccttccattgcatactctggtgacatataaccactgccatgacagaatgagaaacagtacagaattaacatacccgtaatcatatatttttactatgttcaatcacttcttattttttctcttttatgaataaattccaaaaacattatttatttgtatggaaaatgaaatggaacaacagaacttactatgttccaaccactttagtagtatttgcttctatttgatcatctccaaacatcctagccataccaaaatctgaaattttggggttcattgtagtatcaagtagaacattgcttgctttcaagtctctatggatgattttgagtcttgaatcatgatgtagatataaaaggcctcgagcaattcctatgataacatgagaacgttttctccaatccaacaatgattttttgtttttatctgttgatcaatttatgaaagtaatttctggtaagaaatgaggtcagagttgttgagtactatggataaaggatctttttatgtagacaaaagagaaagcataccaaacaataccaagtccaagcttttgtttgacatgtattcatacatcaacatcttctcttctttgtgaatacagcaacctagaagccttacaagatttctgtgctgaagtttggctatcagcaaaacttcattcttaaactcttctacaccttgccctgaaaattgtgataatctttttacagccagttcttgcccgtcagctagaaccccctggaaaaataaaaataaaaaaaatatacagaaattgttacaaagattactgttgacattatgaataatttctgcaatattgaagggaatgtaccttgtaaacagagccaaatcccccatatccaagcatgttaacaggagaaaaattgtctgtggcagcagccactgtggaaaaatcgaagaaaagcacatctgttttctctctactagttttgcttggagaattttcaaatctcattaagctacctgaaatatcattcagcattgtcgatggctgtccaagaacaacatctgctggccccaacagcaaatgtagcacaagtttgttgttaatttctcatataattatctattctacttttacaacttttcaagtaaaacacagatgaatcacaggcaataatataacaatatgtatgtggggctctacgatatacaatttgaatgcattttttctcagtacttattccatttattttcactaaatgctgtcatatatagccgttttggtagtacttaactagttaactataactgatgctctgtacgtcgtaatatttacaattggacttaattttaccagcaaatttctagaaatgtattcccattgttataactagcatttcggacaattttcacctacaaaagaataaacttctagaaacattttcagacagtcattagttgtacttgaacattttaggtactacaaaaagttgaaaagactagttaacaaaaaacaaaagtaaaaaggtaaaaacgcataccttttctcttcctttgctttaaacagtacaaaacagaggcaatgagtagtacagcagcagtgactgacaatcccacaatagacaaaatccatttcggggatagcgcgtctgacttggaatatttagctgaaaagagaaaaggtaacctcatcattgcatgcctctcataacaaaaatcattaataaaagtgaaaagagtgaaaggatgagtaagagaacaaagtacaaactcctacctcacgcggtaacaaaacaaaccacaaagaataatcacatgaattcatcaaggatttttagtcctagagttaaaattttgagaggtacctaattcaattgcatccacacgaacgaacaaatcttgacccccttccaagaactgtttcatatccattaaaggcccatcccatgtcatgcagccactgcccccattcctcacgtcagcaagcccgtacgccatgcacgaacagttcctaagacacttctctcgacactcattcaagctcaagctttgctcaacgaccgcagtggccgcatccggaactttaacacttgccaatttcacaaacccttcaccatttccgcacatggacaaggctccctgcttcttaccgcagccgccggcgttgtctctcaacgcccagtcttgcggcaagacggggtcgtatcccggtaggcacccgcagtcgaacccgctagtgttgtacaagtcgcacttcccgtacggaccgcacttggcgtagttatcgcatgtgtcgacaggggcgttgtaaatttggacccatctgtgctgctgctgttgccaagcgaattgtagaatggatcctgagccatccacggtgatgtaggtgaagatcgaagggtccagtacgctccacatcactgtgatctcatcctgatcgttgacgaatgaaatgttgaagaagctactccgtgggagagcgctcaaagcgggtatgccactccactggagaccgttccaatgtcctgctcgccaccatttggtccggtctttgtacagtataagctgcggcgaaccattcggcaccattctcaatgagcaatttccggttcccgggtcgtctttggatttccatgacgtgatgaaccggtttagacctgtttttaaatttaggcctaatttcaaacccgaaagcagagcatgagttgggtgatcgaagctttgccaaatgaccttcttgttgtcttcttgaagcaaaattaagttacccgagtccaggatttgggctgaaatcttgttagtggaggagctggaaatatttgttgaccagtgaagaacattttgaccgtcgtttaaaacaagatttcgttgagcttcatcaatggaaagaactcctgtcgtgtcgtttattgggctgtccctgttcgctacccaaacaatggttgcgtttgaaaagttaaaccaaattcccaggtatcgagaactagattttccaggactaaagaaccccaaagcgaaagtacctccgttggagactaaaactgtgccgtcgtctttgatgggctggtcaacggttattgaatctgaagcagaacaataatggagaagaaggactgtgaacactgatttcaggaaaattttggcatagttcatattgcaaaaatgagatttcttgggaagaacttatatgcaaaaatctaagcttggagtcagttag

SEQ ID NO: 14801 - DNA, 7484 bp, Cannabis sativa
actgacaccattttcgccgaaaaatttcaggtcaaatcccctctttggattcttcttgacaaacttttgtttaatcaatggtccaacaactaaccaactcaagggggtctctccagtgctgcaccgaaagagaaaagattaaattcaaaattgtagtcttcaaacacaaaagaagttttactcaactagtatttaacattactaaaaaatctatttcatactaatcttgaagagatgagcaagaaaagaaccaaataccctttaaaagtgcttcctctgattgattcttcataggatgagcagaaagtgtaaactaataagatggttaagtacttcataaaatgattttgacattgtcacccttaagatgaagtcaaagagaacaataaatgcttttggagttgatatatttggttgcaaatcacttcaagaacagaatcttttaaaattatatataaatatatatgttgaatcaattgggcagcaataaatggggcaagtatagtgacattactacaagcaagaaatttattttcttaaaggtgttcaccacactatagtctgatataactacacaagaagaaggaaaaaagaaagatgagtgaacaaaaagaatattgtatgcttgaaaacgaaggagatataaaaaaaccttcccctttataaaatattatttagaaattgaggtacaaaattttacaaggtctacttctatttatgcagcatcctctatcttcacaaacaagattttctttttcttcaaacccaaaaaactttgaaaaccaggctaaggtgaaaatggggggcagttgcttaaatccataagagactcaatctcctataatgactatttttttttcttcttcttctttcatcttttctgccccccaaaatgtctagagtaagtaaacaaggtacaacttaaaaatgagaaaaagtagaggaaagaattcaataaatcctacaaaattaaaaatttctacttcaaggagtgaaaaaataaaaatgaaatcaaatgtcacactgaggatgtatcaacaagaacatcatttagtacatcatcctcaccgtttgctaaggccaatagttctgcatccttatcttcatcacttgagaaatctctcctctcaagcttagaatgagctgcaatgaatattaacttttgtgccttttccataccaacccttgaatgtccatgagcagaaacccatctcaacaatgaccaattgcatttgaatccacatgaagtagcatggagaaagatgagcctaactgcaacttttcctagtgacttgaattcagtgagataagtttcccacacaagcctactactctgtggattagcagccctcatcttgccggttatcgggtctctctctttcatttgtaccgcccgagcatagacaggatcaagcccttctgttctccatttcatgagctccatcaaagcgatatgagcctcctcccttgatacaagccttgttatgagcttgtccacatctttctcctgatcagtagtcaaatacttgaatggaggcaggtatttaccgctagtgtctctgatcaagtaaaggggatcgagtatgtatgctgcagcccatgctagatgataattcttcttgaaccttttctcaataatcctctccactggcccttcactaatgtgaaatttggagcaccagtctttcacttttgctctaagttcattccaaagaggaaggcattgccctactagtggtctctccacctctatctcttgagccatgtctttgatcaatttaactaacgaatgtacagcttcaacttcattccaaaaacccacttccccaatcatatcagaaacctctctggcaataggttcttccatggaagcaagcttaaaagcttcatcaagtagaatcaactgaagtgctctagctgaattgagtatatcctcaagcattgcatatataggttcaaagaagatgatactttcatactctggcagtggtagtcttattaaaccagtgtaaccatattcctgcatttgaaatttatgaaagctatttctaacctgggaattgttattgacaaaagttgcaagcttgagacaattctctgtgactgtcctgaacaatggcagtgccttgccaaagtccttaaccaaactattaaacccctggaattgacaagaaagattgaccatccagtgattctgattttctaagcttctcagtgctttggccttaaacctgtctgctactattcctacacactgttgaacaacattcccacaaatgcctgtgactgtctcccacaaaacctcctcagcatactttgacggcacagacccactaacgaaaactgccttgcggtacaaactagtcccattaggaagattcacagtcaaatttactaaattctcttcaccactaaaaccaccatactttttaggcttccaaccatcagaggcaacttggaaaaacatggcgtctctaattctggcctctgattcactcttagcttcctcaaacctggcatccaatctagacccagtgaactctctccttgaaatccctggcaaacccacttggttaaggaaagctctaaactttggatgctcaagactagtgaaagagacagacccacatgactcgtaaacccaatcagccaaataatcaagagcacactcaatctgattcttgcttagagctggtccaggtgaggttttaggactctttagcttcttaacactatcttgtaacatagcaagtgctcccaaatcatctttaccaccggacaacatcaaatgctgctgttgttgaggtattaaagatccggttatggcagtcaccaccgtcgtagccccacccgaagccgaaggcgagtaacttaactctgtacagtagcgatgagatggatccaccactgcaagtggcgagacatggtacgaagaagcagaccctcctcctccaccgactgaggaagagcttcgtttacggtggttatggagcggcggcgcagtggtggaggaaggtgaaaccaccatggtggcggctgaagaaggtgaaacagaggaaatgggttttgcgactgagttgaaattgggacaagttcctcgctttaggtgctccgaggcagtacgagatgggtttgaagctgagaaaatggcgtcgcataaagaacaacggagcttcaccgcttttggcaaaccggtatcggtgttctgtaccagcatgggttccaggtgagcccaataccaagctcctttaccctttatggctttggttcgaaccataacgagtccttcgtaacgcttgtgtatggctttggatgccacgtcatcagccgaagctgctaccgaagaagactccatagcagctgaagctgtgccggtgttagtggtggtagctgccattggagggaagaacccaaatgaagaaaaatatgaaagattgaaactttatattattcaaagagaattctgtgctttcaagaaaaattccttatcatcttcatcgtcttcttcgtcatcgtcaacagtggtggtggtggcgtttgtggtggttgtgccactcagaaactgaacagagaagttgggtcgtggaagacggcgtttcggttgcatttagtctagaaaggccgacaccgagggtgtccggaacttaaaaacccggcgagctcccatgccggagtccggcctatctatgagactcttttttctgtattgggtttatatagctgttatttggttcgtacactgatgggttcagttcagtctttctagagagagagagaggaattgggggagagagaaatagagaaagacagaagagcggaggaggaggaggtgatgaagaaggagaagaggagagagagaggggagagtgtgtattttgcaggagaaaacacgcgctggaacgcgccaccgcagtgcgcgtgggaaacagagagtgaccatgtcgaagggaactggcgacgcttgaagtaataatataggagacccacggacgaaagcagttcctgacactggtcatcaccttctcttgattggagcgtgaattgcacgtgcctttcgagtgcttcagatttgggcttgctcccaagtcccaatttcatgtttgttagctttttattttttattttaaaagaaaaaatatttttaatttctttttggtgttgttggggtcttgtttgtgggtcttgtagggaagtgttttttcttgtcttcttcctccctttttaaattagaaaataaataataataatcaaaaactttcttttcctttacccaaatatacaaaagaaacattttattttttgaaaaagagaaaagaatatgttatttattttttgtaatttgggttttgatgtatatttttgtgtttttttttaaaaaaaaaaatagaaaaattagagacataaaagggcaacctaggaatttaatgaattccaactagttatatatgtggggtagtgttgaccaagacaatcaagagaattgggcttgaaaaagttcaccaactgccatttgcaaatatgcaatctattatttatttattatttattttagtatttctttttataatccaaaatgaaaggttttccatgcatagagtaggttgtcctcacttatttttttttttataataatatctcctcacccaattcattcacaatttatgtgtcatttgcttttaatcacaattttcatggttaatgttggaggcaatagatttttatttttaatttttagtttatatcaaaatgaaattgatttaagaagtcatgttctaaacctcttatcaatattgaaggtcacatcttgtcaccacaaacttaatcatcctaaacaacttgcataataatcttaatgccaagttaataaagatactttaagataagccttaaatgttaaggtcttactttcttttgtacaaaaaaaattatttgctaaaccatgactcaaaatttagacttgaaggaacaaaaccctttaagaagtgcaaaaactacttaacccttgcatttaaatttttaataataaaattaaacttcattcaattatatggaaaaattacaatgacatttattctctctctctctctctcttggttgaatatttattatatttttagggtgttatagttctttatttggtttttcttttaataaactttatttggtgtttcatttagaaaataataataataataattaccaattctctctactatttcacattttgtatagttgtctttatcaaacatttatgtctttgctaaaaatgtgtacaaaaatgcagaagcaccttaagatactattttttcaaagaaaaggaataaatgttatggtactgaggttgaatattatcattattcataggagtttccaatgcctaagaatcaaacagattgaagtagtagttagtttttttatttttttcaaagaaaaaaaatttgcccaaataaagtaattgttggtttaaaaattgagtgaatctcttctatgtaaccaaaatagataataaaataatattaattatcaactaaaagccaattaaagttgtcaatattcaataaacatgtcataatagtcaatgtcccattcagtcaattaccacatgttccaactggaatccacctactgatgcaagcaaaatacttaatccataaatttagattcttttttccttctaataaataaatttttggattccattcaaaaaaaaaaactcttataattaagtaatttcatttaagtttctataatcgattatatttggtgtagtttgatgaaatgtcttattccataaaaaatggagtcaaaaatctaagggttgtatatctgctacttataagaaaacctatatggacactaaatattaaaaataatttaaattattaatttttttgttgaaagggatttaaattattaatcaaaacatagggaaatggctcataaattagtcattttcttttttaaaaaaaaaaaaattagtcattttcagtactttagttttctcactagaaatttcattttccatgcaaaccctttcttccaggtccttgtcccattaccattaatctaatctctttctatgactaatgaagatttatttaattaattttctcactctgttattttggatatatttttctcacttggttaattgatgcttggcttgctattagttagttggaaacttggaattgactttcaaatatactttttttttttttttgacaaatactatacttttaaatattaatagtctcatatcatgtctagccaactttcctgtgttatatcaaaacttctggatagttctcgtcctcactggaaaagtcttctctagggcttcaatgttgcgtcgattgcagtcgtcgtcgccgatcctcggcgtttatgtccgtccatggtcaacttacccttgtggcggtggaaaggtgtttggctcttcaacattaatggtggacttggctcttcacgatctgggcggagcatccactgcagccatctttcctaatacaggtaaacttcacttcaaccttaactctttaccttttgtcccatccgatttctcttcttttgtattatcatctctattgcatttctcttccctcattaatcaaccccatttacttctccctttagccttagataataccaaattaggaaatttgataccctctgcacctccttggacaatcatttgtcctaccaaattaggcgtcccctacttcatagtcagaacccctagatttgatttaggagccactgccacttctatttgcatcattgcctatcctgacatgaagcatttaactcttcatttcgattttccctgggagaatatagtccctgatcgtgctttctataaaaggtctattgtacatacacacaaggtacagctcaaacagtcctcttctctttttttcccttcctttgtctcaatctacaacctgcatattcccctgacttctgaacattcccctgaccctacttccgatcgacccctttcaacaatggaagaactcactaacaacttatctgccaatctgaacctgactgagattgagacaaaaatacactcttttgctgaaccatttgaattgcctgaagatgaaaacagggaagagccttctgccttccttgctgtcaaattgctaacaacacgccatttcaaccctgaggctttcaaaaagcgactaaaagaaatgtggccagaacgattctcaatcaatgtgctggaaaaagagcccaatttctttactgtggaatttggatgttttggggatcgcaaaagagtactcattcgacagccatggcattttgattttaaacttattgtgatgtctcctcttgaagctggatcggttgtcacagcggagatgctcacttcaactccattttggatccaagtttcgggtattcccttcctcgaacgttctcgggctcttgctataaaactgggggaagttttaggccggttcatagaggtt

SEQ ID NO: 14802 - DNA, 4569 bp, Cannabis sativa
tcattaatcaaacaaatacaattcaggctgttactcctctaccattctaaattctaatttgaaacaaaacacttctccaaaatggatcactactttattgcctaaattcaacaagtgacaacaaaaaagtaaaatctacaagtataagaaagaaaacaaaatccaaaccttgattaaaactgaaatatcatcaatgaaaactaagatcgtttgatgataatgagaacatacccaacaatgacagacagaaaaaggaagaaggcagctattatgatgttgaaatttgcagacttggctgtgttcccactagtttctcctctggatgtctcaacaacaccactattcttcgaggaagagctcgatgctgctgggtcgagaggcacagccacatcccaaaaagatgtagctattaccttaggtggttctatttcaggttccaaaattgtggtggtatcaattgtggtatccattgacaacagctccacacaatgatcttttagtacctaagagagcataaaaggtaataataagccgaactctaaatggagcattgcccaaaaccgaaggatctaaattacacagaagaacatacctcatgggtctcagatgattgtagatagtcacacacaaacaaatcccccaaccaaggaataaagactcttcggggaagtgaaaggttggtagtttttctgttagaataataaaagattagtaaagattttctccagccagaagtgactagatatatttgaggattctgtttcacaaaagaaactaaaaaaacctacttttccaaatagaaagtcgaaatagaagaaaacacctagtacatcgtcccgtcattattcattactttcaaagagcattagtcatcattttcacttgattgaaacaataagggccaaattcttgccatacaacacaatgagaattgatatgaaaaccaaatcaatgctaaatgaacttttgttcaatcaaaaaaaaaaaaaagaagaaaggaaaaaacagatcaatgctgtgaattccaagttaacagttaagattggtacaatgtaagacagccaaaaaatagattaacatagcagatatcagaatcataactataaacgcaccgcaataggtgtatggcaagttgggaggtacaagtttctagagtcattttttcatctgactccttgctttcaccattagtctggtctgtatctccatctgcctcgtcgcagatgatatctagtctactttgcaagctaagaataatatcttcctagaacataaaagcttttaatataaatgaagatatggacattagtgatgaaaagaatataagagatccttttttcttttctattctatttttagaaaatagcaaaacaaacagtggcattagcttaattgaggccgaaacaaaccctggctgatgaatatagagtaaataataaatatattaaatagcattatggccagtggaagaaacaaggaaaatgtaaaatctacaatacatcaatatattatccagttctcaaaaaaatgcataggaacaaatcaatgcttgatttttttaaagaaaattcaatacctttatatcagcaacaacttgtgaaattggttcttttgaatttatgtatccaaaagaacatacggagccactaaaaacgataacaccaatgacttctttttggctgcatgctttataaacatggaaaaacattaaaataacatcttgaggtaccaaagcatgaaaaaaaaaattccaatgtaaataagttttccagcagaccttcagttgaagcatttttcatgaatggtagcagcaattcaacttcatgcaaaccatctgatgtgcatggttcatcattaacaagctaaaattgtgtgaaaaagaatgaaagcatgagttgagaactttaactaagaacattaatcaaaacaaaaaagtgtttcacttaattccatctatgaatagagataatgaaacagcactcaaaggttaaaataaatcaatctctttagaacttagggtgaactaaagaactgcagtagttcaaatgactgaacataaacaaatttttgcattgcaagtgtcaatgtaaacaaagtcaatttttccagatgcatctgaagaaaattataaaagttggcttgcattcgttgaaaagatctgctaacaatttcagcctacaaatagtacaggatgataatagaaaatttaaagcatatagcttatgaaatagttgaatactacagaagttccaggacctcaaaaacaaagtgacgcttaccaaattcccatcaatgatggcttttgcacctttcagctctttcgcatgaacagaaatcccatgtcggagtacatcaggcaatgtttggacacttgatgcattcttataaatgggcaatctgggataacacagctgtaccagtaagtaagacaccacctcaagtagcatggtatttatctaggtcaactgatgaacaaaactataaccactaacaaaatatttgcttaatgttatttatttgtgaatttcaccaaataagcataacacattaacagtgaaggcatatcagacaacgtcaatatagactttgcatagatcttcaaatttttattttataaaaaacacaagagaattgagtaggcaaatctttataatcttgtttttcattctcacaattgcctcaaatgaattgaaaagtaaacaattgaccctagactggtccagccaatcctttaaatggggtccagccgatcctagaatggcttcagtcaatcttaaggtctagtcgatccttaaacaagggaaaccatcgaatagatgatttgtgaccaatttttgaaatacttcttttaaaaaacatttgaaatagatcacattgacatgcttttggacaaatttgcccatgatcataactttggcatacatggataagtagttgttgtcacttggaattttaaatgacaatcaatttgttgcaagtgtatacgtgttcaaatatcttcttcttcttcttgctttcttaaaatttaaaaagaaaacaagttcaatgcaagagaattagaatcgaactataatatcaagcatgttctaatacaataattttcaaggtagccgtgatcaactcatcaattttttcaaatcaaacaaagaaatgatcacaaacaacgttgtcaaaatcatagcacaggcatatatttcatatatttgtacccataaaccacatatcctctggcatccctattgcaaactgaaaataaaatgtttgctgattagcatattcaaacaaaattagaaagcattacctaagatcaaagttgtacaagcacctaaacttttgaagcgaagttataactttccccatcttaaagtcacaaggtcttagattgctcgaagaaatacttgaacccaatgaatagtttcgacatgtccacctagatgaaatgaaacaattgcttagtcaatgttctcgtcgattacaattcaaatgcattttcaggacaataatatctgaagcaaagtacctccttggactatagcatatgtgaataagaattctttcatctagatcagtctccgagagtggtgcagcatcagcaacaccctttaaagtctacataaaccaatacattaaacaataaatttgtgtactataccatgtacagattacaatggagagccattgacaaacagcaataatgacagtgaacccattatctaaacaagcactttaaagggtgaaattcacagcacaaactggtcctcgtcagattgtactagaataaacaaaagtttgaaatagatattgaaacaaccaattcaagacatctaatatgttagtttgccaaacgaggaaacctaacatcgtaagctaagcgagttcttaatcacaaatcaagctaatgaaacttcaaccaaatgcaatatcacattagtaatagttcctccaatccaacttctaagtacattatcagataaacaaaaatgtaaataaaccaaaacattaaacaacctgacaaagcacaatggttgaatttttgaaagcgctatcaccaacccatacatagataccaatcaccttcattccaccagataacattttagacacctgaaaccacatcatttgatagaaatcaatagcttgtactacgcctaatatttcataataatcaacacaatgaaagtaattcaaagttctgaattccactaagaataaattaagtaaacctggcgagcatgttcggcgacccagtccttgtcaatggcgagagaagaagaatcaacggaggactgtgatttggatttaggtcccttctttttgtcatctttagaggattcgaggagagaagaagcagggtctccagcatcgttgagtggagttgggatcaaatcaaagacgaaacccctatctagattggagctgagtttgccaatcacaagtcccacctgagtcggaagtgcagattgagcgagacgatcttcagcttgtttgagctgagtttcttctccgaccaccgctttcaccattgttggtaatctattctctcagagggaaatttgaggctttatgctt

SEQ ID NO: 14803 - DNA, 6779 bp, Cannabis sativa
atttttaatgtttatatattttattttaaattaatttatattatataatattttatgtattttttaattaagtttatatttttaatgaattaaataatttgaaaatatctttttttggaccaataaataggtggatacttgtcgtttgagataatgacaaaatgtatataaaactaatagaaggacaacatttctatgagtgttaaatatagaggcatatttataaaaaaattatatattttagagggcacaatctgataatattataagtttaagggacaaaaggctaattattctttaaatgtttttctttaattgaaattcttgcgagatattttcatgaaaactctccaaaagttatcgtttcatcatctgttacttactcttatgtgaattggaattaaatatatgttttcctaccaccaaagtcgaaagtctatgttgataatatatctaaacaaaaaatgataatgtgatttacctttgttggatccataatcccagatttcataagatcttcatagcaatcttttgcggcattgtacccaaacattgtattatcatcttgtagaatctgtaggcaatgataagctggtagtttgttagattcatgatatataatagagcacaattcacaaatatgtttgaaagccatggaaatctagatgaaaatatacatggaagccatggaagacatgaaaaatttcagttgcgtattcatagagcaaggatgcagtaattgcacaaaccttctccacaacaacattgccattaacacctgcattttttgcaatcagtttcactggataacttaaagctcttttgaagatctcagctccaatctgcaccaatatataaaggaaacaatgtaaatattcagagccagttggccagtggtcagtaaaatttgaaacaagaagtacccgttgttcatcattatccaagtcttgtttgataccatccaccttggttgataaccttaaaaggctacagccaccgccaactacgactccttccttaattgaagcctatgataaacatagcttgaaaaagactttggtaattgagatatcgatatcggagttgataaagagaaggcagaagctaccttagcagcattcagtgcatcttcaattctaagttgtttatcctttaactcaacctgtgtttgggccccaacctgtgatttaattgacataaacaacaccataaggttagagggcagtcacaaagtttacatctctagtagatatgttaaaaaaaaattccttacctgaataatagcaattcctcctgatagtctagctattctttcattcagtatcttcttttgaaaattttcttcagtgttctacacattaagagaatacaaaaccatgtattgagacaagtgttgcatttgttatgtaaaatggagctggaatgaggcatgacattcaacatggcatagatttaggatgttaactgaacctcaacaagtctctggatctgagtaactctcttattgactgcatcccgagtgctcccgtcagtcacaattaatgtagaatccttacttatcacaacctttgtagcagtgcccaatacctctatcccagccttatcaagagtaaaacccatctcatctctgattacagttgctgcacaatacatgaaagaccacttcattcaggagtgacagtgaagtaagtgttcattcggccaaaacaaacaaaacaatgttctcaatattaggtacataacatctgagtactagttatatccatttttcccaattaatcatacattttcaaatgttatcaatgcttaaattgttataaatacgtattgctccaaatagtcacaatcttaaaataaacttaaatgtaaggtttgacaaaatagaattaggaaaaaaaggaaataaacttaaaatccaagttctcattaaatatactacctccagttaagatggcaatgtcatctaagtaatggctcttacgctcaccaaaggcaggggccttaacagcagctgccttcagcacacccttgagtttatttctgataactggagccagagcttcctgctcaatgccctctgcaactattacaatgggatacttttcttttactgcattgtccaatattttaaacatctcctttgggtctgtaatttttttatcaaccagaagcaactgcagccaaagaatttaaagacctctaatcactctatacagcaggcacattcaggctaaataaaacctcagtccttaccttacaattatgaaattcaaccatcatcttccgtctatcggtgacaaaataaggagataagtacccacgatcaaattgcattccttcgacaacttgtagactgttctctgtagacttccctttttcaattgtgacaacacctctttttcctacttgatgaagggcatcagaaaccatgttcccaactgtataatcattccctgcgctaaccgcagcgacatgtgcaagctcatgatcctcaacctgaaacattaaaatttgttaaatgtgaaatttactactattttatcaaatagtttggctcagcttgacttttacttccaatacatatctagtaattttattcctcaaaacaagattaagaaagaatgacaaacttcttacctctctggacattattttaagttcagaaacaagggcttttgcagtcttttcgattccacgagcgatctgaactggattcatgccagctgaaataacctatgcaacgcttgtatacttaatcagcattcaattatgaaaaatgaaagtttttcatagcacaataagataacatcctacttgaaatcctgcattatacccaatcgtatgctacctgttctcagttagtaagattattgctagacaagtttctagtgttttattattttcatttcagcttctatttagttcaatgagatttcagtagctcatttgagaattaattttaaaaaatctcagattcttgtttctgtctctcatctctacttttagtctgtggttcatggttttttataagtccagtacaagcgcttctctgatagaacacatgaaattaaaagatacaagatttcttctctatacttaaagaggcaaactatgtgttttcatagtatataggtcaggtgttggctcccaatgtattgtgttagtttacacgtgtacattatctattgtatagtggcggtttagttagttaaacaaccaacgtaaccacttcctctaggatgtactctaaggcctatgtctataaataggaccaatctagttcagtgtaaaactaacctcttgtaaacattttcagatcaataaagagagttacttattaatttatgtgagctagagtgtgtgatctgtgttgtgtgtgtaattggcataactgccattgttcttgaggccagagagtgagtgtttgatcgtggtaactaggattgaattttctacaattttcataccttcatgccttcagaaataaggccttgagcaagaattatggatgtggtagaaccgtcaccagcaaggtcatttgtcttggccccagcttgccttaccaattttactccaacattctccaaaggatcttccaactcaatcttcaaaattaataaacaaaattcacaacacgttatggtaattactttcatttgtaaaatccttttttctaaattatgaaagctttcgtactgtagattgcaaaaagcaaaagcaactcatatgcaaaatttgagctagccatcataataataaaagaactcgatgctattatgagtaagtagtaataggacctctttgagaacagtctctccatcattgacaatctttgggggtccatacttattctgcagcactacattccttcctttggggcccaatgtaaccccaagcaactcagccaccatgtccacccctgcctgaagcagagaaccaaaactagtcgattatatttgattttccattaaaacccagataaaagaatttacagaaaatagttaagtgtcttttgaatttacctgaagcttttttctcgttgaaccgtcatgattaaagtagacttctttggccattgcctttgggtttagaatagaaagtgaagaaactcttttgggcagtgacgtgttggtgaaagaaagtgcggagattgggtttcgagaacacgccattgttgaaattggctgagaaaactggataaacaagtacgtatttaatcaagttttggagatggctacggaaatagtagtatttccttagtgttgttggaggagatgatgagataagaaaattaaacattagagttttgcaacgattgaaacatctttcgttagcttttggcgctatccatcgcacacgtgtaaaatataccttcttggttttctttacgtgttgttttctttattaagagactcgtaataatgcatcttaaagccttgggaggaatgaaaatataaaaataagaatgtgaatgagaataaaaataggaatggaataaaatttaaaatgtttaaaaaaattgataaaaaaaattattaaattttttcttatcatgcattagaatgatctttccttccatttcaaaatagaatagccattccactaaaatagtgaaaatgtcattccattgaaatgacattccaatactattatatgcaaccaaacaaaggaatggaataaaaattatttccattcaattctattccatttcatcattacctccaaccaaacgtcacttaaaggttttaatccttgctacaacaagctaacttttcaaatgctcaagtataatttctgccaagaggggctatagtgcgatttaaacccttgactcaagcaaagcaaagaggatgaaggatgccaacaaagacatctcaatcattacaccatacaatgtggttaatacagaaataaattacaatttattttcggtatgattgtgctcattatggttttattaggcattgtttactgagatttttataaacaaatttaattagagcttaagaaattaatgaaccaataaagaaaatagacaagaatttttacgtggttcgagcattaatgaaccctagtccacgaatcagtatattggccttagaagacttatatgatggattacagtggtgtttacagtggaaaaccctatgtactattggtctctctcctgaagaagaaagcttagagagattttggcagagcttcgactattacatttatcatcccccttttgtgtgggaataaaagggtatttataggctaaagtacgtgcatgagcatacccatgacccgtccagggtttctacaaaaaaggcccactattagggtaaaatacattaaataattgactattggacccccgagatggttctttctcgtgtggtgagtcatccatacagtgaggaccattgttggtgcagggcatgtgttggggaaaggcctgcattgggtggaaaaaatacctggaggcaccgtcagacaaagaagagtatttagatggtgttgtgcgcactaccatggtctgacacaggggacaagatttgatcatgtattagaaaagaataattgtcattaagtcatctgacttttacctcgtgagtggcttctggttctccgtccgcagagggtatctgtcttagactcttagcatggctctttggcatctgtctgcacttataggtaagtttctcttttctggatccctaagcaatggtaaagcttctgggtcccgaatggtcattttctttgtggcgactctctacgaactctccatgaccttccgtgattaaggatacttaatcagcattattctggagactcccttctattgttcaccacgtgtccttcatctcgaaatgcggataaaatttagcccccaagctttcaggactcttgagtggtggaagtttgcaacctccctttgaattgttaggacatgctctaggatacgtggatgaactctggagatgcggaagtatctctttgacacttggcagttgaaaagtctaagggccttcgtgaactatttaatggtacatgcgtgtcaaatatttcacaaacccgtgagtcatacgtgcctatgttaagtgcgtttgttgctgggaaactcaactggtggcaaaataatgaagtgacaactctttaatacgcatggggcctgttatccaagttttcattagccatgatcagagggaaggatacagccacaacaagaattatttgaggtaaccaagaaaaggaacgattttacggacctggaaggcaacgagaggcgatggccttcggaagtaacttcccttagtaaagaacccagaaggcgttgagggtcttagagacattggccacgtcagcatcttgcaaatatcactccatagacgattacacctttttgtaacaaaggatcagattttgtcccccgtgtcaggtcatgatagtgagcgtatgcaccctcaaatatgctttttgcccaacgacttggttagggagtattttgtaaggaaagacctttgcgcaatgcgtgtccaggttcgtacaaaagccctcacaagctgttgtacaccacataatgaagaaggttcttaccagccaattgtcagatcgtcatctcacagtactaaccttagtagcgtatggggtacgaaaccctaggtgggtaaagggtatgccctttaccccatgtgtgcctataaatagtcctatctttcttcaggtagagagagaattttttttacttacagtcactctgctgaaattccaagaaagctctctctcaagagaag

SEQ ID NO: 14804 - DNA, 3391 bp, Cannabis sativa
aaaaaaaaaaaaaacctacttttatgaaaattgaaatcacatgcaacagccacattgctgttgaataaactcaaagttaaccaaccaatcaactttttaaaaataatttcactaacaaaattgatttgtcaactacaaaccaatcagctccaagtcacaaattgctcaaattttttggccagttaaacaagaaccgctccgatatcaaaccgattgacctttgcttatagataagtaattaattttaattgaaaatgtagttcagcaataaccgatgatctatactagtgaaacatagactaaaaagctcctaaataatactcattggatgcaaacatcatcaccacaaaatcccaattaacaaacaaaaatgtttttaacatgtaagagctattcaaaacttccaaataaaacaaagcacatgataaagtaaattccctacaaacagcaagagtagcgacaccacctaacccttcacaggtcttgaacactcaaacctacaaagagaaaacaatgaaaaacaaactgtcaaaatgaaacaaacacaaagaaacccagctaaaccatataataaataaaaatttcatatgagaattttcacgagggtcatcattctggctgacaaaactcaattcatattaaagagcggaggagttagagcaatcaaaataactaatgtaaatagctacatataaaaatataactaagagctaaaacaagtgattaaaattcccatccaatatataagctacctaatgaatagtgattagctaaatgtacctacaacattctaagttttagtgcatagcaataattgtttattattttttaagtgtgttttgttgatttttgagtaaaatattatatataaaatgtaatattttatcatttatatattattcaaatttaaatgatatagagaaaaatatgaataatgcagtttattatattctagtgtgtttggttgatttttgaatgtaaaattatatatataaaaaaatataaatatcatattttataatttatatattatttgaatgatatggagaatggatttatggtgtaacataaagtattttaaaggatatagattagagaggctgttgggagtgctaaaagcaaaataagatgaagatggtggttcagatgttacaggagagaattaacatatttggagttctctctccagtgatcgtttaaaaatctaaagctggtattcgaaacaatcaatcaatcagattctcaagaataacaaaataaataatacctgggggaagggattgcttcaacttgttagccttctcagcatcaaagacacaaagtgtgtagaggtacttggagcatctgaccttgaacttgacagcatctttggtcctcttgatttttactgaacgagcatccttccttcttgcagtaagaaggaaatccttgatctcatggatttgcttaggctgttccaaatcaaatccgaatatataaggattaatgacaccacagtttatttcagaagtttataatataactgacttcaacatcaatatccatacacactagtttttcttttctaatgatatttaaatgatgcatttttttcattgtctcatagaatcaatatgggatgggacttcttacgcttaagaatttcttaaagatagatatttgtagtgttttatacgaggaaccaacacctccttgctcaggaaaatttgattaaaataaagaaaccattggctgtatgtactaattcaaactatcaccaaaaatgaaaaacggagaaaatgatagaaatattttattcaataatatatatgtagttattgtttcaggaaaagccataatcataagaaccaaaaacataaaccttcatctccgcaatgttaaggaaagattcgatcaaaagaatgagaaacgtttaagctcaacaatatgttaatgaaaatgaaattaaatcacaaatggactaaatgttcattctattctacagcaaaaataatcaacatctgaaaacgggaaaagaaactaagccttagaaccctgacctatgttgtaaatgacgaaaccagtaagataagagagaaagtttctcgtgagacttaccatggttgagatcgatggagctcgtgaggtaggcggagttgaagaagggtatagtaccactctcctcccatacatatgtaacaaatgaaactaaaccctagtggactgttgaccttctgttatccaatgggcctaggcccaactcttattcggcattctagttttcttattaatggggaaacttacaaaaaatattgatttttttccctactttacaaaaatactgtcacacggcagaaatttcttttttactgtttaggcctatttgtttcttcttttatactgtccgagtccattattttttcttttatactgtgaacattaacaagggacaaatgatgcctccttcctcgttgggaacggacaaagcaatacggaatcatagaaacactagaaaaatacccataaaatccagcaaagaggacaaattagtaaattcacgactaaacaagacccaacaacaacatttaaagcagattcaaaggaaacaaaagaggtaaacacacctaaatccacattattttaatttttaaaataataaaaaaaaacacccagatttagatttggaaattaaaaaaattaaaatagtataatctgaaattgttaattatacatgccattttaaaaagaaaaaaaaaatattcatatagatcatcccttacaaacgattaataatatacattacaaaaattaaagttgttcttaagttgtttttggcttataaacataaattcattgctaattagggggatcaaccaaataataaaaagaacactagaaaatgatttttatgcattgttttgtaatattattttactattgttttaattggaaaaaaggtcacgtaaatgattgtgaaaaatgataggttatgaaatcttaccagttctgataaagagcaatggacaatgggaagaagaacataattatggcaaatatgaggctagtggagaattcataccaaaagattgtaagtataaagagctgttacagatactacttacttcattggggtgcaaaaacacaagaacaactctgcaaatacaataccaagtgaaagaaggaataccaccgattaaaaatattcaacgatgccctcctcttcttttacttgcaattgaagatcaaagaaacagatttcaccacatatccattatgcatcaaccaacagaaaaacaacacaacacctgctgcaatcccaaaaaactacaaccacaacaacaccatatcaagaaaatgtggcaatgcttgaaaacaacacagcaacaacagaatcatacacactcgaacacca

SEQ ID NO: 14805 - DNA, 3503 bp, Cannabis sativa
agattggtgaagctcagagaaatgggatggagatgtatcataggagtcttgcaagttctgaaccacggaatgagaagatttgatttgtctaggcagatctccaaacttctgatggtgccaggattgaagctctgaagaggtggctgcaatattctgtagcagggtgttggttgtaagatcagtcgtttgtttccaacagttagaaataatagcttcacactcaggttctcttagccataatttctcaaagtggaatcgagatttgaatcttggtggtgcttcctggttgttgagcacaacagagacaagcaaagctctatggtcggagctataaaagtctaaatgcttcaaagttggcagctgaatttgagttgtccatggtatattcaagacaacataatcaaggcgctacttgacattagcattggattgagtattgttatgccaagtgaaagtttctccaataaaggaaagtggcgagagtccacaatagtcaagaacatcacggaaatcttcgatttgtttggttggtcgtggggggcctccaaatttatcatcagcagaaatgatctcattaaagtcacccataattaaccatggaagaagtggggcagagtcatgaagtcttttgagaagtgtccaagatagatgccttgaagatataatgggatttccataaaaccagagacgtgccattgcggtccattattacacgacatataacagtcaacaaagtttattgcataattgagaatggttacattgatgtgagatttccataaaaacattaaaccaccccctaggcctgccctaggaacttctatcccattaggaaaatgtaaaacattatgaaatttaaagagggaaccagcttttaatttggtttctataagatattacatcaggacaattttgtttaacgagcagttttagctgacgaaaagcacgaggactgcttggcagcctgcgccaaatgtgcatccttggtgtcatccttcaatgagagatcagagaactcaaaggtcagattcactgttggttgttgcagattgttggtggtatcagcaagaggtgaacttcgtgtgcgacatttttttagtacttgtcttgtctgacatttccactagaagaaatcagctgtctttcagagaaaacagatgccattcgattctcattagcagtagtatgaatgagattagggagtgtagtcgaatttgtctcaatagcagcaacattgcttgaagtatttggcttaacaataatgatgtttgagtctacaacggttgctgatattctgggggaattggtgtttgttgtattttcaagatgcatgtaggccggtgtagtgttgattgagagtggcactgattttgcagtggataaacgagtggtcaaagggacatttgaagatgctactatagatttagtgatgggcgtattatcagtagcatttgtaggagtcgtgttgacattgtttcgtgagccatcaatggtaagacatatactcgatgaggcaccaagtgtgtggtgagtagtctcggaaccagcagacattattttctcaagaggaaaattcagatgtctgttaatgatatcattttgtggcaggacaacaggcagagaaatcataacagtttttccttttcctttaggggagagatgttgagtaagtgttgatggttgtattgggtgagatgtggagggtgcgacagtgaggttcttatcttgtggtgtcaaaacagtaggggtagaagtgttgtgattggaaatcataacagatttaccttttcttaaggagtgagttgttgaggaagggctggtggttgtcttgggtgtgatattatgggtgaaatagtgtttctatccagtcgagtaataaaaggccaaggtcccgattcggagaaatcttgaccatatcgatcatatgcattccttgggagagcaccccccctccaaccaaggtccataaggcaaatctggatcaagaccattgccaactttctctaagaattgaggacatttgccaaagacatggcctataatgccataatcatagcagaaattaggtagacgtttgtaacgaaaatctagccataattcatcatccaaccaaggaagagttattaattggcctcaaaaagaggcttaaagacatcaatttccactctgattcttaagaagtggcatgaaccctcattcaaggaatcctcaaggactttaacaaaagtaccaatgaggttaccaataaccttagcaaggccttcagatttacttagaaatggtaaacgaaatacttgaacccagaagggagtaattattaccgattctattgtggcattctccagagcacttggaagacataagatcatatgaagattgtggaagtgccatggttcttcataaagaactcttctcaaattgccctcacaactgaatgtaatccttagagattcacattcataatcagatatatccactgcaaatctaccctgccaatgtttggcgatgaagatcttgagttgcttcgggttataatcctttttggagaaaattctgcagaaaagcctatgaactgcaggccttggagttggagcagcaacatttgaaatattaaagacttctttttctcgtgtagtaagagcactgagaatatctgggtgaaaggattccataacagaatcaaagaggatgaatctcggagcagcagttgtagtcaaaataaggaaaagtaggggaagaagaaggagtggtaggagcagtttatgggtcaaaggttttaaaaaagacaaagcaagggaagaagaaggagtggcgggagcagtttattgatcaaagtttttaaaaataggaaaggaaaacagttaaaaagaaagaaacgatatcaactgccacagagcaaatttttgcgcagacaagctctcatcgagataattctagaatatcgacagcttcaccattactgaccacagttgaaattgttagaaattttataaataatacgaagcatatattatcatgtatgacgtgcggaattaaatcaaacatatatgtactataaacaaaggatcgatatatttttagtcattgattcttttaactttagtcctacataaacgttggatcggtaaatgaaaaaaaaaaactgaccagtgtaggtaatcaggcttccaagttctctctagtctctttagaagaatttactgtgtttcacaaaataagcagtgaacttgggacagagatcatatatttatataagtgggacctttaatcaaagtctccacaattaattgtcagaattttttgacaatcaattagaaaattaaattaattggtgaataaaaactgaccatatatagaatatttatatttattaaataattgatttggaatcaattttaatgaatatgaaatattcatacatctaaaaattaattaaatgattttatacttaatataaaaaatatttgaattttctcccacttggtcagcatttagatttacca

SEQ ID NO: 14806 - DNA, 4294 bp, Cannabis sativa
gggttcgaagaacacttggcgacgctggagaggttggttgtccggcaaaagagtgacgaagacgacgggtacaaggcgatcgccattgtcggaacaaaaggaatcggcaaaacgtcactctgcgctgtaatttttgacaacgaagaggtgaagaaaagattcttaccaagggtttgggtctccatgcccacaccgtcggatgaagaatacagaaagtgccccaaaagagcgatagccaaacggatcttatcctcgctcggagtggaagaagttgagaatcacggcctaaaagggctcatttgtgctcttcaccaagaattggcgaggaagaggtatttgatcgtgttggaccagtggtacggagatttgagttcgagtgaaggggatagtttgggtttggaacatggatttccgaaaggctatggaggtacagtgatagtgacgagtaggaccgaaagagtggccaaacagatttttggggatgataagagaactgtaataccgcttttacccctcacggatgctgatatgtgctgggctatattcaagcaagaagtggagaaagatcatgagttggacttcagtccttccaacattaaagagttgaaacagcaagttttagaaagaagtggggggattcctctacgggctaaagttttgggtgagtttatgcataaccaactccgacaatccaacaacacaactccaactatgtaaacaataatcctaaaattactccttgtactctattaattctttataataagaagaaacaactctgttttgtttactgacatttatctcttttatttttctgagagaacagctctagtatattttatttttttccaagtgatgatagttattaatgtattatatgtttcacattagttatattttgtttgtaataatagcatctcaccaagctttcatagctcagttggttagagcacccgtttagtaagcgggaggtcttgagttcaactctcaatgaaagcaaattttctttttttattaccattaatcaatgccgtttaagcaaaaatgttgacaacacgacttttatggtaacattaaccttctaaattacagcagtatcgtgtgtgtctaaatatacacattatttgttcttttttgcaacgatcaagtggtcccatatgtataatatatattaattagactaagtactaaaactcaactagcaagtcctacatcatcagattacgtataaatatataaatatatatatgtgtggtacattccttgcactttcagaatatgttatccatataattcaaccaatcattgcagacatcttctaattcgtataaatcatatggccacatggtctcagaaatacttctactaggtcccataacttgaccataatttggatgcatatgatcatctacaaatgttccttgatgagcatgattatcctcccgggtttcaaaccctcctggtacttgtacacaatgatgaattttttcagatgtttgagatgtattatgattgatggtagtcccgtaattatgattacaataatgatcagtatcattaacaacttcattctggtcaatatcacgtctattatagccaatttcgtaatttgtaggtgctgaggtaacaatcgcagctgaagggaaatcatgtgtagaaagcagttccttatgatgatttgtgatttccaattttgatgatattaaaggctcgtaagggaatgagagtagttgatgatcagtagccaattcataaatactattgctaacaattatgtccttatcagaggctgcttcatcatttaaatttggttctgatttgattcctcctaataatacagtagtactagtagtagttgtagtagcactacttgtactagtactaatactaatactagaactgtgcagtggcagctgcttctggaaccgtttcttcaagtgggtgtgccagtaatttttcacttcgttgtctgttcttccaggtagttttgctgctattgcagaccatctgattaaacaaatatataacaaaaatatgtatcaatatcatgattcatattgtatataaccctgttaattatatgatattatatatttaatttattagtacagtatactactaacctgtttcctagagtctcatgcaatgtgacaatgatttccttttcttcttggctaaaattcccatgcttgatgtctggccttaagtagttcacccaccggagtctacaactttttcccgacctattcaagcctatatatatatttaatcgtatcagctcagtattgtccttgaagttatgttaaaattaatttctaattagatcatactgccaaatttatgtaagaaatattgccaatttttcagtttaatatatttctatacgtaccagcagctttggacatctcagtccagttccaaattccgtatttcttaatataagatctcaatttttgatcttcttcgggactccatacacctttcttcaggtgtgtcttctcacagagccgagatttcatcgccattaattattatgcctttttttgagcttatttcatctattttcaaagtctcttaacacaagtatatatacgtcttcgattctagtaaattaatgtatatattatatatcgttacatcacatgcatataattaatacgcatatatcaatattttactgtattcaaatagaagaccaagtacaaacaatggatatataatacaattcatacatgtcatcactgaattagtgcgaccatggctagactacaattttggtcaaacacatcaggggttaaaggaaataacaaagaacttccctcatattttccactctacacgaaaaataggtaaattaattagattaaaaaacacgtgcataaatgtgtgaaagaatttaatgaatacttaatttgtacaaggtaacaagtcaagtctggacgctttcctatacgatcttgcaaaatgacaaaaaatgattactaaaaagttttacatgcattaatttactatataaatacaatataaggagatagggctggaatggaaataggatttttatcattggtagcagagtgatacctaaccatcaaattaaatttattttggatacttttattagcactacaccagcaaaatagggatttagtaacatttcaaagtgttataattgattagttttactaacatttatgctttgctgacatttatgaaaaatatgtaagatatacgagtgtgagtaaaaacacaaatgtaactataatctttttagtgtcattggaaaaaatgtcactaaaaataattaaaaagtattttgaaatattattaaattatttataatattttaaaaaataaaatatttagtcagttatatttttaaattttcaatactaaaaacttaaattattttataaaaaaaaattacaaaaccgcccaaagctcgatttatttacctagtatataatataaaatagatacaaaaaaattataatagctcgattcgagcctactccacttttgaagagtactcttgctttgtattaatcctttttataaatggaggtgggtttaccttattataaggtagcaggtgaatattgttacaaaaaattatagttataatgagattgtacgttacaataatcacaggtgtattaattatactaattagagcggttacaaatgtttgtgaaactactgaattattaactcttgaatgtttgaattagcaccctccttgttgtaccgcagtctctctttagcaaagtctttctcgcgggcaaggagaaaattcatcccattgacaaaaggtaatcaaattatattaattaaacacatgatcaaagttgggaaaattgaaatatactataattgcataaattaaatttcaaggtctctatgggtaaggagtcaacatgaaagcgttcacacactattgaagaaacagccgtactattttgagatggaatctcctaataaatgactaagaccaagtatatactataatatgatcatggaattaatatatgcttaaaaatcctttaaaatataaatgcttaaaaataaaagattcattaagaaaattataatatatagatgaatatggaggaaactaattcttctagaattaatcggaaattcgctaataagggtgtttattatacaaagtataagtctattcagatatgatctaattatatattaaactaggtaactaagccgtgcttcgcgcggtgttgtttaacttttataatctttatttgtatatatgtatttattatacttacattgagtg

SEQ ID NO: 14807 - DNA, 7784 bp, Cannabis sativa
aactattcggaattttttaaaaatttacaagaatgatagtgtaactataacaaataccgctataaaaaatttgaaaaaaaaatatttcgacatgtgattaacactcctcttacaattagtaagcgattctttataatttttattaaattaaaataagtagaatttcatattaaattgtactaatgataatattacaactaataagagtgttagacatcatgagtaccctttaacatttttttactaggtttgagaaattcgacttgtgatctcttttttgtgaagagatgtgtgaaactattaggctattaaaatgttattttgtgttttgacaaacaaattctaaataaatttaagtgtaatttgaggtagttattttttcctttttaaataaaagtcaaatttttttattacatagttaaatctgctaatacaatagacgagagagcctagggaacattgctccaagtaaaaatatgatcagaacaataacaagagctgtgagaaacacagtgaacgactttattagcagattgtttaacataacaaacattaagattaatcaaaaaataaagtaaaaacttgcagtcttaaacaatgagaccaaacacaaatgacatctcaactgaattatgaagagcttgatttgccatcatacaatcggactccactatcacattaagcagctttttcctttttgtcaaacttagtgtctctttaatacctaccaatctcagccacgacaagttgacaaccactaaaagaataggtagaaaaagcttcaattaaaacaccatgacaatctcgagctataaaactagtaccaaacgcattgtcagcttcaaagggtgctccatccacataaatataaatctaaatcatatttaatacaggtttagtccaaaaaaatctttgctattatcattaacatcttcttgcagtaggggctcaacacaatgagattgagcacaattccattgatcaagaactttatgtgccaaagagacaacatctggaactcaacaattacgattgttctataaaagattattttgggccttccaaatcgaccaacccaccatcaagacttcttccagcataccatttcgaccttggtgcaaaattcagagaaccaaacatcaatactagtagccgatgaggggcgtaagtcaatacctgttatgttccaacaagattgagcaaaagagcaagtgaccaatacatggagaattgattcttcatccttgtgatagaaaagacattgcaactatacataaatatgcttggtgtgaagctgagttttagtagctaagcagcatgttagtgctcttcaagcaaagtgaagcatcttaggaaggacttttaatcttccatagagctttctgcatatcaaattccatctgtaaactccaatctcctttcaaaacttgaagataatgttacttttaactgtatagaaaccagatggttctttattccaataccaaatatcaacatcaaaagtaggacttaaaggaatatttagaatgatactctcacgtgtttcaaataaatcatctaccaattcttatctcactcacgatgacttggtttcataagttgagccaccttgcagtgatctaaggctagatgagaagattcaataaatgaatttttattaaacggtagccaaggcatattcagtacattagtagacaagctagaaacaatttttaatctctcaccctctttaaccaagttttgggactcaaaaatgctcctccatataaaactctgattagcccccaaggaagcattcagaaacaaaccattcgaaaaataacaagacttgtaaacacgtcccaaagagaactttcataaagcaatagacgccaatattgctttccaagaagagactgattgtagtccttaaggtttcaaaagcctagcccgtccatatttttatgcttgcaaaggtgttttcaactcatctaactgatcccacgtgacctattattagacgaggaaccccttcaatacttagacttcaaccttttgagatgggaaaaagtctccaaaggcaaaatgaaaacaaacatcacgtaacttggtaatgattgagccactagcctttgataaaaaatgtccttcccaactttgaacttgtttctgcattttatttttaaggaaactaaaataacatatttgttctttctcatagaacaagaaagactcaaataagtactattttcatcatcaattcccattcttattaggctacaaagacgagatcaagtgttaacacaaaagaaaatggagggttcatttacacacacatcttataaaaaaaaaaagtaaatgaagggttctaattatattttttcagttggaataataaagttgttggaatttaaatctgcagcttttttttttttttttttctctaaaatacaacttcaaaaatacaaaattaatataatagtgtaaaaatgatattttccaaaatttttactcttactatgcgtccacaacaaaaatgatatttttataacacaaaattgaacatttacttacagacccaatcaactatgagcccaataaagcaaggtatcacatccaatatggttcggtcaaccattagaatttgtgaaaattacacattttgagtttctatacaattgtgcgaaaatatgattaaaaaaagttatttatgagaaaaattttaaataaaaaaaagaaaaaataatatatgataactcgttattctaatgaaatcattggtttaacctttgggtcatcctaaactgttttacccatatttatttaacttttctttttgaatttttcccacaaaataatatttttttccaaaaaaatcatatttgtgtaaataatttttaccaaaaaaaaaaacatgaaaatgaaaatttaccttagaatttattaatttttatttgaattgagactaatctataaaaagaaattgcacttaagattaagttaatgttttataaatatgaagcttttttattttttattttatcatattttttgtaaatagcctattataaactcatcacaatttttttccatcaacataatatcttgaatattctcacacaagtaagttaaaaaaaatggtattatttagaccaaaattagtttatcattgatcagaaaaccaatcaataatttttattttttaagaaccttttactctgttcattttttatcattcctttgcctcctccaatcccaaaagacttcccccctcttttacactacctcttgtatctatctaactcttttactcttaggtgttaacttaacaagacattactttgacatatatccattactttctatgagatgtctttacatactttgacaagtgtcttttattttatcttacgtgtccacattctatatctctcctatccatgatgtgtaactttcttaaataagatatttaagtcgttcgacttgtatatcttctttatcttgaatgtaagtcatccattttagatatatcttccatcttagatttaagtcattcgttttggttttggttgtatcttccatcttagatgtaagtcatacatcttatttatgttttatgtttgtctgagttatgtcatctcatataaatcttaaccaaatgaatgagatatgagtcatcctgatcgaccaattgagatatgagtcatcccgaccaaccgtctgagatatgagagtcaccccgactgacccactgagatatgagtcaactcgaccgaccgactgagatacgagagccatcctgaccgaacgactaagatacgagagccatcctgaccgaacgactgaaatatgagtcatcccgactaaccaattgagatatgagagtcaccctgaccaattgactgggatatgagtcatcttgacgactaattgagatatgagagtcatcccgatcgatcgactgagatatgagagtcacactgaacgatcgactaagatatgaatcatcccgaccgaccgattgagatatgagagtcatcccgatcgatcgactgagatatgagtcatcccaattaaccaactgagagtcatctcgaccgatcaactgagatatgagtcctctcgaccgacagactgagatatgagaatcattccgaccaaccgactgagacatgagagtcatcccgaccgaccgatatatgagtcttcctcaaaacgatgtgagatgggaattatctttgatcgatctgaataaaatataactttgacttgtccaatgaagttaccctcttaattttattcccgtatctcgactcctaatcttgatcttcttagtcttttatgggctttatttatattcgtttattgagtcttttctatgtttttaggaccatggttctcttgttggcttattgatatttccctaaacaggtatgttatatataattataatgatatgataaatgaaatgaaaaccagagcaatataaatcatatttcaaggaaaatacataaatataaaaccacacgcatcccattaatggcaagtcattgatagataaaacataaatatattaagagtgaattactgaggtggctggaaattttcaaaggaggcttccattctctgtgccattcgttgtaaccccacatcatattttctgaccaaatcatcgaatgccagcccttccacaggatcaacggtaaaggaccactcaatcacacaatcacgacattcacttcctcctgcatagatcctgaatgtcgaaacataggactgaaatccaatgttgctttccaaaatttcatagcttaaactatgctgatcatgatcaattgcagtcaatctctctttggaccagctaattggagtactgctaatttgatcatcaacgttattgggcggtattgagaaccctgagcagtatctgatgcagccaacctcaccgttggtaccgtggattccttggcaagtggctaaggtaggaaaccatttgttgaaattgaagaagtctgcaagtaaaggccatatttgttctaccgtggcatttcgtatcattttcgagacatttccttcccattttacctgtgaaggaagggtgtaccaattaattagccataaattttaaaatctaaaaatgtggaaaaataaatttacaaaaatcaacaaaatacagtatatgtataccaagcccattaaatggtgttcaagtcttcttcttcacaacctacaataaaagtaaattgcatgagctatataattcagtagctaatttgccctgtttgtactattttgcatgctctattttccaatcagattctacaattctgaactggtaaatttcttgctttcagttggtggatttggataaaaaaagcttacttgtggccttcggttgacatacacaatattctcacatctaaaaatatataaacaaaataaaaattaaacatacatactaaaataaacatttttttttatttttttttatatgttgattagtttttaatgagttagcaaacaatttcactggttaaaatataatatgtttttaaaattagttttatatgtttattagtttgtatttgagtgtggttgtttgatttctacctaatacaaatgtatctatctaccactttgaattagtggtgtttataaaataaacaattcaattcaatacgcacgattcaatccaatgtaatttgcaaagtgcagatatccccaccgtgagaatcagattggattgcaaaatctaaaatccgcacttgtgcgaattgaatgttaattgacatgtaaaagtaaccgatccaattcaatctacacatatttatatatttttttaaaaattatatatacaattaatatttctatttaaaaattgtaatttaaaaatctactacatatggtgtaaatatatttcgaaacatagtagatcaaatgtatattctaatattcttatttataaggaaaatataatctaaaacaaaattaaatatttttatagatattttttttttcttcttgtgaatttgttattttttattttattattttaattaatcgttagagacataaaacaacaataatttattttattttattgttagttatgcgaaaaaaatattttttttaataattattaaataatttaatattaaaaagtaaccaattcaaaataatcgatccaatctgcacttttgcgaattgaattggattgaatttgagttactatacggatttgattcaaaatgtaaaatccacacttactgcgaatcaaatacaatatgagtaaaatagtacggattagatcggatctactttaaactttgtaaatatttttaatcataaaaacaaaaaattaattattttttactagacaaaatgatttattaagaacattttaatttttgttaaaaaattatcttctatatgaattatttagtcaattagtttggactagctacttgatattttattttcatctctattctttttttttctaattcttagctatttaagaaattaataatttattttaaaaaatcaatatttttatattactttaattttgtagtttcattttcatcaaaatttggagacagaaggtttgtttggtatatcgtgttcgtattgtgtagtattgtatagtattatttaatacaatactatatttggtattgacttgtattaataagttatgtaaaattatactaactttaccataatcctgcccctagccccagacgcaaatcctggctctgggcccaaaccctgacttcagaccctaacaccaaatctaaacccaaaccctagccccgaaccccagaccctaaccctaaatcccgaacctcaaccccaaacctttgaccaagacctagacctgaacctaccagaactccgacctcggtcccaaacttggacctagtccccaaacccgactcctaacctcagacccgactcccaaccccagacccaggacatcagaccttgatcctaaccctaactccgttctcaaattatttctaaatattataatacgagctaatactaactattttttatgtataaaataatacgatttatgttatattaaaatttatgattattttattcaaaaaaaaaatttataattacaatcttaaaaaataaatgtataattgtaataatttatacaatacaaaggtctattcaaacataatgttgttattatttaatacaatacatctcattgtacataaatttgaaattttatatagatatatatatatctaaaataaattgatcatgaatacactttccataatgatttttacaattaattatactattatactttgaaaaataatattgtgttgaatatttaattgattataataaatactgctgataaatctcatttatatctatagaaaatatgacaataattacaaaatttaccaaataaataaacattatatgccaaaatattaaaattctaaccttaataaagtgctcttacaaaaaacccttactaatgtgatgatggaccctccaaatttcggtgtaaaaacatattactaaagttcactatatttataataactttataagatcattggttttctacaagcaatgtgggattccgattaatgtgcatgcaatagttcttccaaacaaataaatcattcaaagagatattttctacgagcatctttaataaaaagaaatttttacaccaaaaatataaaataaaatttttattacataattacttatacacggttacatcaatttttttaccctttttctttattttattacatata

SEQ ID NO: 14808 - DNA, 8992 bp, Cannabis sativa
gttatttgaatgttattttttgttgttgttttgatgttacttttatgtaattttcttgttattttcgtgttgtttctattaaaaaaaaacgacaataaaagatcatcatatagaaaaaacgacaataaaagatcatcatatctgaaaaacgacaatagtaatgaaaacgagaaacaaacgacacgattcactaaaacgacatcaataaaacgtaaaacgacaattaatgacggcatccgacgtgaaaacgacaataattaagaaacgaccatagtttaacaagacaacaatagggtggaccactggagcccaacaagtggcccattaattttgatggggttcctccaaaacctggcccatttccataaaaagaattcttctcacattcctccctcaaaatagtcaaaataaataaataaataaaaataaaataagaaactaagtagggcctacacacgtaaccaaaaattaatgataatgattaattaatatgacttattatacaaattaatgagaaaaacaacaataacaaaaaattcgaatgaaaaaaatacataattcttgagtaaaaatgcaaagaaaaaaaagaataacagatttttttttcttaagtgagtttaaaataaagaaggcgtgacactagagaaaaacgacaataaagttccatcaggaaaaacgacacaaataatttaaaatgataataacgttccctcagaacaaaaaaataataagaaaacgacaataaacgacataaatagtgaaaaacgacaataaaggaccatcatacaaacatgaacgacaatcatgactcatgagaactacaataaacgacacaaataataacaaacgacaatgaatgacagcagccgtgaaaaacgacaatattggatataaacgacaataatttaattaaacgacgacaatagagttggacgactaaacccaaaactcggcccattaagatttcaatattccattttgaaaagataagctcttgtttctattaaggaatttttttttaattacccataagaaattatataatatgaatcaaaatatttttaatatttttgcagatttatattaaatttctgttcgtaaaaatataaatactttctgtagaaatatcttttattttttataaaacccatttatctaattaccaaattcttattatgtgattatgattttgtagttagtgtaatattttttattaattagaagaacatgataagcatatttagttaattttatataaaaaatgtaattaattaaaaaaaacagtaattaaataaaacaatccataaattttattatttttctaaaatgttggcatctaaaagtgataaccataattgatttcactttccacctaatctacaacaacacaaacaaatctataagaatcgagttctatagtaactataactcaattctatatagtattgctaagataaattcataaaacacatatgatctaaatcaaatagatcataaatatatttacaaaataataaataataaataataatttaagtgttggaacatctagggaaaactcttccacttttgtcaaagttaacattttgacacgaggcttcgacaacaccttctccttcgcgcaccaaattaacatttgtgagtgaaattccttcgcatggattactcttgctacactcgaattttactgccacttcagaatcactcgttcctcttatgttgttgtacactacatcgcttatcttgacagctgacctctgccacataatactctttgttaaaatcagtttgataatgtaataataaataatgtatacttgtatagtgctttataacttatgttttttttttttttttgttataaaacaatttatgttacaaattatgatcaatttatattaaggttaataacgctgaagttgataaccaagaacactactagggtttattattaccttttcatgacaaggttcatcttggtcacaataattttgatcgatgattattgggttggtcacattgatcatttctatattttggaatatgatgttttttgcataaccggatcctccctgcaaaaattatgatatattgtcaatggtgactttaagatttgatggacattagaaaaaaaaaattatgtcttttattagaaaaaaatatattatatcttcaaaaactcttaaaaatatatgtatatttaaatataattttttttttttttgagtttttgagctgaatggatcctaagcgcgtgctttaatcaaggcaagtcaactatattcacatatacaaattaaagtcaaagaatatatctatatgaactattaatatgtgtatagttttctttttgccataaaattgcttttagattacactcacttatatacaatacatgcataaaaaaaacatacatgatttagaattaggtatagtaaaggtcaacattagcatagtatgcttgacttaatatggataatatttgtataaatatatataaattaatttatggataatcaaaaaaattagtattggtcaagtatagttgcaacaatattgaaataagttcacaactaattaagtcaaaaagtaagtaatagttagtattttaattagcaatgcatgattatttggtttgatacaaagtagaaatggttagaaaaatgtcattatttttggtagagcacaacaaaaaataccaaaaaaattctctactactcttttttattttttaataattattatttagttcataaaccactataccataattcgccttaatgtatgctaaaattaattatatatatatataaatttggacaaaattcacatgttcttaccaaattttcaaagggtttgataaaatattgcattagaaatctagtaaaatcaagaaaaataaacaagtaaatagtattaaaatgtgaatatattttcttcccaattttattttttataatttgttgacatgaaaatcttggtatatagaaaattgattaataataaaaaataaataaataaataaaaaatcttacctgccaagttttaattcttactccattagtagtgcctgaaattcttgctctattcaccatcacattagagacttcagcttctgaatttccagctcctaagcttccaatgctataaatatatacaaattaattatgaaaaatagctttaataaaatacaatttaataaaataatatatttttataagagtgatttacggcataaataactaagtttaattttttacggtaataatatctgaattatatttttagaacttttgtaggtacctaaccgttacatgtcaagtcattttcatatgtcattttttttattggtatatttaaattaatttttaaataaaaaacaaaaatttaatgacctaaataaatcaagaatggcaattataactttaaatattattaccgtcaaaaattaaacttagttatttaagccgcaaattactctttttataataataaaaaaattaacaattatatttttataaaatatttttcaaaattaactaacttatatttaatatattttaaatatataaaatgtgacaaaccttatgccatgaccaggcccacaagtaatatctgtggctctaacattttttgacccacttacaattgaaatgcagtcatcacctaaattaataataaaaataacaataattattaattaataaaataaatttgaatatttattaatttattaatactaattaattatgattaattacctgttctgataacagagttcataatctgaatatcttgtgtatcagtgatatgaattccatcagtattgggactatttccaggtgcaattactctcaaattcatagcttcaacattcacacatttttggaaatttatatgcatttgttgtgcatttttagacctcaaattcatcactttcagatttttgcaatcataaaatgtcacagcctacatatatataatattttaaaaaaattattaaataaataattaattaattaatttattactatttgtatttaattaataagattaattattaaagggtaaagaaacttacagttggagcatgaatacaaggctgtgatgaaaaaagacaccaccaaatagatatataagaaaaacaacaaactattagaaaataatttttaatgagaggattaattattagggattattaaaaaaaatacaaaaatatggttgtacgaaattttaaatatttttacggttttttagattttatttacataaaacaaaatatgatcttttgatatatttttatgttgtaatcttattattttattgttggtattttttttttatgttttgatgttgcttgtatgttattttcatgtaattttagtattatttttatgaacaccgtaaaaatataaaaataaaatctttaaacataaaactgtaaaaaatttaacaaaaataataatttatgtaaattttcttaattattatgtatacaatgacagagatagaagccagaggggtgccatgtcccccaatgtttaaaaaatcatatgcaaaaaattattaaatttatagataaaataaaataaataattttttatatatgtatatatagttataaaatagaaaatgtaattaatattacttacaagagctttgttgattttgcaagagttaatccaccattttctaccattgccattgatagttccaccaccttcaactcttaaattttccacattattaaacacaatccaatatcttgtgtccttttggtaatctgatcttctaggtgaagctttaattgttccagatatctatatatatatatatatacatatataaacatgtatattagtataatatagtatttatatatatattaatatccatgcacaaattaaaatgtacatacataccctaatagttatttgagaagatttgcaaggaccagaaaatgtgattggtttaaggtaataaactttgttcttaggtaccaaaactacgccgtttttcgatgaacaagcccgtttccatgccttgtagaatgcctaaaaaaaatcgagtatcgagtgtgtattttagcaaaatataaaaaaaatggtatttttgcaaataattatcgaaataatgttggcgtacctgactatcgtcgtagcggtcactcctagcaccaaaatcgtcgacattgaatatttgaggtgaggaagacgaaggagaaggcaatgatgatctagttgttcggctaaacctagtcatcagaccatgagtgttaccattttcgcgattagggttaaaagagaaggaaagtgagccattgaaagttatgaaagatagtaaaaataaaagaagaaaatgaagttttggaatgttattcttattattcatgatgttattgattcttttgccctatagtaaaaaattgatataaaagaaaaatagacaaaggcttgaaaagatagagaaaagaggaaaaggggtttttgttattaagacaaaaaatgaatgtgatttgtgtgttgagacaaattgggtttctataaatatatagaaaaaaagattggaaggtcaaggtggtgattatgatgatgatagtgaaatggggttattttattttaattatttatttattttattgggttaaaaaaagtgagaaagatatggaagaaaatatagaagtagaagcaattaaaaaaagatagaagaataaattggtaaaactaattaagtttggtctctcacaatatttttaattttcaatcaatttatttggtcaagttagttaatgggtgtggcttgtttttgtgattgtttaccaacaaacatatcacatatatgcatatatggtatatttactttgttttcaaacaaatatgactaattactttaactttatcaaatacatatacaaatatatattttggaaaagaaaaatatatatatatatatatatatattttactatatatgcacatgtataatgattttctatgtcaacacaagacatgaatctagtctattataactcttattaagtgccaaacacaccatcatattcatgatgatgatgatgatacaagattcaaatactctatcaccactaaacacatcatcaaaattaatataattttaaattaattaaattattattttaaattagaattaatggtttcttttaaatcaatgttaaagagacataattttcatgagcaataatattaattattatgtataatatgtatcagataataatttgcgatataaatatttaagtttaaattctaattgcagataaatatttaagctttattttttacggtaaaaatacttaagttatatatttctggatctttcataagaatctagccattaagtatcaagtcaatagtcatgtgacagtccttaattagtccagatcattaaatttttaattcaaatatactaataagaaaataacacgtgaataataatttgacacttaatagttaggtacttacgaaagttccagaaatgtaactttatattattaaacttaaaatatttatctgtaaccgaaagttaaacttaagtatttatgctgccaattactttacatattttagatgcacatatatattttttatgaatattgctattgggcaccaatagagtctaatacttttcataggtggttcaatgttattgcttagtgatattctctaaaagctatttttttaagttatatgaaactcaatacttatactaatatgacatcaggatgctaaacactaataataccttttagtatttttctattatcgttatcacgtaataaatacatcaaataaatatttgacatgtggcttgtgatcattttgaatttcctatatttgttttagttttggtggcataaattgcttatattaattaattatttttcttgaaagaaagatcataaaaacttgaattgaatgaaatatgaagcataattagtttggctattgttaggcaaaggtttgtactacctatttggtcttgatccacttcatattggtaatattaattattcactattctaatattccttggaaaacggcttaacatattcaactgattataactgtcatgtgttataatgtatggtgaacttgtaaactttgactttaaattacaaaacaaagaaaaacaaatatataggtcaaataaagcttattatgtttattattattaataactaaataaataaataaaagtatatgatcaacagggcgactcaagcagtttgggggccttagataataaattaaaattgggccttttttttaaaaaaaaaataatcaatcagtacttcataaatttaattttttttttttttaaaaaaaatacttcgtaaattctaaaataaacaaaaaaatttaaaagcacatatattagaactacaagatttattattttttatttttttgtaagtattgctaaagatttatttgttcttatgaatatttattatgtatattatatattatataaaaaatatttattattttatatataaaagaatgataaactaaaattaaccttttaatataagggatcttgtataataaactaagctatcatatatttagactggtaaattagctaaatataccttgtgattagacaatataaatttaggagatatagtttacctttctattttttgtttttgtttttttttttttttaaatcttattcaaaaaataaataaaaatctttactaacccatttatttgtgtatatgatattattggaaaatctccaaccttgtgaaaattctccattttttttttctaattgaataagctatatatgcatgactatttttttaatagaccactattgtttaaattgggctattcaactatagtctcaagtttggttcatcatatacaaaaaccactactattaataatataataatatatatattttattttcttgaaaaagaaaagaaagaaaaagaaaaaaaaagccatgtgagaattaagttttcctaaagccaaacaccaccaaattcaaattgtattggactagccctttgtgttgtgtcattttttccataagcttttttctttatttattttaatttgcactatgatattatgatgttcttttgaccacttagccaaaatttattcctttttccattttgtgttatatatattcttctaattactactatcttcttcttctatttttttaatatatatgaatttttttcaattaaattattaaaagtggttattggttagttaattttgggggttgacaagctatatgaaatgtgtcacttttgagttgaagattagccaaaaaaatatataaataattagttaaaatatttttcactaattaatgatgtcaaagagacatagactttagagaagaagccataataagagaatatttgtttgatatttataagcaattaagttagggaagttagcacccatttaggtgaagtattagacgtttttggtttggttaaaaaaaaattaaaattaaatagaaaatgatataggaaaattaaaaaatagtgcaccgatgcacttttatctgtttcggtatctaaaaaaattagtctaaatttttttatggtcctatacgttgtagttatttaaaacattttgtaaaattttgaaaaatttaaaaaatttaacatgttaaaaatagggtttaaagagtattgcattgcatacgtgacttttttattttataagcatgtgaaatggacagtttgaacattaattctatattgtaaattatttcaaatttctaactataacgtacacgactattaaaaaattagactaagaaattttgttagatgccgaaacaattataagttgcactaataacacatattttagtggggtatatgttaaataaattaacaattaacccaagatctatttgtatataacatagaacacaataataagatataataattaggtatgtgtacctg

SEQ ID NO: 14809 - DNA, 10719 bp, Cannabis sativa
taggggctggtctggtgttggttgtgtgattcgtgacagtaatgggggtgtttcctatgcttcctctactgttctaaaccgagagtactagcctcttcatgcggaacttatggctatacatggtggactacagacgggtatacagcggtgtgtacaacaattctacattgaatcggactgtcttgaagctatccaattaatccaaaacaaggaggaaggctgccgagatattgatggggttcttgatcatattagacatttgttgtcctatgctaatgtaaagggtctgttgtttgtgtatagggaagctaataaggtggcgcatgtattagccaattacgctttgttaaacaaagctagtactatgtggattggtattcctcccccttgtgcaaatcttactattcggcaagatttgcctaatccttgtaatggaatgtttgaatgaaggattttgttttcaaaaaaaaaagaaaaaaattacgcctataataatatcgaaccatgaaatatcatttctcaatcgaaaaccactcatacatttattttttattttaaattaaattatcatgtgacgatgtgaaagtgaaaccaataacttttaactattctttatttatttttatttttcttttaaaaaaagaaaattactattccaataataaactgccacgtagtttaaagtggtggacacttaatgctcatttaagaatctcgttccaactcagacgacaataaagacaaatttatattgggtttgtttgagatactcgcgcgtgaaattgattcatatcgggaaatgatcttcacgtcaagatatgatattatgacacgagaaattgagtttttcgtagaaagcgacactaccataaaggaattggagttagggagtggtggggtcgactggacgtgtgtaccgaatattcactagatttgaattagtggtttcgaatccgtcacttctcttatcacttttcctttatccacacgaaatgataagtagaacaacagatcaataatcccatcaacttatctagataacaactataacttatcactgataggtcagtggaaaaagctataaagagataaagaaaccccctgtacaatgcatcgaagatagcgaaccaagcctttatctctctttctctgttttactctgttctttattcgcagcttttcaaaccctagaaattctcggagttcgagctgtatcatccttaacaatcacggaaaattttgacgaatttgatgattccgagtgtgcgagcctggtttgaatttttgtttatttctgtttagttgttgtaggtctctgagttggggtcttcgtcgttcttttcgaggggtttcgaggtcttcggaaaatgacgtctctgagcagagaattggtctttcttattcttcaattcctcgaggaggagaagttcaaggagtccgtacacaggtaagcctctctttctctctcttatgtatgagcttgtgttgaagaagcaggggaggttgggagagggaaaatggaggaaagagaaagtttttaattgtgttcctttgttatatgtttttatattattatgctatttttatatttgtagcgttattgtactgaagaagggagaccagtattgttgttgatttgagttgaaatatgttagcagattttgttggttgtagatattaattaatattattatgtgatttttcgattaatttcattatcatatttttggaacaaatttttatttttatttttatatgaatgaattagattatgtatttttctacagtgtaaattgtaaatcagtaaatgttttgtgatgacattatggttttgttaaatgtggaattattctgtttggtttgggttttggatgatagatctgtggttttttctcacaaggtctgaggatcaagtccttcccagttacctacatggcaattgctatagttttaaaaacaaaaactaaaaaaatcctagccagtgttgatttggtttcaattattgtttactgttgtttggctgtacggaaaatggaaaaaccttaaggaaatgggttattgcaggatagaataagtgaaggatttaataaagtcagagattaagaagttggttggtcgaacttgggttttccttttgtcagacattgactgtggcaagatttaatattttcatttcttttctttagattgtacagaaattgttttgttatgaattaagtaagctgaattgcattgatgtgttgttcaaaatggaaaaacctttgtcttgtagacttgaaaaggaatcagggttctacttcaatgtgaagtactttgaggagaaagttctagctggagaatgggaggaagttgagaagtacttatcaggatatactaaagtcgatgataacagatactccatgaagatattttttgaattaaggaagcaaaaatatcttgaagcactggaccggtattaatcagtctattctgtcattctgttttcttcttgctctggggttgtttaatcctacttgtttttttctttttaggcatgacaaggcaaaggctgttgatatattagttaatgatttgaaggtgttctctacatttaacgaggatctctacaaggaaatcactcagcttctaactctaagagatttcaggtaattagtttttcaaaacttttggtgcttaaagcgaaattatgttgcagattggattgtatacaaatttatggtattgttggtttaaaattaaagaaactctaagacaggttatataaatttcatgaaactaacttcctttgcaattttttagggagaatgaacagttatccaagtatggagacactagacaagctcgtagcattatgttaatagagcttaagaaactcatagaagcaaatcccctatttcgtgaaaagcttactttcccgggtctgaagccatcaaggttgcggacccttatcaatcaaaggtatgcttaatatcacatttgatgaaaataaacaaacaaaaaacaaaagcaatctggtactttctaataattttcttttaatggtagtcttgcatggcagctgtgtgttaaatctgatattttataagtatttaactacctacctgcctagtctgcaatattgtaattatatccctttcttcagctgtattattttagtcagtctccctttccaatatgttggtcaagcttgcttgttgaaatgtattgttcatttagcacttgtgttgctattatggataatacattaactgctttatggatgtttgttgctactttcactggatgatatcctatcatattgccgtcagtttttatttattattattttttctttcaaactattgtggtaaacccagtacctctataatatctaatgttgtactcttgcagtttgaactggcagcatcagctatgcaagaaccctaggccaaatccagatattaagactttattccaagaccattcatgtacacctcctaatggtccccttgcatccacacctgtcaatcttcctgttgctgcactcacaaagcctgttgcttataccccacttggagctcatggggtataatctattgcatctcaaagtttgattttcaaatgtttcttaggatctgtaactatttcgactaataaaaaattgttctctttactatttttagcccattccacctgctgcagctgctgctaatgcaaatgctttagcaggttggatggccaatgcctctgcctcttcatctgttcaagctgctgtggttactgcatcttccattcctattcaacagaatcaaggttagaaatttgatttgaacttcactgcctagctgctgtatccatatggaatgatctaagaaacaagggagtgagctgtctttttggttaagattaccctacctcagtgcactgaagtagtattttttttttgaataagcactgaagtagtatttagtttgatgtaattttctgttttttttattaacagttctgagtttcagttctgctattcatgtttttctctgtccttgtgtattgtttaaccttatgtactttgtgttttggtagcttcgatgttgaaacattcaagaactcctccagcaacaccaggaatagttgattaccaaactcttgatcatgagcaactgatgaagcgattaaggcctggtccatctgtagaagaggtaatgtaaaatatacttctctcgatctgcagatttgtgatgcttttgtacaagtcttgccttctgccaaactattttgatacttgttattgtatatgtcgtcataattagtcttgatatgctaaaagtagtgtttcataattaggttacatacccaatgccacgtcagcaagcatcttggtcactggatgatctcccaagaaatgttgtttttacttcgcatcaaggatccagtgtcacaagcatggattttcatcctgttcaccatacattgctcctgggtatgtttctttttcaacttccttggcttgttgttataccttgttctgattagctctcttagcaaacctgctatgctttaccactctctaccccttctccttaaaggaagcagtcctaatttgtattccctatgagcagttggttgtaataatggagaaataacactctgggaacttggattgcaagagagattggtatcgaagatattcaagatttgggatatttcttcttgttcgctgccatttcaggtttccttacttgttttttcgtattgtactttgcctggtgttatttttgttattctatttatttgtttgttatgaaaacgttctgttcagtaaggtataggcaatgcctcattcattataatagtctttgaatgtttcattatttgagaatgtttgtcgttaataacattagaatcttaccatttagattttatacaggctgctgctattaaagatacctcaatatctgttagtcgtgtcgcatggaatcctgaagggaattatgtaggttagtacatgtaaaagaatgaatgataaagtttcttcagttcatgtatgtcttattatatatatttatatattccttgttgtaggagttgcatttaccaagcatttgattcaactgtattcttattctggaccaaatgaactacgtcaacatttagaggtgaagtgatattatgataataattaactccataggtaggctaatttgtacttgtagtgttgtttaaaatttaaattgcttgctctgtcttcgcagattgatgcccatgctggtgccgtgaatgacttcgcttttgcttatcccaataagcaactatgtgttgtcacctgtggagatgacaaactaattaaggtaaaatgatattcagattcacaagtttgatgtcatataagatgtttcttatctaagtgttgtgaaacaggtgtgggagatatctgggcgtaagctatttacctttgaaggtcatgtgtctccagtatattcaatctgtcctcatcacaaggagagcattcaggtatattggcttctagtcatttatctcacgatactctagaacatgatactttggacaagtgtctagaattcttctagtctaataaagaagttcactccaccatgcgtgatgagatttaagttaaaacgacaaatgtagaggtgcttctgttttgtaattttttaaaatgataaaaaaagtgaaaagaatgaataggcaacatgcagttgttggtactctctctcttttcaaatatatttacattgacagaaaaccttttccattttagtcagcagctgttgttaacaggagtctggattttctaaacaaacctatccagcattttctcttgatcttccaaatataatacatgaccatcagctggctttgccatcaattttcgatgtacattgcattggcgctaaaatcccccactgttctttcactgaatcgtgccatcacccttaagccaccttggtcagctgcctccttaccttcaccaaaaattacatttcaccagttttaaaatttataacttctttttgcatcgtaatggcagctttgagttggccataactttcagaaatttaacaaagacatgcttctgtgatgtttgactgcttgcttctaaattttgcagtttatcttttcaactgctgtcgatgggaaaataaaggcctggttatatgacaatatgggttctagggttgactatgatgctcctgggcagtggtgtaccgcaatgcaatacagtgctgacggaagtaggtaagaataaattcttcagctcaatcatcgccagaccaggcagctttaacaataagccttcctcctgttttcagcatattcttgttatttctaggatgaatgttttatgttttacgttttatgtgccaccattttatattttttagtagttagtcctaaataattagaattcttaattttgttcctgatacaatagtagtgtttcaatattcttgtttactttattcccagattgttttcttgcggaacaagtaaggaaggagactcatatcttgttgagtggaatgaaagtgaaggggcaataaaacgaacatacactgggttcagaaagaagtcatcaacaggtgttgtgcagtttgacaccacacaaaatcactttttggctgcaggtgaagatagccagataaagttttgggatatggataacaccaatgttctcactagcacagatgctgagggtggacttccagtgcgtgttcttacatcacttttctatgctctgttgtccaattcagaatttactttttctaatttttgtaattatatttaattcttcagagtttccctcgcttgagattcaataaggaaggaaatcttcttgctgtcagtacaacagagaatgggtttaagatacttgctaatgctgctggtgttaaaaccttgaaagccattgagtctacagcttttgaaggattgagatcacccttagattctggcactgtcaaggttgcagtctaccttttacttgaatttatttgtttctacttatatttctttgtttattttcgtatataatgactctgtatttggtgtgtcgactaggcttctggttcgtctgctattccacatgtcagtccagtcaattgtaaagtggaaagaagttcccctgtcaggcctactccagttatcgtaagccatcttgattctaatttaatgtataacgtgtgtgtgtgtgtgtgtgttttcagttgggtgggagggttgcctaattagtaatgacactgttgtatttatttctgagtttaagctaaaaagtagtttggtgtatgaaaacaaacccctttggtgcttcacctcatgtttgagttgaattccttttaatgaagggatatattcttcttcaccaaaggtgactagggataaacaggattttgagtcatcattatttctgactgtactgcagttaaaaattgttttacttgtaatatattttatttcatcttatttatgttctggtggaaaagtattaattacttttgttttgtgttcaagaatggagttgatcctgcggctagaggtttggagaaacctagaaaagttgatgatgcaattgataaaaccaaaccctggcagttgactgaaattctggaacctggccagttccggttagttaccatgccggacaacacagataataccagcaaggtgtgtatggtatctagtgatcatactgtattatgaaaaatcattttttattgtatttgttttaattagtaaaaaaaatttaggttgttcgacttctatataccaattctgcaattagtcttttggctcttgggtcaaatggtgttcagaagctatggaagtggggccgtagtgatcaaaacccaaatggaaaggtatcatctttgcatgagaaagcttattcttctgtttctactttcttatatctttttgaaagaaattttctgaagtcagtgagtttttacaggccactgctaatgtcgttccacagcgctggcaaacaagcagtggtcttgttatgactaatgatgtctcaggtgtcaaccttgacgaagcagttccctgtgtagcgctctcgaaaaatgattcatatgtgatgtcagcttgtggtggaaaggtttcattgtttaacatgatgacattcaaggtatttttgtgcttgtatgtattgcaatttttgtcgaatttggaagtgtcttgacctatggatttgtttataggtaatgacaacatttatgccacctcccccgacttccactgccctagcattccaccctagggataataacatcatagccataggaatggaggactcaacaatccacatttacaatgtcagagtggatgaagtatgtcaacatataatttcactatttttgttctttttgcttaaaagtttcaagatctgaatctgataaattaatcttatttgtccattcttcaggtaaaatcaatattgcagggccaccgtaagcggataactggtttagctttctctaccgttcttaacattctaatttcatctggtgcagatggtcaagtaagtactgtccgttatatttcttctcttgattaaataataatactaataatagcaaaaagtttattttattttatgtctaaaattcttgaagatgtatgctatggattttttttggttttatctcatgcccattttctagtcgagagtagaaaaactgttctacccttcatctgtatctaggtgcaaattctaccatgtttaatactattattagttctagctgaattctctattgcttgatgttattagtatactatgcattgttttcgtccattgctattggtcttgtagatgtagtagctaaatgcctttaatgttgcattttcttgttatctatacttgcttctttcatcaataactccaatctacttttatcgtaattctgatattttactgctctcgattgtctacattattgtgcttgcttttcatttaaattcgtgtggcttgcttgaatgactggattagaggacctttatggtccccttttaaataaatgtattgtcccatgctcgatactttttttcataacaattcttatgccttggttggaagcatttccgtctgtattttgatttaaacacattatccataaggaccctcttactgactaacagttaacttaaccctgtcagctttgtgtatggagcatggatacatgggagaagagaaattcagttgcaatacagctaccttccggaaaaacacctgttggtgaaactcgggtgcaattccttcagtgtcaaattcgttttatggtagttcacgagtctcagttagcaatatatgaggctcccaagatggatcgcattggacaggttgaagatttaccaagtcttttttcaaaaaataaaaagtgaatatctgctgttaacacttgagttaataattttttctttcttttttttcagtggcttccacaagatgttatttctgcacccatttcttatgcaaccttctcgtgcaacagccaattcatttatgctaccttctgtgatggtaatattggggtatttgatactggggtacatgaggctgattgcttgcgactacggtgccgcatcgcaccatcagcatacttatctcaagcagtcttgaatgggtaagtgaaaaactcgcctaaaaaaatcaacattattaccggttacaaacaaacctgaaattaaacatgaagcttgcaatttttctttactagtcttacacacttaacactaatcttcatcattcatgaagattataaattgttatcttatgtcatatatcggtaggtgtatatttatagttcgttcctcttcgtattgttgacaaaatcgcttggtgtactacttgtagaagccaagccgtgtacccgctcgttgttgcgtctcatccaatagatcgcaaccaatttgctattgggttaacagatgggtctgtgaaggtgattgaacccatcgaggcagaggctgagtgggggacttcaccgcctgcggataatggaacggtgagcggtagggcaggttctttgtctacgaccagcaaccacacgtctgatcagattcaaagatgagacttgtttgtttataatgatggtacagtctattttaattgcattgctgtagagagtttaggttatcagttggtcccttgtcaaaaaggtaagtttggacactagtaaataacttaaataggtgaatatttttaacactagtgttctgcaacttcaaacgcacgtatgtaggtattattaattctttggcagtaaatgcatgtacttatttggtttaagatttcttgtctttgtccatttggaatgttaagtttatattgtcaaaacaattatatgagcccctctttcaagactcctcttaatcttgatttcaagcttcaaattatatatatttatacaattactctttgtattgttattgtcgttgttaagcttttattttcatgatgggattcccaatgaaagtccatacatacacgagagctggtgaagaacattttttgttattttccaaatgaataaaatcgttgtaaattgatggagaaaaataaaaatataaaattgttgtaactgtcacagttctttttaagaagagtggtgctttcatcatttatattaccgcagctgctgggacagagttagtcgatgcttattccttagataccatcattgtttcttctccgagaaaagaagtgcatgacatgta

SEQ ID NO: 14810 - DNA, 14255 bp, Cannabis sativa
  modified_base (908)..(910): a, c, t, g, unknown or other
  modified_base (2310)..(2334): a, c, t, g, unknown or other
  modified_base (14205)..(14211): a, c, t, g, unknown or other
ccttcccccatccccccaccaaatccaatgccccccccttcgccagaattccccccaagcccaccaccaatccctcctccggaactactgctgcctttgccaattcctccaccaaatccgcctctaatacctcggccaccgcctttaccacccacccctgcaccacctcccactcctttgccgacgcctcctcctactccaccaccaccttgatgattcttgtcatcatttttcttatgcggcttccccccaccgccaatgccgccacctaacccacccccactgccaaagccaccaaagccgcctccgctgccaatgccacctgctacaccactgcctttcccaaaacaaccaggctttcctaaaccaaacccaggtttggatccaaaaccgaaattggacccgtaacctttgccaaaactaatagaatgtccaaaccccaatcctttgccaccaccccagctcggaaagccatcgaaaaaccactgtggcttcttcacttccccagggccagagccatggcccttcttttcctccagcctccttccttcaacgccaatatcccaagctaatataaccaatacaacccataaaaccaccatcttccccatccccgccattattttgcatgaaatatatttctgaagcttgaaactctttgatgtagcatggctttatatagagcacaatgtatagattcaaaatataagtaaataaatgagattgttggaagttggagagaccactaccaagtaccaccatggctttctttagatgcaatctaggtcgatttaattacatgccggtttacgtgattgggtcaattggcattgcatgtacaagcattcatggtgtccatgactttctcatgcaactacctctctaatcttattattattattattatnnntattattattattatttcttttccttgagaaccgaacgacattaatggttttcaaactaacaagggattcgcatgcacactacacaagtatcaacaagttcaaattcaatcttgaagaaaattaaaactacattacaagctacaacaatatgatgaatttaataatagtaacaataaatacaggggtgatacatcaaacgacgtgtagtagccgactcataagaaacgacgtgtcgtatttagtatatatgattttaccaaaagaagtatattttccaaagaaatatctctgattcgataaatcgtcttggagagtctgactgagttagtgttcattgatttttcggagatggaaggtattggcgacgataatccaaggtaccctcgtaaatcttatactccaattccatatggtttctctaactctaactctaacccccaaaagcaaaggactcgtactcgaaacatcccatttactcgcccaattgccaatttcaaccacgattatgatgaagatgacgaaatggatgatctcaacgaagaaaccgaacacgaagacgggaacgtaaatgggggtagtcgtaatttcgatgaggaggaagatttcttgaggcatccgaagaaaagaaggctgaagaatttggtttcggcatacgagttctctcctcgggtcagcctgtcggattcaggtcgaaatttctctagggtcggcgatgatgattggactgagcatggaatgtttgtgctgttggaggtttggggaaataggtttcttcaactggggcggaagagtttgaggtcggaggattgggaagaggtagcggagaaagtttctgaggcttcgaagattgagaggaaagagagtcagtgccgaaatatgttggaattattgaagaacaagtacaagaaggagaagttgaaaatggagcaaatgggattgacatctagcaaatggggtttctttaagaagatagatatgttaatggcttcttctccaagacaggactatggtcttgcttgtggggttgattcgggtgagtttgtgtttatgaatacaagggtctatttggataggtcggatgggtttgatgagatgagggatagtcctatggaatcagaggcgtctgaggatgaaactgaggatgggaaaggtgggagagattcggataaagggtcttcctcttccgaatcgtttaaggtgttgactgattcaattaatcagtttggtgagatttatgggaagattgagaatagcaagaggcaccagatgatggagttggagaagttgaggaaggatttttctaaagaattggagttgcagaagaagcagataatggagaggactgaagctgagattgcaaaaatccggaaggaggaagatgaagatgatgatgatgatnnnnnnnnnnnnnnnnnnnnnnnnnaagaagaagaagaagaagatgatgttgaagaagaagaagatgacgatgatgatgatggtgaggctgaggctgaggcggtggtggaagaagaccaggatacggatgcttctgctgaggactttagcgactgatacgggtaagtagtatggtcatacttactattactacgttagttttgctgaaattacatagtattgatatttgattactcgtcaggtcttatatatctacacattgggatcatttaggctcatggttttgattgaccatggtgtctatttcttatgaagctcttataggaaacgatgatttgttttttcttttcaaggtgttaatgccaccggtaagtacaagatgccaaacttcttgtagaattggagttaaactagtaactttactgttaggtgcttattgttatgaatcatgccacaactcccattggtttaatgcttgtttttgttggacattgcttatttattgatggagcgagtgctttctaccccactgcagtgtgattttctttttgaaacggatggtcaagtcatttttatttgttttttttttcatttgaagttatgcttttagtcattcttttgttttttgggggagcagaaatgcatgtataatttgagagtcaaaacgagttctctgctaactttgctgatacatattattatcaagtctagctagaaaagtttttaaaaacagaaaggacaattttttagttacggtgtcaaacaccctccacgcttttgtttcttgggcatgtggtggtggccaccaacaacacaagcacggccacgttcacaaggcttgaattgctcagcctgaagcttctcacacttagtattggaataatgccttacatgaaattttatctactttttttcttgttgcaaatgcagattagtcctgattttacttgtgatcaatttcaaatgaaacaatcttgttttgaatcaggagtttgagcccagagaaacatggtgatctttattttgtcacaactgctgtggtgaaagaagcatctgcattgtggtcaaggaagggctttgcctagcgaaacgatgagacttgctcaaacggtgataatatgtacaccccatttgtaatcttatatcgtgtcatatgaatatatgatgtatttactttcttcactatagtttttttcttaaaaatttattattcaatcaatagcttcttggcaactttaaaatcctggtaagttggcaatattaaagagcctaaaggttttgctgatgtgcccttttcttcattaagcttccatattttcataaagaaaattcatagatagatgaaatataaaacatgaaaattaaaataatatagtaaagtcttgagcctatgctattgatcatcattaaaagatttacacgaataatagaatacgacattcatgaccgtctcaaaaacaagcactgacgaatacatggaaaccaacataggaccttcccataaattaatccccttacacaatctgaactcgaaaacacactcaactagtctaaaacctacattgctcaacaaagctatgaccaaagctgtttgtcgcctaccttccatgagagtcttggccttcagcaatgactcaaatccataacactctccctcaagtactgatataaccctagctaggttccccagaaccataacatgtgcaaatgccacacagtagagtatccctaagactccaaggacacccgagaatccaaatatttctgaacaaataccaaatgcatgaaatatctttggcactattacaagactgagaatgaaaattccaagtaggccaaaaactatgaccagttcccagaaagttgtatggagaagcttaatccatgccgaactgcttctcataagcaatcttcttccgtcaatacttattctgctgtaaatgtctgagactgcttgaactgttgcggctctgcctagaagagagaaagttatagatgaagggaagcatataatgatgtgaactatggttttggagagcatggtaggcagaggaccaaacaaattgtgggttatagtaaatgttgatgaaggtattttggggaaatggtggatgagaaagtgtgagatgaaaagtgagatgggtagaggagaaaaaaggaaggtggatatggaatgaaactgagttggatagagaagtatgactctgattgactctttgaatatctcagctgtgttcatcagatagattggatcaagaactcgtgttgttcttctagccatgatgtgcaaaagtgggagatcatagagattggtgattgagaattttgagaggttataggctatatgagttttttttaaaaagaaatcaaagtcacaggttaagataaaatatggcattttggttgcttgcattctaatatatcatgattgaaggagtttgtttaagagtggtcatatcattatcacagtttcacactgttatattcatacaaatcactatcatttcggttagttaaattataaagctaacaatcatgagcagcgtggaaatatgctgaaaaagttcaagattcgtggcacggaattttctagatgtattcatttcttttacatgaaacattgttttcctttccttgtccttagccttctgttttttcagcaaacggaactttcttacttttttggataaatactaaatactaatactttttaataaatccaatgattcttcaaatttactttttccaattagttttctgaccctcccacagaatgaatttatacaactcttttgctgtgcttgagatattattatcattacttttctattagaaaaatgaaattcttattaccgttgcatcatttttattttctcaaccagaaaaacaaacgcaacaaaggcagtggtaggattatgatttctcgtatcaaagctgtcttaatagttaatactcgtaattaatgagaactacaaatttacattaaccaaaaaaaaagacaaagaaacgtgcctttttactttatttgccccgaccgatacgagctctttagctcgtgccacaagcaaagcaaagtgtcaaaaacatcatcttcttcatcaggagaattagaacttccaaccagtgagatattcataagactctttaaccactcctcgtggagagttgagaactctgctctcccttcactactcttaaaactatctccaactattgatttcttcattattcggccagcctttgaagcggcattgaccaccttctgcggaattccagccatggttgccacttgcaagccatagctctctggacatgctcctgaggtgagctggtatagaaaaacaagatcctcattctgggaaaatgattcagattttggcttgaaatagcaggccatatgttgaacgaggacatgtggatgagaagcaaattccttggtcagtgggtggtagtgagttgcgaagagtaatcggcaattgactttttcaatgagatgtcgaaatacctgaaacaaatgtgagcttattttttcagtaacatccaaactcgtaatataggccacagttaattaattgcttagatttcatcaagcatggtagaaggcgtgttcttttcccattgagaaaaaatcatcatctataattagatggaatgcagggtatgtgtatttgtctgtgtgcacatagttgtaattttaaaattatataaccttgtgcagtggttagaagaaagtattcttacagcataggcaatggcatatccatcaaaagtgcttgttcctcggcccaattcatcaagaataaccaaagaatcttgagttgcatggtgaagtattgatgctgtttctgtgcactcaataaagaaggtacctaacaaaagttgtcaattgttcagatgaactctataaatttaaaacaaggcacaaaaatacactttgctacgcaccacacttgactaccacttattgtttttaaactacttatatcatgcaatcggtaagactgctttaaaacaataaccaagtaactgtaacaacccataaaatcaaaggaaaagaccgtcgttatcatcacttcaagcaatttcacacttaataaaccccccacccatccaccatatctaccagcaccactgctacagaacctataaaatcattagcatgtgcgtgacatataacattctcattttactcctaagccactagggtcaatgtatcaactaaccatctcaaaagaatgaaaaggttcccatcttacttttatattaagacaagaaaagatgtaataaagactagaaggacaggtataaaatataaatcatgaagagtctcaattttgttaaacaagaacttactctcgcctgtcatgattcggtcagttgcaccaagccttgtaaatacagtatccacaagtgagagaacacacatttcaccaggcacgtaacagcccagctgcaagacatcaaatcatcaaaattttagtacaaaagatgaccaaacattagcttattccaatggtcaaagacaaaatggacaaagaaaaacctgagccagtataacagctagacacgtggaacgcaagagagttgatttaccacccatattaggtcccgttaataacagcgtgggtggaccataaccatttgcatcttcaccaagaactacatcatttgggacaggcactcgtccattatctccaaatgcaaatggatgccacaaccccttgattttaagtacaggacgtctggccactccatttgaagtcacattttttgttagaggcaaaatgacaggtcttgacatggtcccacttgaaaagctagctgtaactgcaaaggatcttagcacatcaatgcagttgatagcatggataatttgggaccattcactcgctttctcaatgaacagctcaatcagaatagagataatttctgcatctctatctgttacatcatgattctggtgtcaaaaccaaagacagtgtcagaaagttttacagagacacccagctgttaatgctgaaatatgcatttatacaggtgaacatacaaaataacacctgcagcagctcagttagcaatagtatgtgcataacacaggcttaatgaatccttacaaaaatttcataaagactaagaaaccaattcacgagaaagacaagtcatggaggtgtagaattgacttttagaaaattgattcaagtcattgagttgtagaaataatttttagagaattgatttttactccccttgtccttaatacaaagtaatggtagttttatgtaaaaaacacaccctaattacttaattctctccatcttcatagacaatcataggaagttacacacaatacaaaagtagaaaaacagcaacttatgaaaatcatattcaactgctaatcaaaaaaaatgaataaatcagaaaagcaaaaagacctgataattaggaaagtcactatcaacagctgcttcaaattgagaaagaaattgatcaagcccaccacttccactcagatgaggaagactaaatatttttgacaaaagagaaaattcatttttttccttctctaataacaacaacaaatcaaagccaaccctgagacccttcactagagtcccaaataccttaacctgcaccacacaaaaagattttattattaaaaaaatataattaataaaattatttgttagaaaacagaagatttcatttatcatacacgtaaaaaattcagtgctgcactatgcatcagttgaaacatggaatgaataaccaatatttgaataagcagaaaagtagcaacaagaaaccctagtgaattagtgtggtaaaattttaaagaatacacattacccccagcaagaaaacttcactttacttataccattgcttacaacatcaccaaaactataatacaagatatagttaccataaattcatttattgaaaatccaacaaaagaaatggagtcttaggggtggataactagagagtgtgtgagtaaaatgatgttaacagacttgatggatatctggaataaaattttcttgcacaagtttaccctcttatccttcaagaaaagtttccctaattagagacttactttctgcttcagcactttttttccatatacaggtactgacaaagtagctgatgacttaacagtagccctaatccgtccgaacaacctttccaggtctggaagcttccgaagatactgagcaacaactagcataatttctggatgttgcattagagcttcgacaacattaagcctataattaattctgtcaacatctttcagcggatggcagatccacctccttagcagcctcttaccagatgatgtcacacagttatcaagatatttgtataatgtacctgaaaatttaattaccgtgttaataaagcaatgtaaaaccccaaatcaaagaaaagggaataatctcaaatgaataatgctaaaaaataaagtgcataagaagcacttgccagaagtaccaccatcagcattgttattgaatatctcaagatttatcagtgtctgtccatccattttgaggcagcccctatacacttggtatggtaatacatccccattttgtaaaacatcatctaactgtttgaaaacaacaacaacaaatagaaaacatcattgaatacaaattatttaatgtcattgaacgggattggcatggttgcattaagcaactacacataaaagcgcaaagggcaaaactcaccatcaatctagaaagatgattgataagtcccccgagagcagacaaagttatatcatggtgcatcaaattgccaagagattgatcccacatatttgaagaccccttgaagtaaccttttagctgaattaaggttcttacttcaggagcatctgcaaaatcagtagttggctgcactggagtcaattgtggagatgaagaacctgcagacaaaatttgattgatttaattacaagtttcaatacaaaaagacaacattctaatattttcaaaacaagtgttcaaaatctaaattaactgattacactaagtatattttatgtttttttttattttttttaaaatagtatattttgtgtatttaacacgcaaatacacatactgctaggtaatgaaaatatctgtgcacacaagaagagcatatatgtcaagtagagcacactagagtaactgctagaagaatattactctagtgaaatagtcgaactttacaaaatggatgtgtttatgtataagcacaacatctgcaaaattagaaaggagttgtgactaatgacctgttacagaatactttctgagtgctttctgaacttctttggataaccctgcagaaatacatattcaatattctcaactatacattcaaagttctgttggaacttcaaaaatggctaataacgaccaaaataaggaagaaatagttaagggacagatgatggctggtttgagaaaataattcacctctactttcatacaaaacttctttaggtgacacctacagtcaaatccaaaagagatagttaactcaattttgaagctttgaattggattgaaacaaacaatgtagtcagcatgcagaatgttaacagaacatacctgcatcaataaagcccccaaaccagcaaaggatgcatcatctttgatggagccaacccaaaattttaaagcagcacaatctacaaaagcaaacccgtacacagttgacccattttcctgctcaaacttaccctgaagatacaattcaacacatacacataatgttatagttgtcagctgctttcaagtcacatttaagagaatatgtaacaatgttatataaaggtttcaagataaactacttaattagcaaacataagatgaaaagcaatttttaatcaggactatctttactaggaaattcatagaatttctaactttttcttcccacatgtaaaaattgcaaaagaactatgaaaagtgttcttaaatatctttcctacttcattcaaagttggcttagtgtcccttaaaccattgcatttactattttatttaggactccaaattgttcaacttctttaggagtaggtgaagtgatcatcccatggttagctcctataagatttgcaattggattctttatgagtgagcaatatgatagaatttgcagcctcttaatttttaggggggagacaaatataaaatatagctaactgttcaaatagaaccttctgatattacctgttaacttgtcactaattatcactgatatagattcaaacaaaaaaaaaaaacaaagcacgtggatagtatcatagtaatgcaaagaaactttctaagagatgacctggctggataacataatacgaaaatagttctggatttgggagataacaaacctcttttatcgccagaagatgaacagcatcaggtcctatattacaatcagttgcagttgatggtgagaacacctgaactagttttcttgatattacctaaaattatgtattagaaatcaaaattagcagttatctaagaaatatgataaaacagacttcagagcgagattagtataacttagttaaaaactttgtggtaaaagaactggttcaggagatcataattacaagtgcaaactaagaaaaaaacagcaaattataaattattatatttataaaaccaaataaacaggaactttgtacactgggatcagccccttaattggcctattaaacttacagaagttgaacctctagcctttgattctccagatgtttccaactgctcaattcggccaactttatgccttcaaaaagtagagataaaaatatcgttaagaaaatgcatcatatgacatgtaagagcagcgaaaatcacattaacaatcagagattgagctttcaacaacagcttatcacccttataagaggtcttaagataataactaactcaaacatcaaactagcaccaatcggatagtacttagtctgcatgcaatcacataaagtagattgtttatcttgtacttgtttcaaagtagttgcaatttatttttagaaattaatttcattatcttacccgcgtgcaaccaacttctgaacagcatcatcaattccactttcagggaccccaacctaaacaaacatcacaaaatattcaatgccggaaaattacatttaggtcatatccatgagctaataaaagtacatagattaaaacaaaacaagattcatatttggtacctgccggcattttccaactccacttagtgttattttccaatcaagctccttatgacctatttcagcatctatttcatacagctcataaaattttccctgcatttgacagtatgtaatggccttaattacatgcagtagcaaaacaaagaactaaaacatgactattggctgcattgataaagtatgatttgtgccttggtttaataaatatgagtataaactcagccaataaacatatagcaatacttgcacgaaaaaagaaagcaggcttaactgaccactttaaagaaaagcatgacatccatgtattgacatttgacattccaatattgtttttgtgatgcagacattttcttcaaagcgtcagcaggtatataaagtgttgtactgtcataaagagggtcatcacgcttcctcccgttagcgtctttgattcgagatggatcaagccactcaaacttgctggccgtctcagatatttccaaacgatttctattcaaacctgttgattcctctaaaagttttagttttttgctagaactcagcaatctgtcatgcttatccttggacgctggaacatcatcttgaattcgcttcaatcttggaacaaaacgttgtgttcctggtgtttctggtccaagattattatcatcactttcaatattcacggtacaactttgattagctttcccattggatttcacaacaccgatctctccagaaggctgagaagccaatccgggttcagacaattgcttgggtttaatagactgttcagaaactatagagttgtccacggagtttccatgtgagttgttcctgaaaatattacataaataaagttaaattcaaaatgaaaacccatataccgatagagtatgttacagaggcacatctacctaaccatcacaggagcatgtaaaaatgtcatttaccgagatcaatcataccaaacagaagaattctcgtgactaacatatatagtttggaaggggaaaaaacgattggttatccaataacgaatttgggctctgatgatttggtactcagttcccagactcaagagttttgtgcccatattatcagtcgtattattctgtatttaacataaatttcgttccgtaattctcattgctgtattgactataaagagaaagcaagtataaacaataacaaataggccaccaaaggtagaaaaaatcacagtaaaaccctaaagacatccattatcgaataatctttaccttttggagagcttctcccgttcagtaggcttcacaaacttatgcataatactcgagaacaatgatgaatcggttttgctctcatttgcgacataactcgccgggaaaatctgacgaggcactttttccggcggagtgtcggttcctttgatttccaaagccgattccgtcaccggaacttgagagacaagctggctgccggagctagggtttaccggcgcgggtttctggaagaaggagaagatggtcttctgacgctgcatttttagagaagctgagaaatgaaacctgtggccaaggcggcaaagaagtatttatttattttttttgatatattgacctgtggaattggcgccaaataatttggggttctccagcaattaaatgccgaaaataccccgactgatcctccatcgcttcgtttctcgtaattttacactttcattcagcactgttgagtgttggcgattggtgtggtttttgagttttgttattggttatatattaaactatataggactcaatacttaatttgactaatagagatatttatatataggagggtgataagcaccactagtaccttttaacatttctatgcaatttttgattattttttcaaatcaactcacacatgcattttttctaatttcctaaaccgtatgtgcatcacaaaactaaaaaactgcaaaaaatagtgtggtgtagtgcgattttgactatcaccaaataattaaactatcataaatacaacaaaacttgagtaacgcttgtcaaaaataccataagacttgaaaataaatatgaaaaaagaaaattcaagttttaacaatacaataattagtaggcttttagtgggccttcacatattggacctaaataaatataaaaattagtattattattatatgcggtgcagtacaatttgaactgcatattaacaattcaaaactgcaaacagcaccacaccgcgcaatttaggaaaaattcaaaccgcgaccgcaccgcaatttccccaaagaattttaaaccatatttttttgagcgatttgatgactaaccctacttctatttatacttttaaggttcgtttggtaggtggtataaaggtcgtgctgtatttaataataaataacattatatttaaataaattaatgtgttgtattaatgattataactaaaaattgtaatacaatgtaaaccccaatctccaatttgaattcaagaacccaaacacaaacccagaccatactagtctcaggaatctaaactcaaaagttttgagtaaaaataaataaaaccactttaacctaacgtaaacggccaaagatgttgtggggtcttatgcattgtaatgtatatataaatactttaggctaattagtatttttttttccctaaattttaacatgtacnnnnnnntgccccctgaacttttttggctgttaaaaattccccctgaacta

SEQ ID NO: 14811 - DNA, 5219 bp, Cannabis sativa
  modified_base (4928)..(4948): a, c, t, g, unknown or other
ttcgcgttaaatttggttaaaatgcccctaattcaaaaattgaaaatgttattcttttcaaggtaaattttaacaagttctttccttacgcttacaattgttagtatactcttgaaatgtcacgctacacatcttgaaaaatagtgaagtttcatagggagaaagccaaacatcattgttcataacttttctattggtcatgctgagaaaaacctagttttcaagcattgataatcatttttgtcgaaatagttaaaatctcatatttctaatagtggtacccctttgtgaaatgtgacccggatccatctcgaaatattttttccccactattcatgatgaattcgtactactgagatgtttatgaagatttttttttttttgcattatatttggttaaaatgctccctaatttaaaattttaaaatgttcttcttttcaagtatataacaagtttttttcttaccaattacaaccgttaattttctcttaaaatcttaccctaaacatctcgaaaaaattagtaaagtttcatagggaggaagccaaaccgccgtccatcacttttctattggacactttaagagaaaatatagttttcaagcactaacaatcattttagtctaaataaaaaaaatctcacaattctgatagtggtacccttttgtgaaatgtggcatggacccatctcaaaatatttttcccactattcacaatgaattcatactactaagacgtgaatatgaagattactttcacattaaatttggttaaaatagaccccttatacacaaattgaaaatgtttttcttttcaggataaattttagcaagtcttttccttacgcttacactcgttagtgttcttttaaaatatcaccctacacatctcaaaaaattgtgaaattttacatggaggaagccaagatcgttcttcttcactaccgactagttttatttatatcatataattttaattttcttgtacatccttacaagattatactttctccatatgaataagagattttctgatatttattaattatgcttctataattaatatattcatttatcttataattatatttcatatattctgtaatatattatctattaactacttgcttttagggaataaagcccaacactttataacgttagaaagattgtgacgattacttagtccagatttggagtcttaaatatgaataattatttgatgtgatttagagattaaccttattatgtttaaactcagaatcgtaactagaattattggcactagcttaagatcacttgtggactggaactcttctcatactttagaattcaggtaagacaacgaactaagcacttagagtatagcgtgatggcgcacttgtatgttatatggatatttatgtagagatgtgagttaggactaataccctaaagtttcaatggttaagcatgccctaaatgagttatgtgaataaatgataagagttatgcgattaaagcatagcaaggttagactcggtaactaaaaccgagataaatcctattaaggccttatatataaaatagatgcgtgagtgtaataaatggtatctatacaatatagacataagatgcagtgacattattataaatatgatagtgtattatatagtgcgatggcacaattatttatggagggtcatattagttgtaatatgtatgttgtatgtttatattggatttatattatgctatcttgatgtgtcttgacttactggtgctctaatatgcatgtaaatgtaaagcagttccaggtcaatcattagttcgagggcttaatgatgaattgtacatgtttcggctgagctagactgagagagttgggtcctacatggtgattgtataaaaatctcattctgtcgcttaaattagcttacatataaacaatttgtaatattttgaaaagaatttcatggaatcccgaatttgtaactatattattttgtttttaattaagattattacaaggtgttttgatatataagttattttgtttttcttaattcacttggcttaatagaccccaattaatgggattaggataatataatcatgacacgtggtgttatcttaaagagggtgttatagttagagaacatgtcttacatcctcctcatccaatgttcgttccactgcatatattggatctgacaatacaatatatttgttggcctccttgtaatttttatccctcaaatcatccaacactatattaacttcatttttcctaatgaccctaaatctcatattcatgtgcttttcttttggcttaaaaagaaaaccaaaaaggaattggtattccaactctaaacttatttcttcaagatgcagcttattgaacccattcaacccacaataatccaagtaggcagcttgaccactctcatacctcctattttcatatgggataaactagtaaccaccatgaaataaattcacagtaaaattacttaaattcgaacctgcaaagttaatatataatcacataattaatgtaatcgaggcgaaaccaatcaactttttccaatattttgataaaacctccattagcaatttatcccctaacccaacaaacagacaagagataatataaaaatgaaaaaagaaaaacatgtgaaatgttcccattgaagaagacaacaaccaaagattctccaatagcctttaactaatgtgtttttacccataattttaaactttaaactttaatatcatatccaaccactttacacgttatggaccaatagctctgaacaacaaaccattaacactactaccaaatagaaaaattagtataaaaatcccctattaactcattttactcagacattaataaccacaacacaaatattttttgaaacctcaaaagatcctatgaaatatgggtatggttcttaccgtagttaggatgaggatcctcttcacctcgacaacaacatttcttaaacttttgccttccacaaatttgttgggtttccttcgttttgttggacgatgatgatagttttgttgggtttagtgtctttcccccttctcactttctctctttatttcattgtttttttttttttgataatttgagtttgattacttttgtgctattaatttttatatttttaatctacttttcattagacgttttattataattaattctttcttataatttatttctttgatttaatttgtcattagggtaaaaaataattaattttttcatttcacatatgtcacgtcatgtaatttttagtgacatggcttgttatgtgagtttacttgatacttgttcaactaagacacataggcaaataacggggtcaaaggaacagaagtgagattttgctaacagtatagggatttgaggggcttttatcatcaaaatttaagttttatggcgcgtttactaaactgtaattggaatcagaataattaatgggagaaatgaattggattaaatagaaaataatcggaaacaatattttattatgctgtttactaaactctctgaaaaaaaaactagaatcatattattttgtttacataactaggaaaggtaatcgaaatactttaatttgacaaaattgtcgaacatgtaattattttctgtttatagatttttaaagggcatatttatcttttttatttttaattaataaaattaaaattaaaataaattaacttaggaaagggaaagttattccctataaaaatgggggaaaacctttttctttgttttctccctaataggggtgttcataaaaatcgataaactgaaaccgaccagatcgtaaccgaattttcagttttacgtcatcaccgaatttggcggtcagtttcggtttcggtttttttgacatggcggtcggtttcagtttttgaaataaaaaatggttaaaccaataaatcgccaaaaccgcgaaaaaccacaataaatcgctcaaaaccgcctaaaactgccaaaaaactgtccaaaaccgccaaaaaaccatactgtcggttttatacggttataatttctaaatggtcgattacgatttttgtaaaataaaaaccgtaactgactggtcggctataaaattataaaaactgaccctaaccgaccgattttcacccctactccctaatttgtgcgggtcctactactttcttccttttcaaaatttattaaacaattgtatggaaaccaatactatactattaattcctatttcctttaaataaatatgacattaaaattaagtgcaaagggaataaaaatattgaaaattatgctacaatttactctaacaaatctatcatacatgatatatgtatgtatattttgtaataacaaatatgacctttatttgtcttccatttttttaataggaataacaaacactgttttttttttaataattcttatgtacaaataattacgtaaacgatttaattaattatgtgtgaatatatattatatatttctcaaaatatgttaaatatttacttatcaaataaaaaaaaataattgagagcatagtttaattaggggctttttatttatatttttatgattgatttttttatttatttatactagtctcaaaatttcattatatttgctccatagaatccaaatttcaaacaaagaacatttaataaaaccaaaaattaggaatcatgacctgaaaagggttttaaacatttaatcacttttacggtttatataaaataaatagggaaattatcttatatattgtttttttaacttttttttttaaatttacggtttaggtttttaaagtggttgcatcgctagttgcaataggaatttctatatgattttttgttacgatttaggttgcagcgctaattgcaatatcggtttctatgtagaattctgtaaannnnnnnnnnnnnnnnnnnnnaactgttttgaagtgtaaaaataagaaagccccaattggattaactaattattttaggaaaattctataatgcactcccttaaaagagatacatcgatacatctctatcaattttagtatccgaaataaatttctagtcaatttttttctcatagtcatgtaaattatagttatttaaaacattatatttatatgggaaaaagtcatgaggaatgccataaaaaactttatatttgtgtttctttttatttattttttctttttttaaaaa

SEQ ID NO: 14812 - DNA, 2868 bp, Cannabis sativa
attaagtgccttctcaaataaatatatggaacccttacaacatacctcagtttcagtatctctatcaccaatttccccaatggtccgtacataatgtccagaagggtatctagatagacagtcccaagaatcaactgccacaattattctcttgtccagaaggttctcaagctgtcgtgtttggattcgaattttaggaaccctgcggtcttttgagacaaacaaggcatgggcaacacctccactacctgcaggcaagggcattggctccaaagatccacaataactgcacaaaatttaaataatattacactaaatctagcataaccagcatgcaatgtgtggataaatgggtaaaacatcttaagtttataattgagaaataaacaccaccacttttaaaaaacgtcagagaagccaaatagcagctataaccaaaaccacattcaaaagctagccaatgctatggattaaagtcaacttacgaatgccaattcctctttataacacctatgacacgaccagatggacgagatgaggctagtgttgtttcactttcacattgagaagtagttctaggagcatcatcagcactacctggaactaggtgaacaccttcttcttcatcatcctctgtgtagaagtaaaatttaaatgcaacaaccaagtatcaccgattgaaactcttctatgtttattgtatgtaaataatgtttacatatcaaagaataattatgatagctttatcatcggcaccttctagaagtcaccaatttttcatttattacttatttttgcaatgagcgtaccttcttcggctatagccaatgatttctcctcatgccactgatctttaggcaagagttccacagccactatatccccatcaaaggctctattcatgtttgagcgcccataaataataatttcatcaccaatactctcgcttccaacatacgcttcaaaagggttgtaacgattcacacgaagttttccttgatgatatataccacggtgcaagccagaagtaatctcagacatgggtttgtgctagagatagtgacaaagattattattagaaagaacaattttcatttcatggagcttacaaactataaatgtaaagaggcagggaatgcagcatataaacaaacctccgaatatatgattttcctttttgatggcctcaaatcttcaacctcctccatgtttacatcttcagtcgaaggatgcacaagttggtcaagcaaatcaggtcgacccagtgatttcacataagattcaactgaaagaaaggtaaatattagagaagtgagctctgtatacagaataaagcaacaaagttttcatgtgataatcagacgtggtataggatgatgcaaatgctaaatcaaaaagaaggtaggtgcatacttgtttccgcacaaatgccctcttcaacggcctttctcttattctctctatcattagtaatcagtaaaactctagctgcgccactgagatgagtttgataccactgagcagccactcgaattgctgttacaagggtctttccatgttaaatccggaatttgaaaccaaaacttaaaaaaaaatgataatcactgcaaaggcaaagcaaacctctatcatttcgatcatttttagtctctccttccatttgcttaacatatgtatctctgcagatttagtagaaaagtaaaagttactatataacatgaagaaaagataaggacagagaaagaagaaattactcacttgtgatgttcattagagaaaacaaagaattttttagaagaattgcaaagggctctaagtctgttgtaaatgctcaagttcttattcttaacttcttctagcacaatggatagcaaaacgacatcctcaatggctgggttctcaagtaaatcgatctataatgtaatgcaaaacaagttgttgttctcaaattcaatttaataataaagtaatgacattgtcaaagaaaaaggagtatagcaaaagaagaagaagaagaaaaacctgattgagaacgacattagtgtcaataacgagaataggagaagcatgggaagcagtcaagcgagcatctttagaatcgcagagtttacaatctgaagctccacaatagatatcatcacgaagataatgctctctcaccacctggagacgaagaagaagattctagttagggtttattcgaaatataaacacataaacacgcacacacatacatatatatagagagagttgtacagaaaactgaccttggtgattttgccggcgcggcttttcttgacgaaagacttggtgtgcaacatgattgtaagtaaaaattgaaactttaaagctaaagccctctcttactctgtcggagtccgtagatttctgagagcccccaaaacagaggcggactagtgttcttatatgaatatgaatgaactatgaagtagagacaaagaaaagaacttcttagtttagtttaagccctccagtatcattaaaaaaaaaaaaattcttttcttttagcgattttaaataataatttttttccttaaaatttaaatatgctcattttttttttaaatcatttaatataatgaattgaaaaaagataattttcaaaaaaaaaaaaattctttgttattatttttgctatttatcgaattaggaaactctatcttggttaaaattaataaataaaaaatctcataaaactcaaacttaccataaaatatctcacaaaattcaaaaaaaaaaatattataaaaatgagataataatgtgatattattacttttgctattacattgttcaataataaagtgtaattatactaaaatgaattttaaagccactaaggctagc

SEQ ID NO: 14813 - DNA, 8156 bp, Cannabis sativa
tttttttttttttggagagagagatcagtttaatttttttttttaactaaccaatgataaaatgggaaaaatatgtaaataaaaaaattattttatataaattagttgggatctaaattttaatatgagattgttttaagcatacaaaataaaattttccaatcaaatatttggcctacagtacacattcaaaggctaaccagatgcgttaaaaatccagaactagagtgaagacaagcttactccatgcacaaaacattcaagttaaaaggaggtaacctctttactccatgattgagcaacaatacctaaaagacaaacacattcaggccactataccttctttgtgaccaattttgagatgcttagacaacagagtattgggtatgggaggtagtaataattttacacgagaaaacaatggggattaattgcattcatatggatgcagataaaaattgatgtcaaaatactcaaaaggcatagcaccgttgttctttttcttttcttcattttaatgttcttgcttgccagcaatggagaatgaaatgaaacatagaggcttgaatacataaggtcaatgtaacaatacattttatgtacagaaagaacacatcccaaatcatcttaaatgtactttcatttgtcagctattcttccagtcccggaaattatctgaactgttattttattgtacatactatgtagaattaattttggaagaagaaaagaaaaagaaacgcaatctgcttttaataagcaacttgcaaattcatatcacatacaaaatgtaaagaaaaaactgtaaataatttggaatggaaccaacaccattagttatagatctaaaaggccataaactcaagatgaacatatcagaatcagcaacaactgcttgtggatgcatcagactggggcacgctctctttaaaaatattctttctgacccctctagaaccctcagctaagaggctaggagtatccaaaatctgacatgattaagatcatgaaattattatcatttgtgttagtgttactcagttcactacatatttcctaagatcactaaattattatcatttgtgttatcctaaaggtacacaaaggcaatctgtgtcgccatcaatttaaccatttttcggttctttaggatcttaaacactatagaagtttccttggaagatcagccaaggccagagtttacatacatttctgttttattatatcttaattgagccacatagtgcaatatgataaaacatagagttaataacgtgtcataccttcaaaacaagctcttcaaagcactgctgtacattaactcgagttttggcactgcactcgataaataggcacccacattccctagcaaagtttattccctccttttttgtcacaactctgtcactttcctgaaaaacaaaaattgatccaggtaatcaatcatatgcatggcaggttaacaatactataatcatctagaagctggtcttcaatcaacccaacaaagttaattctactcatgttggaatcaatcaggagtaagatgtcatgtagccagtgtcaaaacatttttactaaaaattcaaacacatgtctaataaaagcaaagtaataacgcaaaagaaaataatacaataatcaaaatatcttataattctaaaaaaaatcatatcattctcaccaagtcagaatattaaaacattggaggtaccaatgatgtagatgtgactattaagatatatcagaatatcactatttaattgcattacgattgatattctgatatatcttaatagccacatctacatcattggtatgctaatgaaaggaattatattaccaaaaaaaaaaaaacacctcctaaaaggaaagaaaggataataatgtcttaaatagtgaatgaaaatcatacaatcaacataaggtttcattagtaaataatgatctcttataataagaactttaatattaagattataactacataaattagatattaatcatgaagacaataatcttcacagttcaaactcaatacagtaactcttccttaatcaagtgtcagcggaaacatatgggtcattgtactcacatgcgagaacactatttacaaatgcatacaggaagaattaggatggagaaagcacaaacgagtactggtgttatgatgtgcactgaaatatcatttcctccatacagcagataaaacaaataagtatgtcttaatagtgggaaatataaacaaagcttgattctgtcaatcctcacaagaaataccttatcaactttgttcccgacaagcatcttgatgcagtcttgatttgttgagtagagttctatttccttggcccatatttcggcgagagcagtgaatgtgtctctccgtgttacatcataaactattataaaacagatcaatattttactgaatcggcagaataatactaataagaaaactaattacaataatttctgatccacatgaacagaaattatccatcatatggtttccaccttctactaacatcaagttaagattactgctatatatggtccataaaatatgacaccgcaataattaattcaaccacatgcataaatattttctataatttatgcagctgaagttaaatctacgacagaacagattaaatgatatacactgctgaacaataaacaatatacactccattcaaccaatggagaaacttcttcccacttgttcctggagtgttcttttagtaacatacctttggctagattgctgtgtgaatttgggattcagtggtatatgccccaaagaagcagccaactgattatgtgcaaactcaaagatggtcggagaaccacacaactgcggacagcagcaatcatggctgtagtttgggatgtttggtaggaaagaaatgggtgtacattctaaggagttgaaatggggctgaagatgtatggggaaagattaaactctgggagggtttgaggggatatcttttcaagatttgaccagagaatggagttgttttacaataagaattttgtaattgtgtattattattttttagtcttatttatgcttttggtcaaaagctaagacttagcttgtaaccacagttttaccataagtgatgctcccgaataaagtatgaaaggaggtcagtctaagacaagtgacctttgtctctttttctagaaaaataaaatacgtagaccagaataacagcgaaacgaaaatgaagattgatttaaaattcagcagaaaatgatttaactggaaaggagcagatccagttttagatttcaaaccaggacaggaattgaagaaagccagtaatgatagtggggcaagagagatagctgtcacttcttatatcgaagagcttttctataatttctcaaattagtttactaatgagcacttcaaattcattctaatatcaaaaaacaaaatggcatcacagtgcggaatgagatcttagatgacaaaggacttgagcttaatcattcaaaactttttttgtgatttttattatattgttatgacttttaatctggtcataatactgaaaattagttaataatagagtaaggattgcatatccatttgatgttagacaatagactatgctgattaaataaattaggacaaactattgagttttcccattgttacttctcttgtttctctctagttattctaccatttctatcagtttctcatccctttatcttaaacccatatttattagtcctgaatgagcaacatatgatttcatcatccaacaatgacaaatttatgctccacaatgaaataaaaataaaaaccaacatatatgaaagcatgtaaaagtcaaactagagtgagaacaatttcttgtaagcaagtaattatgtgcccagccaaattgaagttctctcttcgacttaacttttatgcatgtatgtgagaaaatatttaattgacctttctgcttttcccagcttaacagatattgaataaatttttcatttctcattaagaactgtgccaactaaaatttcaatcaactgcatgtttcttcaacccccatctcaacatcatttcttacatttacaagaaagattgtcgaacattgaagagtgggacattttaataatgtttgttagagaaaaaataaaataaataaatttatatatatatatatataagggatcttgacactgtctcatgaatgtttcagatactagtgtccagatgatcaatttctggatctcaaatggccagtgaaaaaaaaaaggagataagagtcaaatttgactattaattcatcttaagagttcgaatagtcataaaatgaaataagaatccagctcagagtaaaatgctgcattgtaaggaactggaaagctttttttaatatccaaaagacaaacttggcaagtgtcaggtcggagagagatgaggatttatcccacatgatcatctatagctgaatatatataaaccatatttctacgaaatgacaaacaaacaacactatctataatcaaatttcttttcagaaactaggatccccacctaaccctacaatatttggagaccatgaaactatagcaattgctatgtaggtactttttttttgataacatttgctatgtaggtacttaggaggagggactcaaccctcagaccttgtgggagcaaaccacatgtctgaccattttgagatactcttcttcggtacactatctataaccataacaaaacagaaattttttaaaaacaaagatatcattgtggaatattaggtctataatggatagataacaggccaagtttctcaatttctacagtaataaaacaaactgactaaatcacacacgtgaataactgaagcaccagcttattccttggtttatctaagacatacattacaggaaagccaccttacttgaggtttaatctactcatttattgcaacatcccacttacagcttgcaatttgaaatccacacatttaaactcgcataaaagaagaaaacaaatatagtagctgaggtgacacttacccatgatgatcccttgtgcacctctgtaatacgagctggtcaatgttctaaatctttcttgcccagctgcatatttaaagaatcaacatcagttaagaaggtcaaccctccatttaggagggagcagggctattgggggtggaagaaaaacagcaacaatagtgataaagccaaacaaatttaaaggacattgaaaatttatagcaactgtcaaccaatatgaacagaagttctgctataaagaacattgaaaaaggggagggaggttaaaatagtgaaagaatctagaacaaaaaagagaaaataatagatttacttatatggattcacatttccaaaggttaaggttaaaaaaagaaaaaaaaaactaaacttagtagttgtaattatccacagtatagctcactgtgtgagcacaagaaagccaagaagttgtaaaatctctcacaaagaacctatttgctagttcaaggtgccgtaatcaaccgacccaccaatgcaggagaatagtacatttaagagaaagaacaaaattcagagtcaatagtacaattctacgagaaatatgatacatactgtcgacgtcataaagacaaaagctgaataaatagctaaaacagcggataatactgcaatttcaatcattatgtgcacctacatggccattttaattattcgctcttgtacttttgagggaaaataatgttcagaaagttttatatttatacataaacgattttgagaaatggaaaaattttgcaatcagtaataaataaattagcataaaggatttgaagaaatggtcatttgtagaaacattcaaaaatgtgcgtccttaacatgaaagcaaaaatataataagatcatgatcagatttatgaagcttggatataagatgaattacttacctgtatcccaaattgcaagtttcagctttttccctccaatgttaacatatttcaccttaaaatcaacacctagaagaaataaaataaaaaagaaagaaaaattcatggagagctttatcaaccaaaagcaaaaaggaagaaagtaagaaaaacaaaatagaaatggattgaagaaatttacctatggtgggagagagatcttcgaatgagtcggaggtgaagctgagaagaagactactcttgcctacgcctgaatctccaatcatcaaaagcttgaacaagtaatcgaattcagttttattagaagaagtttccatagttgtatcagatttgaaccctaaagctcttacttctttctcgcttttcagaagaattgatccacaaattttgatcactgcgttattaagttattgttgaaagaagaagatcaaccagattggacccttttatttaccaaaagggtataattgtcatcctaagatgcttctacggtgtgcacccccaaaaaaaaaaaaaagtacaccgatccgcatttttaatatctcaatagatttttttttcttaactttaatatctcaatggttataattgggatgtgtacataggtttatgggtaacttctggactcttccttcgagttgtgctagggttttttcgtgcgccaccatgattcaattatcgttgtcgtcgtcgttggcattcggcgttctcgttccttcgggatccgtaacccctggtgaccgttgctctccattacagtcctcttgaagcctgctggttcacgccgttaacggcttcgcacatcaacagattgacccagtaatcatcactgcctacttcgccattctacatctagaccttcctcaagtaggtatgtatcacttccaccataaccctttgcactatgtcacttctgttattaatgttgttgtccaaatccgttttcaacccaattttaaccctaaccgaatttccccctttcatttcggcaccctttttccaaaaatagaattaaattaccatcacatctttgaacctccctggttactcatcattgctctacgatcattaaagcctccatcccctccaagcatcctttggaagtttttagggggcactgacagaaactcaccatcgagctctgctttccctggtttgcagagaacttcattaattttactgcatattgtggtaatgttttctcagtggtgcttgagtaattccttttgtcacagatcctcaccaaattctcaaagccctctctgtgccttgattttagctgatacactctccattataaatataacgacattatataaatattcctcccattcagtttattcttgcccatccaatatcatccctcactgccctgtaacccgaatacctcacctccccaactatcatacacctttattctggttttttctcccttccctgactgaattttccatggaagacctctctcaaactctcaacaccactctcaatctcactgactctaaaactaaaatacactccctctctcaattacccaaagagcctgaagaagacgcaggggaagaaccctttactttccttgcagtcaagttgctaactaatcatcatttaaacaaatttgctttcaaaaaacgccttcaccaaatgtggcctggacattactccatcaatgttctggtgaaggaaccaaatttcttcattgtagaatttggttgctttcgtaatcgtaggcgtgttcttattggccagccttggcattttgactacaaactcattgttatgactccccttgaaatcaagtttactatcactgccgacatctcagctcaacacccttttggatccaagtctttggaatcccttttcttcatcgatcacgggctttagcacgaaagcttggtgaaattctcggtcgctttattgaagtggacactgcctctcttaaagaaacatggggcccttatcttcgggtgcgaatagaaatcgatgtcactcaacctctccctcgtggaaccggtttctaattcaccaatatggcttcccctatttggcttgagtttcgatatgaaaacttgcctgatttttgccattattgtggtcaactgagccacattgtgaatcattgtgctgagtttctgaccaaatgtgattcgtcttctattccccccttgtttcgctatgatcacacccttggagcta

SEQ ID NO: 14814 - DNA, 4789 bp, Cannabis sativa
ttgaagttacctaagtgtctaaagccactttaaaaatcattatgttcaatacaatgggataattctattctaggaataactgtgggatgatgaggcttgttttaggtaattattaggattttattgcatttttatcaagtagttagtagtttattataactatggggaagaaaagtggtggtctgtttaggtatgccgatggcaaagacaagtggctaatggtgtttgggactttgggtagcattggagatgggctcatgacaccactcaccatgttggttcttagtcgtttgataaatgattttggagtagccaacacttctttctcaaatgatgttgtagacaaggtatgtctacatatatttacatttgtagtgtctcatcttaatttttcaaaattcttatatatgtttatttttttttacagtactcactcagaatgctctatgttgccattggggttggaatatctgctttcattggtaattggacttaatcttttttgtgctgcatttgtttttttagtaatgtcatgccacttaagtcattatatggttttttgatttgtagaaggagtttgttggacaagaacagctgagagacaaacttctaggatgagaatggagtacttaagatcagtactaaggcaagaagtttccttcttcgacactcaatcaacatcttctcatacttttcaagttgtttcatcagtttcttctgatgctcatctaatccaggacaccatggcagaaaaggttctctttttttaagtttttagacatttttcatactttttatcttcttcatcttttgaatcttatattttctttgttctctttcaacagattccaaattttctagcacatctgtcatcatttctattctgcttcccaattgcttttatgctttcttggaggctttcagtggcagtttttccattctgtctcatgtttgtcattccaggaattggatttggaaaggtattgaaggagttgggtacaaaaataaaagatgcttatggcaatgcaggtggcattgcagagcaagcgatttcatccattcgtactgtttattcatatgttggggagaaccatactatgactaagtttagcaaagcacttgaaaattgttccaagcttggcataaaacaaggtttaatgaagggaatactgatggggagcatgggaatgatttatgctacttgggcttttcaagcttgggttgggagcttgcttgttgctgaaagaggagaaaaaggtggctatgttttcatatctggggtgtgtgtaattttgggaggagtgtaagtaactttgttattttcttaataattttctctttattatttaatttttttgttgagcatattttgtgacaaagtacctcttcatttgttcttttcagatctgtaatacttgctcttccaaatctatctttcatctcagaggcattgattgcagccgatcgaatatttgtgatgattgagagggttccactcattgacaatgaagatgaaaagggaaaagttctccaacatgtaaagggaaatattgagtttagagatgttgaatttagttatccatcaaggcctgatactccaattctacaaggttttaatctcaaggtgaaatctagtaagatggttggtcttgttgggggcagtggttctggaaagtccactatcatttctttgcttgaaagattctatgatccaattagaggacacatttttcttgatgggaataaactaaagacacttgaaataaaatggttgaggtcccaaatggggttggttaatcaagaaccaatcctttttgcaacatccataaaagaaaatattttgtttggaaaggaaggagcttcaatggaagacgttattaatgcagctaaggatgcaaatgcgcatgagtttattgttaaattacccgaacgatatgatactcaagtaagaaataaatctgtaccccttttagaaatatacatgtttgcttaatttgattagtaacaaagttaccatctttatgtcaggttggacaatttggagttcagttgtctggagggcaaaagcaaaggattgctatagcaagggctttagtaagaaatccaagaatacttctattagatgaagctacgagtgctttggatgctcattctgaaagagttgtgcaagaagccttggacaaggcttcacgaggaagaacaacaattgtcattgcccatcgactttccacaattcaaaatgctgacacaatagtagttcttcaatcagggaaagtggttgaaataggttcacatgatgaattaattcagagaaaacatggaacaggaggtgcatatagcgaaatggttgaattacagcaatcatccatacaaagggatgacatatccattggttttcatcatcaaccaaaaggtagaaaacaagacaaaatgatgagtgcttatagctctatgtccccagcaaaagttagatcaagctggcaaaatagccctgcaaccactccatttagtccaatattttccatgagtgtcactaattctttccaaatgagccaatatgataacgaccacaataaaagatcacatgatgactcgtattcctccccatcccagtggcgtttattgaagatgaatgcacttgagtggaagcaagcaatacttggttgtttaggggctgctggatttggagctattcaaccaattcatgcatattgcttaggaactgttgtttcagtttacttcctaaaagatagctctcagatcaaatcagaaatgaaaatgtattgctatatatttttaatcctaactggtttaagtttcattacaaatcttcttcaacattacaactttgcaatcatgggagagcgtttaacaaaaagggtgcgagaaagaatgctcgaggaaatgctcaccttcgagataggttggtttgatcaagatgacaacacaagtgcagctatctgtgctcgactagccaatgaagcaagcatggtgcgttccctaatttcggaccgcatatcattgctggttcaagttttcttcagtgcctctttagcttttatcattggactaataatcacatggagggtggccattgtaatgattgccatgcaacctttgcttgttggaagcttctattcaaagagtgtcttaatgaaaagtatgtctagaaaggctcaaaaagctcagagtaaaggtagtcaattagcaagtgaagctgccatcaaccataggactataacagccttttcctctcaaaaaagagtactagacctcttttggctttcaatggaaggtcctaaaaaggagaacatcaaacaatcatggttttctggcattggcttgttcacttctcaatttttgacaactgctgctatatctttaactttttggtatggtggaagactcatcaatagtggccaagtgagctcaaagcatttgtttcaagccttttttctcttaattagcacaggcaaaaacattgccgatgctggaagtatgacctctgatctggctagaggtgcaagtgccatcaaatcaatatttgcaatcttagataggaaaagtgagattgaacctgaaaacccaaaagcaattaagaaaaccatcaagggacaaatagagttgaagaatatatttttctcttatccagtcagaccagaccaaatgattttcgagggcctaactctcaagatagaagctggaagaacaatggctctagtgggacaaagtggatcaggaaaatctactgtaattggactaattgaaagattttatgatccactaaaaggttcaatcttagtagatgggctagacattaaggactatgacttgagaaagttgaggtcacaaattgctttggtaagtcaagaacctactcttttcggaggtagtattcgagagaacattcaatacggtaaagaagatgcttcagaagttgaaatgagaaaagctgcaaaacttgccaatgctcatgaattcataaggtaagggagtttgtcatttgtgttatgatacttgaaactataacactaaattattacatcaaaagtttttagtgacaaaatgaatgaattgttaaaatatgcagctcaatgaaagatggctatgacacatattgtggagaaagaggtgttcaactctcaggaggacaaaagcaaaggatagctcttgcgagagcaatactgaaaaacccgaaaatccttctattggatgaggcaacgagtgctcttgacagcgcatcagagaatttagtccaagaagcattggagaagatgatggttgggagaacatgtgtagttgtggcgcaccgtttgtccaccatacaaaaggcagacatcatagtagtgataaagaatgggaaggttgcagagaaaggatcacatgctgagttgctttctattggacaccatggtgcttacttctctcttgtaaagctacaaaatcactcacaaaattgatgataaggtcatgaaagggtgagtttgtggtgaatgatcaacctcaaaacttgatttttagagcagtaacaatattcaagaaacatcaaaatccagaaaccaatcacacatgtcgaaaactataacttagatataattagacaagaagaaaacttaattcaagaatgaatgaatagtggatcgttattgattgaatagttagtagtacacaatgagatatgtctaagattcaaactctacacaatgcacaattacaaagaaaaatctcacaatgagagaaatcacttcaagagtgatactcccattactttcttccggacagacactca

SEQ ID NO: 14815 - DNA, 7771 bp, Cannabis sativa
aaattaaaaaacaaaagtattaccaaacggcaccttattaatttaagtgttatttttttattttattgttaatattttatttatttatttttttcgataggaaacttaagacagctgcctcactcgtctcacctcaaaagcagttgattatggttgagtaattgtttaatctatctattttttatgtggtgtttttgctcacttgtttagctcagatattagctctatttaaaagctcttaacaaacaatccaaaatatttttttttttgttaggaaaacaaattttctttaaatcttttaaaaaaatataaaaaaatataactatttttttttttaaaaaaaagtttcatagtttaataatcttagcttaagttctaaagatatatagcttgtagtgttgccaaacaagacacatgaatatttattggtatatgcggctatcattgatgactaatcatatgcaaagaagcatcattgacccttggcatttggttggaggtaatgaaatagaatgaaaataatttaattttatttttttggttggttctattttaaagtattaaaatattattttaatggaatgacttttccatcattttgataaaatgacttccattttaaaataaaataaacgagagtttcaatgtaagataaaaaataattattaaagtttttataatttttttacatgcattttaaattttattctattttatttttattcttatttttattcttattcttattcttattcccattcatatttctattctcatttctattcgtatgtttttatttttcccaaccaaacgtaatctggttgggaggaaagaaaacataggaataagaatgagaatgagaatgagaatagaaataagaatggaaagaaataaaatttaaaatacataaaaaaaaattgataagaaattattaattttttttgtttgatctcatagatatctagccaacactcgctcgctagattgatgagatgagatatctcatgtgctcaaaatggaaagtatttcgatttcgattctggcgcctcaaatatattcgtgaacaagtcttatttatgtcaaattacaaagtttgagccatttttactaagatggaccaaaaaactaaaaatcttgtgggaatgtcaacctggatgctaggtgaaaaccctaggcggcacactcccggtttgacttttagggtgttgttttgtctttttcatttttgagaccttgaatttggattcttcttgtcttcttgattcagaatactgaaagatggtgagtttgaaacaacttggcggggtccaaacatccattctagaatttctaaggtcaacctgggtgtagggctagggacccctcccagtctactatgactcgggactactcaactcctggattttttttttcttgctaagtgtcaaacattgatgtccacatcaccagggtcaatttttgggtaaatatttgctcccaagtcaactttacatttgtgtgaggttgacttgatgatgttaaacaaactcgtttctctcaaaactatcaggtgggcatcaattttaacaatctcagcaattattttttattcttcaatgattcctagtggactaggaatttcgaattctattcccttttgaattgatgaactcgaaatttaaagaaaaaaagaaaggaagagaaaagagaaaagataacagatttttctctctctttatctttctttttaaattaattcactcattgttggcttaagaataaaggagataaattactataaatagagaattcatccattcacttttcccacttaattcacacgcccaagatgtagaatagagagtttgagaattttacttccatccattcttcaagtgttcttcaaattcaggtaaaaatttgaaaattttctatttttttctgattttttttttcttctcctcttgtagagctaagtttaaggattctagatcttgttggaaattcttaaactccattggtatgccctccaaaaatcaaaaataagattttcatgtgagttgtttaagctgaaactctccattcctgcaaggtggagttggtctgattttgcttgaaaaaagctattttgagttgaattaagttgatatttagttgatcaaagttgaggagaactgagttgaaagcaaatatgcctcgcgtgagaagaacaagaagaaaacctcaagaatatgatcgacacacgacctaattcattcgtgcaaagctcacagtgccaaagtctaagaacctagacaagactcgtggagggaaagttatggctactgagttgctcactgctgccattgaaagtgaggacccaagagatcgagactttgaactaaggcctcttgtatttagttccattactcaacaccaagtacaattaatttgagatgaatactctctacttgaaactgttgccaagaaacccagagtcgagtgtcccaatgattctcgaaatccttattatagtgcttggtcaatgtttcacatgaatgtggtgcattcttgcctctacacccatgatttgtctcaattgttgattacttcggggtatgctcttattagataaatctgaatggttactggattttgttaacattctttatcttctatggtctacagaactggcctattccaactccttatgagatcaattttctatgtgatctaaaaagatgtctcacccacaaagagaaaggcttctaccatttccaccattttagtgtgtgcattgacaacatcaacaaaaataactatggactctaccataaagagcacttctatactcccaatattccttcaagacatgtcacctttcaaaaggttggcccttttaaaaggtctgtttcactcatcgacatgaagcggagagcagatgccatgttgaccgatattaatttatgggagcaagatagaaagatgttgttcactgatgaaaatttctgtcacgtaggtttgatagcgacttgccaacaagtgcatgttgattatctctttgctagtaactcttggacaatgtcccttgaagatgaagagagtgggcaaagtggcactgttattgggtccaaagtgatgtcaaaagacaatgaagttggtggtgatgaggccatgactgaaccttcaggtcacactgaagcttgtgtgcctgagagagttggggaatcagtaggttgctgatgcaccatattcatcattaacttgattgtttgcttttgtatttttcttacatacttaccatttgttcttttgtttcgcagataagatgagcttccttgatgctatggcttcctgctctaaaagaaagaaaccaacaaccaggactaatgttcctcatatttgagaggttgtgcaagccattcatgcaacttctttggctcctccaaagaacttgaggaaaaaagacaaggctattgtgactaataattcttctccagtgagagattcacacaagggaaaagacaaggtcattgaaattgaagacgagccttctacttattgaatcattcatgtgtgtgtatatacaatattgttcatatcaaaatttaaaattttaagtatagatatgaacataacatactaatgatataaatttttaattgccataatgatgctactccaagaccatatatttatttcattcttgttgtatgactttaatttccatatcaaatgattaaatatctataattcttagtgcacatgaagtacttcagaacttctctactaatacttatgaacaactatatactattaatgtttctccttataaaaaaagtttatttttcaaccgtttatattataatcagaaactttttaagcgtctatcactacatataatttacaattttatattgcataaacatatcatgcgtgtattatcaaacaataatttacttacgataaaggtactgtagccttttttgaagggaggggacattagccagccccatatatataaatgaaaatactaaagctaccagtaatgtttagcatctttttatgtgtcaatatcgctattagttcaactaagtatcgagtcacatatagtttaatgtaataatttttaaggagtattgttagtcaatcacaaaaagacatatctaaagatgttaagcattactggtgcccaatagtaatgttctatatacttatatatatatatatatagtctcactgagcaatattgtatttctcaatatatatcgatcacaccaaaaagaataataataagaggtgtatagtaattaaggtagaatcatatgagtatttttttttatatatataatctcctaaaaaaatatgcgcatatgttaattctaaaaattcgtatcatttttttttttaaatattgtatagttttatgattctaacaaactcactctttctcaccataaacaatacatatatacatacatacaccctgtaacacccacatataaaatatttatttgtatataaatatataaatttattgctacattttggtacttgatttagaacttgttcttataccataaaacacctttattagaagaagattcatcatctggttcaacatagacacactccttaatctctctccacatagctttaattatcgaagtctcatcgaaacaatagtactctcccaatattggcttaatagctttggtggcttccattgcattgtaatgaggtattgttgagaataaatggtgcaatacatgagtgtctgtaacattatgaaaaattctattgaaaactccatagtctcgatcgactgttgacaaagcaccccttaaccaatcccattcggacgagtcatagtgaggcaatgcaaggtgagtgtgatgcaaatatgtcatcaaagaaatggtgccattgactataagcaatggcaccccgtacacaaatacaacccagctcaatcctctggttgagctgagttggtacaatacaaatatagtaattaaaacaccaaaatttgaaactaatacttgaagcctttccctttttgtgaagattggggagtaaggatcaaaatgacaagcgaaacggttatatgatctacctgatacattgaaccccaagtaaagaggccaaccaaggaacaatgtaacactaagccttaggactcgccctaatggattgttcaagtatttgtagagccatgacatttgagatttcggctttgggacacacacttcatcgcgctccgtggagccagtgttggtgtggtggcgacggtgactatacttccaagagaaatatgggaagagaagagcggaatgaaggacgaaaccaacggtgtcatccacccattggtgatcactaaaagcatggtggccacactcatgagcaatgacccaaataccaaatgaaatgcagccttgggagatccaataaaggggccaagctaagtatgaaaatgggcaatgaggaagaaggtggaagtaagatgttgctatgtagtagagtaaagagactaagaaaaggtcttgaaggagataagagaaggagcggagaagagagcgtttgaagcaatggggtggaatggctttcttgatttcgcttagcgtgaatggtggttcggtgtgtggtgctcgcctaacaagtttactatattggtcatctacaacttccatttttgtaggttccttgaagtagacaaaaagaatttgtgttaagatttcaaatatttatataatataacatcacaagagaaagaaaaagaaaatataagaaaggcaatgcaaagagggctaattctttattgttttttttaggatatatatataaggattaacatatgtatagatcacaaaaccttgaattatattttgtatgtatgtgtatataaactaagaaagaaacaaaaaatgcttctactttcattgcaaaatcaagagaaagcagcttaccttgaaaacaaagttgaagaagaaagaagaagaaagtaagaaagtattgtgtagaagggattgaaattaatagtggtatttataagtggaaatggtgtaaattatgtttaattattggaactaactaattaataaagtgtattaggtgaatcattatcatatgtagatgaagttattaatatccaaaatagtattgatatagctagaggtgtgtgagtgttggaggtcctgggttcgagtcccaagtaaaacatgttgtaatttataaacgcttaaattaaaaaaaaaaaaaaaagctagaggtgctcacttgatttgaatttttatatatatttttttaattaaactaatataacgatttttttaatactcaaatcagactaataaattttttaaactaaaccaaatcattaagaaatcgcagtttaagtaaagtttataattattaattttttaagtaattatgagatttttaattttattttttaaaatatatttaatatgagaaataatagatttatagcatataaataataatagagcaaaatagtattaatattatgaagtataaatttgacttttacatcactctcgtttctttataatgtcattatttatctctcatttggtgaaatataaaagcatggataagttttatctagaagtatataattaaattacaactcaatttttttttttttacataattataggttaatttaaataatttactttgtatgcatattataaatattgaaataattatatgtgcaacaaaataattaaattataatttcaaaattctaaattattaacacttttttaattaaacaccatgtaaagttataattatattatgttctctaaattttttaaaaacaaatatagaacttttattaatttattaaatcagctaaagacaagatcgtactttaataagtacattacttttgttaaacactcgatttaggcagagtaagttctgaaatatagtggatcataagaaaaaaaatatttttgaccctcatttagaaaaaaaatgtgaaattttttaaaatcaattaaaaaatgtataattttaaaaagaaaatttattttaggtccctgaactaggtggactctagacacatgtcttgtccgtctatgctcagagtctggcctgaatctagatcagtgattaaaaactattcccatacacaaccattttccatttgcatactccaatgtagacaattaaaatctttcaagttcttggtcagttagaacttagaagtatgtcaatatgcataattatataaatatatttctaattatgtgaacatttctaagtagaggtatcactttaaaaaaaatctaaaatataatgtgctataactataatatatagagcattattgttggatgctataactataatatgtagagtattattgttggatactagtgatgtccatcaatttttagaggtactatgatattgagaaagatactatattggtgtctcttagtatttctttaatatataaattatttgctaggatgaaaaaaaatctaattatttcgtggacaactctcatgttcaagttcaaatttaaaggcaaccactactattattttttcattgcttgcctaattaaattgccaacttttgttagattaataaattataatctattttgctatagcactattaattattatagagttatatgacaatttaattatacaattattcatagccgcttgtgaattaatttagagaatattgttcataaaaaattggttgcaattaccaattacaatagttggaaaatgattgtaatacttgtaggataactatttcaagt

SEQ ID NO: 14816 - DNA, 7730 bp, Cannabis sativa
ataaaaatctaaaattcatgcaataaaaaacttgacacacaaaaaaattcaaaattatacatataatcatatataaaatatatgtatatatatatattatatatggagaaatacatataattatatataaaaaatatatatatatatattataaatggagaagtacatataatcatatataaaatatatataaatcaattatttattataaacggcccggttcgatttaaccgttaattatttattacgaaccgcaactgaaccattaagcgataaacagttcagattaaccagaccaccaaaaacagttttcccgattacggtctacagtaattcagcttgtcgcgatctgaatttaaattgtaattttccgatttcgatgacaaccctaccagctacaaagaaatttcccaataaacgtacatatttaggttgggtgataatgaataattatattagcatctctaatggtggtgcttggataaagcgcttgatgatgtggtagaatgattaaaaactaaccattggagaattggatgccaaactaaaaaataatattggtgccgaaatttggcattaatgccatgctcctttttctttttttttttctaaaaataaaatgtggcacctttttctttttttcttttcctaaaaataaaattaaaacaaataaattattaaataataatgtgtaggactatcataataaatatgaaatacgattactaatgaaatatttgtagaaataaaaatgtaaaaaataatataatatataatattatattgtagatcaaccattggtgatgctcccattcaaaaatttaatgaaatactgacatatagtcaatctttgttacttttgtttctactgtcactacttttaacattcacttgatggaatattttgacaattatcatagaaaaagaaaaaaaaaacattcaatggaatattttgactaaatactaaattacatattcagtcagagtcacctaataacagtatttccaataaaaaggtaagtttttttaaaaaaatactgtacagctaatgtaactttgagagaggggtaaaaaatactgcacagctaatgtatgtgaaaggtaaaatagtaaattcaaaccatggttctcacaattaagacatgaaatagtaaaaagcatgtatgtaaaaggtgaaatagtaaatccaaaccatgcttctcactcttaggcatatgaaaagtaaatctaaataactttgtttatcttatcaaagatatagatagatttgctctattgatgagttttgtcacctaaagaaatgtcagtagtagtactcatccaaaaatgcactgccttggctggacagtgtaattccacatcaacatggtagtagagaagatcactcatatgagatttggatcatcttagatgtcaatctcaaagtcagcaaaaatgagttaatatatgtggaccattccacattaatgtaagtaaccatctctttgttattattattttaaatattatgtagtttggcttaaaagtaaaataaaatattatactataatggaagaagtggaacaaaattggtgtggtgattatgggtaagacagattttaagctgatcagcatgcatgggacatgatgacttgagtggcccataccatacatacaacaattcatcctttaaaaaaaaaaaaaaaccctccatgattgacataaaggtaaggtttttgggtgggggcctcacctaaaggaaccattatttgaatccaaaaccttattggccagctacaaccttacatgccaaataatacacttaatcatgacttgcaggcagtatctgtattacttttaaaagaaaaacaaatacttttttctctctctcaatcaaaagctaaagctccattcaataaaggctagactatagaagatgctttatacaaatctttttaaagaatagaaaattcaacatgacaagaggatgatatacttggactccttcctagtaaacctaagctttacacttggagattcagtaaccatttcatttgatattatatactataatataaaaacaaggttgatgaagatcattattggtaacttcctaggtaactatcaaatggggttgtaaataaattttgtgtgagagaacagagaattgtagatgaattttcatactagttggtcaaaaaaaggagtggactttttaatacttggtacttatctctctctctccctctctctatacgtgtgtgaaaaaattttatgaaagaattcaactcacaagattttattttttatatttcaacagcatcaactgggagagaaactgctctgtgaagtgagtgaggaagtaagaagccattgttgaaactcttggctgctgcagtgaccatatccttagcgtttgttggagacttcatcacctcgcaatttcgggccctttgggattccgaactggggctgctcttattgatattgtcattattgtaactggaacaaaattggtcatcataagcagaagaccggaagacgagtcctttgttttcttctagtgtgtttaatactaccagagacgacaaaaacccattgtctaagctgtgctctgtgcttccactgtttgaagagtctgatacaattcttaactgatgatctttgaactccctcatttccatctgatgctttgctttcagccatcttaattcctgcaccatttccttctcatgattgtctgagatcatctcatgatgggttgaagagattgaggataaagaatgagaacctgataagtctccgaatgaaatttttgaacttgatcgagttttgttgttgctcttcatattgctctccttctcatcatcatttcttgtgaatattgactgctcctcaatcttctcatactcttcatcagaatggctctgtccggaccctacagaactcagttctcggctttcatgctgaccccatatttctcggtagttaggcgtactgtctgtattgtgatgctcagactcgtcggcttggtacgtgacctcctcgaaacgaccgtgcattgaagtacattcaagcctacaacattgaacaactggcaagctcatggaactagaggtgttgttacttgccagaaacttcatgaaagagccacttgaggtgttattattattattctctgaggaagcacaattttggcatatgttttggttattaaaacggggtgtttccactaatcctggaccaggttcccattcaggtactaaggaagcaatttcaccatcgatcatgtctgctattcttgtaacatcttgatcagtaatgtcaagctctgcaaccatttccgtcgctacgctcaatgccgtatccatttcaatgtcaaatgggaaatagatatttcgaattcggcctgcaaatgataggattacaatcgattagttaacaacattcaaatttacatcaactcatcaagaaaagtacaacagacattcagaccttctttatctgaaattctaagtcttagaaagatgtcaccatcttctctcattttccctttgatgcttattccagcatcttcataatgttcatcgtcatggtgctcgaaaagctcaattccactcgcttctagctcagctggatgactaccccattcatttagctcttgactagaataaccattcaagaatccattgctaaaggagctactactgtgatgtaactcaagtaaaggctgccttatgagaggtccaaactcatcaaaatctcgtccacaatctaatggttttaaatcatattcacaatcctcaatttggagaaaagggtcatttaaaagctctcttgctgagagcctaagggatacagttgccaagcacttctctacaaattgtctcacttcaggatcctttactttgtacaaagcatctggttttttaccctaaacaaatattaataaattgtcaatgaaatgaaatctagttcttcccttttactgggtctaaatgaaaaggttaagtgataaagagttcactgttctttcttaccgaaataacttttttgtagatctgagcaggatgagtgcattcactgtatggataatcaaaagtaaccatttccaaaatgcacatcccaaatgaatatatatcaactaactcattatatgcctcttcatacacttctggagccatgaactccggagtccctatcaagggcaatagtaaaaagataaaaataaataaacaaaaacccaataactctttttaaaaaaacatcccactaacccagaatttgaaatttataattatagatgtgatgtaaaaagtagttttatgggtatttttcttttgttattttatttattaaggcaaaaaaaaaacacaaaaatcagttgttaccaacacagtgagcagcttgagattttctcaggattgcagccaaaccaagatcaccaatcttcacttctccttggttcccattaacgaaaatattatcacacttgagatctctatggatcacaggagggtcatggctatggagatagagaagcccattcaagatctgtctacaccagtgtttcactgctcttatgttaactctcttgtgttttagcctgtacctatacaagataggtaagataatgaaaccccagaaagagaagaagaaaaaaaaggaaaaaaaaaataaaaaatctatagaatataacttactgtctgagagtcccagaagtgaacatttcggtgacaaaattgatgttcctattggcagtatcaacccaggaagtgtagaacttcataatgttcttgtgtttcaatgtcttaagaagatgaatctcacaataaagcctctcaagatcttcagggctttgtagaaaatcataaagcttgacctggttccaagctacctcgatcccttcatattcatcaaatgctctgtacctgtaacaataatcaaccacaaaaaatcactccaaccattgattgaatctatccaaaagctcaaatttggataaatctgaaaagggtcatcttggaatttagataaaatgtgagaacttgagatttcatacactatttttgaagctccttttccgaggatttcattgtactgcaaaaacaaaagacaaaaaactcaaaaaatgttaacaataggaagaacaaaaaaaagaaaaaaacctgagacacaaatggatacatagatagagagatggaggagagatgtactctgccatatctgccagttggatcaacttcaacaaactcagaagaagaatcatctggttcaagatagggaagacaattcattcttttaaatgttgttcttcacttttgctcctttttttttaaaaaaaaaaaaatctcttctttctttcagataaaaatttccccttaagaggttgtttctctgctctgacacaaacacacatagacaaccgagactcccaagagaaaaaggagacagattttttatcaaacaaaaaataaaaaatattacttttttcctctctttctcactctatctgaaagagttttatagagaagaaaaaattaaattaaaatagagagattaaaaaaaaaaagaaagtttgttgataattatatattttttttttggtaagaacaataaaaatgtttttattactacaccatattataataataattaaaagggaggtaagttaattaattaaaagaaaatatacatatatatgacttttttgtaactcttgttttgcctcattttctatagaaacaaacggagccaaaccacccaccctcagcggatcgtgacaaatgcaaaacttttgtaaaataactgatcacataaaaaaagggtcccattataagattcaattttatgctcaaaattagatctttggtgagtttgagtttgagtcatgatccagaactcgtgtaaagaataaagttatcaactttatttatttttcatgtttttgtgttttgtcgtaagattatgaaagcactgctagtgttatccccataatgaaatgactgataaaatcagtagcaacccctttattatttttatttttgtgattattctatctctctaccattattcatttatattttgttttttttattataaaaaaaaaaaaaaaaagtaccataattgagtacccatatgaactttgtttattgggcttctaatttgtaaaccacccacctaactcaattttattcaacatagagaccaaatgaccaactatgcaaattattaagtatttatttgacttgttcaaatcctccctaattgaaatttttttgactcattttctttttctatgtaccaagattaaaaaaataaaatagttatcaaaaaagattaaaagtaaaatgttttgatatttttttttgcaagagagaaaggtgtaaaagcatgatactattttcatttaaataaataatagagcacttgtagcgtgttcgatataattagacattagaaagaaaaataaaagtagttacgtgtactttattatttttttattttattttattgaacaataaaaagtagagaaaatatggcttttaaatttacatatttatttatttattatactgccgtacaacatagtacctcttgctttataaggtaaggtggaaattaggtggttaaacaaataatcaaaattcccctaaaaatacaaataataacacaagagaatttttgttaaaaaaaaaaacaacaatatgcagagatgatttgtttgctctctaattttctcattaattaaacaatatactgagattattaattctttcaaaaaaaaaaaaaaaaactaatatctttttcttaagaacattgatgttataagacatcattcaataagatatatgattattactttacttatgcatatttatgtaatatacatacatattacaattacttattatgtaatttaatattaagtataaaatggtggtaatatttttttttgagtgaaaatacatacaattattataaattaaaaggatgaattatttataataacaaagtagataagcaaaataatattttccaacaaaaaaacaagcttcatccccttttacaatgtaatccattagattcaataaactataaataatgggaatttaattactattttagagatttttgagtttgttaatattttttcttatattagagaaagaagaatccaatttagaacctcttataactatttggattacaaatttatttaattataagtaagaaaacttatgtgatatctagagtagtagaatttattatcataatatctagatataatcatgctcaattttaaggaaaattattcatttatgttatgaatataaaattaaacttgcactaatgctttcttaatcatttttttataaaaaattattggattaattacaattaaatacgtaaattgtattttatttactcaaataacgctggtcatttaatttacaaaaataacgtatatgttttaaattatatatattggtaaatccttcctcagtgcattttcagctaatcatcctattttttttcatttttttttaattcacgtgcattttttatcactttcctttctttttacttttatttttataaatacgtatatataataaatttttaatattaaaaaactaaagaaaacattttctctctctctctcttattttttttttctataattaaaaaaaataatcacactttaatcatttaataatttgagtttataaattacactattataatct

SEQ ID NO: 14817 - DNA, 4121 bp, Cannabis sativa
aattatggcttcagatgtaatataggattttcttagctgctgaatcacatactttcttatagattagatagtttagcggggactaaaattatgttgttggatatggatcacatgaatgtagcatgaaaatgctatttttagatttgcgagaagaatcccagatcagaagtcgttataaagctttttccaagtgtttttatgtaagttcagtgaaactttgagaatgaaagtgatagttcattgataaatagccaaagaaaaaaaaaaaaaaactaactccattgtgatttgcatcttttgaacttttaatcacttactttagagaactcccagagaaagtgacatggtagatacaaagatattatgctcccttggttatcaagaatccaatgagattaccaacctgtgcctgattgatgatatgtgtaatttgtttcaaaaatctgatgttgttctcttttgttggactactgcagtagtggaagccttgtagcatattcagaatcacagtcagatgtgagctctcctggtgttaatgctaatcaaattgagcatgggaaaaagagagtggtggttcttggcacaggatgggctggcactagtttccttaaggatttggatgcttcgttgtatgatgttcaggttgtttcgcctagaaattattttgcatttacgcctttattgcctagtgtcacatgtgggacagttgaagctcgaagcattgttgaaccagttcggaacattataaagaaggtaaatgaaataaacaaatccaggactgtgaaatttcaaatttatttatattttcctttccttttttttctgtagacactatactgtaaaatggacacgaacagtttcgatattgctgtttggttgacaagcatcacacattgtttttgttgatactgtctcctcatttgtgtttcattccagagaacaggagaagtaagattttttgaggctgaatgtgtcaagattgattcttcaaataaaaaggttatatgccggtcgaattttgatgacaaagcactagggaatgaagagttctgtctagaatatgattacttggttatagcacttggagcccaagtaaatacttttaatactcctggtgtcaaggagaattgccattttctgaaggtacagcctacctagttttgaatgtagtagaatttttataacttgagttactactttcctttaatttattttattgtttaaacaccaatcaagttgcttccagcttattttgacaagtgatccttgtgcaggaagtagaggatgctttgaagatacggcgtagtgtgatagattgttttgaaaaggcttcacttcctgggttaactgaagaagaaaagagagcaaatcttcactttgttattgttggagggggtcctactggtgtggaatttgctgcagagctacatgactttgttgaagaagatatactcaagttatatcctggagttaaggatctgttgaaaatcacagtgatccaatcaggagatcatatcttaaacatgtaagatgaaaaaacaattgatatttcacattcatctgtcttaatgctttcgaacaccttcattgagaacccacttttaaaatctgtctaccaacttttccctcatgtacccttcttaaaatagtgcaaccatctttagaagtgtgtagaaagaataaattcccacttggagtgagattattaattaagttggcttcagtgtgaccatcttctgaatcttgcagtcaaccatgtttaattactgatgccatttgttctcaataaatcaatttcgtgttattatttcaaatatgagttccatgttaaactaatctctttgcagtcccatagtttttaccaccatctctttgttctgaaaatatattagtgtctttgcccggtcttccatcttatgaaacttcccttgcttgcaattatccttctattttcgtaggtttgatgaaagaattagttcttttgccgagctgaaattcggaagagatggtattgacgttcaaacaggatgtcgggtgactagtgtgtctgaaaaggagattacaatgaagagcaagacaaatggacaagtctactccataccccatggattggttgtatggtccaccggtgttgggactcgtccagtggtgaaggacttcatggaccaaattgggcaggttcgttactaagttcctagctatttgatcactaagtgatgcttaatgaattggaggatctatttgcttacttgtgtggatgtatatgacttctgcagcacccttagcctcagctttcaggattattaaaagaaatcttttatttacattcttctaaacatgcaggctaacaggcgtattctagcaactgatgagtggttgcaggtaaaggggtgcaagaatgtttatgccataggtgactgcgcttcaattgatcaacgtaaaatcatggtacgtcaagtacctaaagcttctacttttgatttcatctttggttgttttgatatggtcaattggtgaagttgtagtcaagcgggaatgtatgtagtcttttgctctctcatgttcatgaccgttttgatgttgtgtctcactgtaaatttttgctacttttatgtaccttcataattgaaagaatattgcatacatgaaagtcattcaatgattcaatttcaggaagatatatcagccatatttgaagcagcagacaaggacaaatctggctccttaacagttagtgaatttcaagatgtaatagatgacatcctcataaggtatcctcaagtggatcattatctaaggagcaaacatctagctgatgtaacagatctgttgaaagattctgaaggtaaagacaggaaggaagtggacattgaaggatttaaatcagctctttctcaagtggattcacagaggaagagtctgcctgcaactgcacaggttcatgtctttcctgtttttattttttgctttggacaagttgttctagctcataagttactttgttgtctaataaaataaccattatcctctccaccctttttgttttcaggttgctgctcaacagggttcatatctttctagatgcttcaatcgcagggagcactgcgaagcaaatcctgaaggtcctcggcgttttagaagttctggacaacatctgtttcgccccttccagtatgtttcatacattaatgttcatccattttgtatcatttatgtatccttacagcatactaaaatttggtacaacacaaaaagtaatgacttcagtgtgtaaaatgcacggcacccctctttcttattaacttttcaccaactttggatcacaaggtacaagcattttgggcaatttgctcctttagggggagaacaagctgcagctgaactaccaggagactgggtttccatgggtcacagtactcagtggctatggtattctgtatatgcaaggtaataatctactgcttctaatatgttttattttgctgctccattattaaaggtaatagtttttcatttgaattgtttatgaaacttcagcaagcaagtaagctggaggactagggtgttagtggtatctgactggacaaggaaattcatcttcgggagagattcaagcggcatttgaactagtgatagtatatacaacggttgtctttacttgtattggcacaaattcagaatatttctttgatgatttcctttttttgttattaggtgaactaactataatctgaaagctctcattagtcaataataaaagttggcaatattacttcacagacacatgatattaacaataaaatacaaaatctatggtaatgaaattttgggagaatcgaatcgtgattcaaggaaaaaaaaagttacaagcacaagctatgctggtatgaattgcaatgaacaattctagactatctatgaacatgcagttgatactttgtacaatcgttctctggctaagtcattgcaacacactccgaaaaggtcccggcacatgcatgggcaaaagcttcttcttcatgcactggcaattgttcttacaatatttgctcaaagcacaagcaagttgatcagatgaatataatttaaatgaacctcagaatgtaagatcttgttcacgt

SEQ ID NO: 14818 - DNA, 17854 bp, Cannabis sativa
ataaaatgatttctgatcttttattgattagtaaatgtgattatattaaaataggttttatttagggcacaaaatccaacagtatgtagtgtggcttcaaactcacaacgaacaaagtaaggatcctccattgaaattcttcatcctttattaacctagaataagccgttaaaaaaactaatctaggacaataaaaacttcgtaaatataattgaaaaaagtaaaattgtgaatatagaggagatgagatagctcaaggagaagaaagagatgaatttcatggttaagaaagaggaggaagataggtaacggatcatctttgaaacaggataaatcttctaaaatacactcttcaagacattaccaatcttgagaacagagatgaagaatcacctttgatggaagaatcatctaagaagaagaattgcatgcttaggaaagataaataaatagaagaaaatattgtagagagtatcaattctattttttgtatatttaattgaagaaaatatttagtatatttaattgaaaaaaaatattttataatatttatatatatttcgactgggttgtatattactttctatatacatgtttatatttgattgattcatttaaggtataattgattcatttaaggtataattggtgtctaacttttctaatttgggaaagtatgacataaatgatattatttgaagaaaattaaaatatatatttttgtttttataaaaagaaacctgtacttactgctcacaattttgtaagtaaagaataggaaatttttgggctgattgaggattttttttagaaaagttttctatgagatgtggatgtgtttagtccgtgtatgagctgtctaatatgagtataatgtgtataaatactcatattagcagctagatcttgtatctcttgcatctctttgtgtttaattaattttatattttgtaagaaatagtatctttattttgtaaaggagagtgagttcgactttacctttatgtatatgtgtgttattattttgggtctgtaatcaagttaacaaagaagaagagaaaaagtgaaaaccttcaagattttttaagctttcagaagaaagtgtttcaagtcttgtctcgggaggttgcaagcactcttccaacaaatctaagggagttcgaacacttgaagtttcagcaaggtttatttgtgaagttggaatacatcaagcttgtgatgtataacaaggggaagtctatttatgcataagtcaaatactgtatagttttgagatcttactaataaatcttatctctgagcgtgatctcgtggactagtaataatatgtagggattgttgataccacatataaaaaccttgggtattttttatttttctgcacttttgttctttgttggttttctattatgtagttacataatcgccttctatagttatagaacatttgtttcagaacaaatttaattattacgtatttaattaattgataaattaaataataaattagtaatattaaaatataacgttttaattggtattagagcaactcactaaactcttagtgagatcttgtatttttatttggttgttatattttaatcttgtgtgatgtttcttcttgtagaagaaagatctacaattagtttaccattgctaaatgattctaactacccttattggaaggttaggatgaagactctcatcaaatcttaaatgaaaaggcttggaaatctattctaactagttggtctccaccggttgaagaagatgatgaaggtaataccaaggtaaaatttgaattagactggtcaactaaggaagatagattttctagtaataataataaagctttgcatgctatttttaattgtgttggtggaggttttattaaattaatctcctcgtgtgaatttgcaagagaagcttggctaatgcttaaaacttggtttgaaggaactgtagatgtcaagcattctcggttcattatgttacaaagtagatttgattatttaagaatatctgattctaaaactctttctgaattttatgaaaaatttcctaacattgctaatgaatttttggtcttgggtgaaaaacttgacaaatctattttagttagggaaaatagttcaagttcttactgacaggtttaatgcaaagattttggcaatagaggaggctaaagactttagcataattaaaatagagaagttgatgggatcacttcgaacatttgaacttaatcaacaaatatgacaaaaggagaaacctaataaggtaaaagaaaaaaatcaatagccttcaaaagttgggagagtgttagttctaatgatgaggaagataatgaattaaccatattaataagaagttttgtcaatacatgaaaatattggcgcacaaaaagaattttctaaattctcaaaaagtaattcatcttcaaaaaatttcatccataataataaaagagttgttcaatgtagagaatgtgatggttttggtcacatacaatctcaacgtgctaatactttgaaaaagaataaaaaaagacttaaatgctacttggagtgacaatgattatgaaagtagtgatgatgaattagttactttaacttctgctctttctagcatgtctcattttttacagaaaaagagaaacctcgtttgcctaaacaacactattttggaaaataaagtttctaacaatgttatagaatctgaatatgatgaatctgaactggatgaagattcattggttgaatcgtgaatcctacaaggaaatgcatggtaaatgtaaatttgatgtccaagactatcaaaagtttgactgaaaaaaaacaaggatcttaaatccaaatgtaaattttttgaaactgatcttgattttgaaaaacaagaaaatattaggcttttaaaagatcttgagggtctaaagagaatgtgagaatgcacaatcaaggttcttcaattttttaggaggtccgaaattctggacaaagaagtcatgcggagatggggttagttgaatcccaatcgtttgtgaataatctgtttgtcaaagctgaaagttttatccttaatctgttctgaccctacattacaagtttccacgagtacaaaaaagacttttggtggagcagagcttcaggtaaggcttctcaatattttggtaatactccaaaaattcataccaatttgtcacttttatggtattaaatgtcacatttgacctaagtgttttacataaatctcttcaaaaataaaaatttcaatcattatagaaaacaatttgttaggaaaaagagaacaaaattcaagaagatttaggttaagaaaaatgaatctaaatgtcttgctaattttacttgtaatgcactcgtatttctaagagttgatattttgataatgagaattctagacacataataggtgatgatcgcatgctcactgactttaaacctttgaaaatggtgaagtcacatttagagattcacttctgctaaggtacttggtagtggtactctaaattgtgaggtactaccaatattgaaaaatattcttttgcttgatggactcaagactaatttaattagtataagtcagttttgtgagcaagacttgtttgtaaattttctcataataattattatgtgcttgacaagggtgagatttgtgtgttaaaagtttataatccagttgataattgttacatattatctaaatcacacacttatcacacttacactagagagttggtgaaaaataaaactcttgtctcaaaacatgttgaaacaagtaaataaatagcaaatatttttactaaagttcttatttggttcgttttgtttctataaggaaattcttaggggtgtgcaccatttaatttagtgttcttaatggttcttgttatttttgctttggcttaatgtacatagtattgttgtctttgtttttgttccaaaagaaagttttaaactctaagagaattgcaaattattatttttattgctaattttttcggtgcaatgctttcatacaagtttagttcaggaaaagcatttcactcctcctaagaatatttgagtacttcaatcaatattatgtaagctaccatttttttttaaaaaaaaagtgtgttcaagctctaatagaagaaaagagctatctatctcaatgtgtgaaagtcgtcactgagtaagttggtactatgtaattaggagttatatataaatgagacattatcattgaaaagtgttactattgaggtagtgtgatagcgtctccgttgttacaaatacttagagaaagtctatttaataaattggacaatttccctacttacactttcacacacatatgcttaacacatttttaaagaaaaaaattactatacaataggaaatggtcttataaagttgttacatattatttaaattgcttaaagtatttttggtgattgagtaaattatttttttccgtaacttgtatggttttattacactagactattagcttggaaaaataatttctatacattcttatgaatttgatttttttattgggaacaaagacaaagcaaacatggtgttcattttattagtaaaattatcaaggtctattttatgtgttttatatataaaaagtaaaaatataggtgtgatcaatattatgtgatgagctttcttaaaaataattgcatttttttgaatattatgtttaattattttcttagacaatatttttttctcttaagtgtaaatttgtatcttctgttcttgagtgtttttgttggtttttttcttttttgtttcctaattaaaaaatgtataaattgaaaaaataaaaacagagcagagtattattattttagtggaaggtcagggtcgaagtttgagttcgaagtctaagtctagggtttgggtctaggatcggggccagggctaaggtctaggcctgggactggggtttaggatcgagcttggatctagggccagggttgggtttcaggtgcgggtctgtggtcgggtctggggccaggttttggatcctaggctgtaggggtgagcaaaaaatccaagaaatcgagtaaactgagtaaaccgagtacaccgaccatccgaacaccgaaaaaactaacaccgaaaagatcaaaactaaaaaaaccgccttcagttaaaactgccttaacatagtcagttttagtgtcaatgacaaaccgaccgattaaaccgaaaaccgaccgaacatatatatatattatacactatatatataatataattatttttgtacatattatactttgtatactacattacaacaagaaataggcctataatcactaacaaattctagatatttgctctttggaactagtataatcactctagagtttatctctttcaatatgttacacgtgtgaagaaaagaaaagactgattaacacatgtttgccgccacaatgtcccaacaatcctagaaaaagaagctattgtattcgtctagtcccggggcttggggctttgatacctggaattgagaatacaacattcttcacatccttgatagagtaaagggctaataaggccataacttgttccctggacacaaatgtacctaatctcacaatagtccttttcattttagttcaagcaaccggtttattgcccaaccgattattataataatcaagaaaaacttcagtgacatcattaggctcatccacctaaatacccacaataaatctgactgaataaattacggacccaaaatttttattttgtagaacttatttattattaaaaaaatattgatacttatactataatcactcttattaggtttatttgattttgtgagggtctttatattattttgatctataattatcaaattaaaaaaaaattacatttaattttttaaaatgcaatatttttttagtgggagctatagcccccacatcagtactagtgaattggtcactgaaattatgttttgcaatcttatatcttggagactagcatggaatagagttgtgtttccatctctttcttagagccaattagattttatcttctgctgtaatgatcaaataaataaccttcattcataaaagttatctcagcagttgaatacaagtccaacaacctttaataactcggtctatctttgagtaaattcaaccctcttcttgttacttgttactctaagtaaaaaaattaccattgtacttaacatcttttagagcacaagtttcaacacaaatctttgaaggccactaaattaccataccgaactttaaaaccaattctctcttcctcatggagaatatcattaaaatcttcaagtaccaactaaggcttgtgagtattgcactctaccaaatccttccataaaagtactcttccatcttcatcatttatttcataaacaaaggtgacaaagacctcgtctttcttatcaaatggcttaatcaataaatggatcactttcttataccaagtacatttgataatagaaagagtaaacatgaacggattccaaccaactacaatcctccctttcttataccaagtaatatattagaggtgaaataccagcctacaaataaaccaacatacaaggctcttaacttctgagctgttactctcgtctcaaagagttcaactaaaccaatattatgaattatgattaaaataatttactttaaaaataaaactcaaacaatcaattgcaaatgtgtttatttttttttttgcatgagtgtagctaaatatttgtaccttattttttacattataaattattttaaatttttttaaaaataagtaaaattttcattataactacaatatacacctttataaagacttccctttatagtttataggaataaaagtcaaatccctacttaaaaattatatgtatatatttaaaatatatatatatatatatatttaggatatagtttataagagagaagaggtctcgagtgaagtgttgtgttgtgtttgcttaaaatatattattggggtatctgttattgggtgccagctcttcactatgcatgtcacgcactaaaaacggtagagtacttcttctttgttattattatttaataagaattgagtacttgattagttagtacggtttcttttagttttactataataataatcacgaaagctttgcccattagtggttttaaaaggtcaacaaagaaaccctaaaaggaaaatagtcaacaaacaattatttattttattaaacaaaatttactactcaagattaaaagtagtttgtcttcaaattatgtatttcatctgtgatctcatattcaaaacttattaaattattaattataattaatttaaatacatattttcacacatcaataatgatttgtcaaatgtttttaaaacttctttacttgaccaactaactaattagtatattgttcatgttggacataatatatgatacttctcagtcagttataaattaagaccactcttataattattttttggtacatgtatgtacagttagtttcagttttaaactaacactaaaaatgttctaaaaggaatatcgactctaaaaaaaaaattaattgcgtcaatagaataaatgtcagttacaaaaccgatgctaatagcattagcttcagtactaaggaagttctacccacctttaatggttagtattgacgtaatgtttctaagaatagttggtgttggtgctcctagtgcagttttggctatgattctaacacccatgttttttgatacataaagaatagtacacattatacaccgttaaaaagtattacttagattaaatacaatcacactatggtcttgtgaagggacatgtcaatgtcaaaatcaatccttcaccctttttttttttttttttgagagtgagacagagaggggtgacatgtcaaaatcaagtaggcaaagcgtagagattatatcaaacggtaaagcaagatgcgaagattggcagatcagatcctcaaatatatatctaaataatgatacagtacacatgtggcaactggcacaaatcaaaatgtattattctagcttttgggattgttttggaaggggcctcaaacgaatatgttaaaaaagaattaacttttgactgttttgattaacgtggtttggccagtaaattaaaaacagaacgtggtttttgaggagtaaaaaagaagctcccctggttttgttacctttttctttccctttgtcgtttaaaaggtcagccatatagtcagtcatagtcatatggttttgtctaaaaagacggcaaaagccagccagaggactgcgttgaatcagttcctaatttttataataataataataatgtttgaaaatgtttctgataaatattttaagtcataaattaagaatgaaggaagataaagtttgaaacttgagctagttattaggattgagactttagtttaagttagttaagtcattagtcttaacctttgaccacaattggcatatacggatatggttagagtaagtacctaatcccaagttttaaaagttgcaaactaatagcgacctgtaaaaataagtgtcacaggtatgtatcactatcactgggatgggaccactcaccacgactccaccatcactattccataatccatacacatgtataagtgatgaaaccagaatcaaacaaactcgttggacttctcaaatttcttttttgtaagaaaataagaataagttccgcacaataaattagtaagaaacacatatccaataataaaattcacctttttgcaactagtaaaaacacaacaaaaggatacacataatactcgttttctttctttccctattttggtttttactgataaagtttcacctttttacaaatggattttcttccacaaattgagtgtttctctctctctctctctatatatatatatttatcaatgatgttaaaagtaacataacatcatatgagaaaataaggagaggaaagagtggaaaacagtcaaaaaatagagttatcaacaacccaatttcactcaactgggagggcaatacagtatacgcacacttgcctgccaatgacaataatcagcagcagcattccgtcacagattctagatgcctgcatgattggattagtgccaaatctgaccaaaacacaaaaaagaaccttaaacctgtgcttattttgatgctaaacaccaatattgttgttcagcaaccgcaggagagaaatggtcccttgagttctatttctctcttccgcataaaatttctttcctcccctattttcctgcacaatatagttggaataacaatgagagaaatgaatatatatgtatataaaaatatatttcatttgagattataggaactgctttcattcaactttaataccaaaaagtaaaatttaatttcctaaaaggaaaaaaccaacaaaatttacctttcgtttctcacttttttcatcaatttccagagtactaaagtcttttagaagtacagatgaggctggcaaaagtctcctgatcaccacagtaattttatacaggattaaatttggcagagtacaagcttgaaggaactactaattaatggcatcaaaggcaacaagtaatgccagctcactgaccttctcggttttcctggtttggaggaagtatcagcgcttcttcgttcattattgagcacactaacatctttgcagtctttagtatttgctaggtcttcttttaatgacgttgattgagccagtgattcctggaaagcacaagaaattgaaagactattaaatgaagaacatacaattaaagttatacgtcaatcaaaactacatttaaagaaagagacagcattatattcaaaaaggacaatattgtgtgatcaacattcactttcttttggtttttctattgtctgattagtacaatttaattaattgtattagtttttagctttttagaattgttaatgttggattgatgttctttgcattgaaagttgagttatattggctgtttttaagatacattagcgtaaaacagacgctgaaactattgcaacagggtgcttggcgcgggcacgggatgtgctacatgctgacacaataaactgcaagtctagatcaacttcttccaacacaaaagcgtatatttgcttcagttgtgcacgaacacaaaagagtatgcatcaattccctactgaagctgaatctaacattttgcgtcatcaaatttagcttcgctaattgtaatgacgcaaaaatcctttattgaaaaaattaggcattttgttgtagtgcatgaagaaatatgaaaaagtccatattgttagggatatttacggcgaaagaaccaaagttatcatgttgtagcatttaaatactctaagttatttatttacgacaaaataactatattgttacgtttataacactttattaccttttttcaaaaaaaaacactttattacgtttgtagcacttatgtagccaagtttttggtgcttaagtgtacttgcatgatatcaaatctgcatataacttgggtacttgagtgctacaaatgtaataattaaggtatttttaacgttaaaaaataactaggataatcaaatgctacaaacataataatttgagaattttcgcaaataaagaaacaagttagatacttaagtgctacaaacgtactaacttcgtattttgacgcaggtatccccattattaataagcaatgctagaataaatcaaatagccctatcacaaacggtcaaacctgataattctgctgtgagatttcagcactaggggatgaattctcaaccatgtcaacaaccaaacctcttgcctaaaatgaagggaaagaaaaggtgtttcagtgtatcaaccaaaaagtttttttaacgaattgcaaaagtataaggtggcgactaacaggggtgtcaataatttgttcgttgtgaacacacaccaaccctttcaattgtgaagaacaatcttcttcattcacctagaggtccaactaatgagttaaaactctaaaaatttacaagacaagctaaacaacatgcacctcagcattttgcatccacaaggaaatgcatgtgttcctgctccaagttgatggatttaaaaatatttattttgggacaagtaaaaaaagacaagcataagaaaacacattgtatacctgtaactggaaaaaattctgatcctgatcagtattagaatcaaacttgtcagaacttttaccggatgaagctaccctaaagctaagagaatcacatgctgtgtttgtctgcacacacaatgtaaaaaatatccacaaagatttagctaatgggaattacaagaagaggtaaaaaagaaagcagtgaaacatttatcttcacctgagaggatggaactggatcctgtgttgaaatatctatcttcacctgagaggatgtaattggatcctgcgttgaaatatctatctttaactgggaaaaattctgatcctgatcagtattagaatcaaacttgtcagaacttttactggatgaagctaccctaaagctaagagaatcacatgctgtatttgtctgcacatacaatgtaaaaaatatccacaaaaattaagctaatgggaattacgagaagaggtaaaaaagaaagcagtgaaacatttatcttcacctgagtggatgtaactggatcttgtgttgaaatatctatcttcacctgagaggatgtaattggatcctgcgttgaaatatctatctttacccgagagggtgtaaccggatcctgtgtcaacatggagtcgtaagttcggggagtactgttgcactcggatgggcaaaggtccacatttgactgaaaataaataaattcagtacacgtgttagccttccaacatcatagatgctgcataaatggaaagcatgtttggtttttcttttaaactcttgtaatggcattccattgtaatgactactgcatcatttatatgaaaagtgattacactcaaatacctcatgaatcctcattgccattacttaaattgactctcttatccttatttaatactttttctcactaaactagggatcattttgtcaatttaccatttattccatgttcaatcaaacataacaatcaattcctattaccatttttattccattacattgctattacaattactattccatttcaccaaaccaaacaccactgatatgggagtgaactatttatatgaagaagcatgcagaacagagataagtatgtaaaaccttgtcaaaatcacaaatatcaggtctatttaacttcccactgtggttgacattagtccctgtttcaacaagagcaatttccacagacttctgcagggaagagttactgcatgactctgcacctcctagcttcttcttcagcacaacatatctagccttttcaaccttaaggttttcgttgagatgctgaatttcattttctgccacctaatcatggcaaaatagaatttaattaaatagttgaaattgcaaccatattcagatatcatatgattacaacccctaaattagatagtagacaaccttaactgattaccttcaacttttctttatactgcttcaaggtattccaaaaagctttagcaaaattttgccaaatctcacaatttctctctaagtcaacagagcttgacactaatggtgcacgatcagatatttctgatatgaagatttttgtgtcctctgttataaaaaagaaagatgatcaaaaagaaactctacaagtacataaacagaaaaacagaaccatgtaggttcaaagtaccttttccacaaccttccccagtggtgtgttggtcatcttcatcagtctttccttcttcgatctaaaagcaaacacaataaaaaggcaataaggaatcccaacattaggttcaatttaaaaccatgcagccaagtaaagtggaaaagaaacgcttaataccacaaagaatactattttgatattgtacaacctctacacagtaattaaactcaaattctgtttgccgtacaaaaaaaaaaactcaaattttgtgtttagtgtagaaaaatttaacatgcaagggaggaataaagtaccccacaagtatcagccccactgaatttcattctctttggcttcttatttttggacaaagcctgaaactgcctcttgttactgggaacatttggtggttcttcaacgttgtcaaacctatacaacaatgcaaagattaattccaaaacaaactaaataactcagggagcattcaggtttagagcctcaccttattctcattagaggagaagcttgccttaacaggtaagtggtatcaagataatcttcttcccccgacttgacagttaaaatctacaataaagccaagaataagatagtagctgataaaagaacatataagaaaaagtgaaatcttcagtgaactgatttgtgaagcagacagattagacaagctgttcatgaccaagttaaacagaggtatagggaaaagaaaatacataccaatgccatcctcttcttcccttccatataatctcgtaaatacctggtcaactgtccaggcacaaggtaaaggtgttagaattgtgacacaaggtcacacttttgtaacagcgttgtagaatcaaaagaattctaaaaaataataaaatataagataaaatgcaacccaatactggtaatgatttaactaaaatgtccccaaaaaaggtgaatagtatcttgaaatgtaccaatgagttttgaaagtgcttctgcaatggccgcttagggttcctttgatgctccaacaaagactaaaaacaaatgaaaaaacaagcaccatcggagtgagacaaccaatacacaatcgagcaacaaaacgtgaaagaaagtaaaagaagcttagaagttttataaagtcaacatcctgaaaagcaactgtatcatagcattacgagagctacataataagccaagataaggtaacatactcttaggcatgagccaaaaaccattgatgtattattgatgaaattactttcaagcaaccttgacccctgaaaaatgacaaacagaacaagcatttagaatcatatacaccttaatcgtatctaacaatttgagtataaccgcaaataagatataaacagagaaataatcatttcatgagaacaattcaattacataaactgaaaaatgacctgattgccagttttcttctctctttcagctccagcaagatcaactatacttaaaacagcactattggcttggtgctcatcttgcccttcaaattcactaccaacactacggatgttgataatgcactgcgaccgactaaatgaatgaaaaaaaggaaataaatgtataaatactggaaacgttgtaaataacttctcaaagcattcatttaacttaattgcctatatataacaaagtagtttaaaactttaaactttgagatcacataaaaggatattagctatttctcttcaaataattaagcaaatttttattgatggcaaaaactcgaataacttgtaatctggccaacaagtcattcctatgaaaagttgaaaactggtaaagaaaacgttcatgtcatgcatcaactgctaccttacttccattgtacatacagtaaaacaacctggtataaatacataacgtattcccatatatgcactctaaaaaagttcaaaactataaaaagattagattgttgcttcaatgcacctagactggctatttgtattggtcgtcgcagtgagacgattaacaattgcatgagctactaaggcttctgcttgtcttgcatcagtaacagttacctgttcaaccaaaacaaaaaagaagtacgtatacatgttatgtatttgtatactatacatcattaaagctccgcatccactaaaattggctaattaacctcttggagccctttaatggaagatttttgcatggttaaatcagctccacctccacccggcgataagtcaaacaatttctctcctttacgttccgattgtatttcaaatatggatatactaaatggtctgctaagaaaagaaatgatagtccattctgatcacattattcttcaagaaaattttgtcaattaacagtgttttctaaccaatttttacctccggagttcagaatccgtctccaatggaggcttaaatatctggcgaagcgtgcgtggtagaattccaggatccctaacgcttccaaaaacggtatgagtcttgccggagccgctaggccctagagtagcaagcataccacttttaccctttaaaaaatcctcgaccaaagggcttaccatcttctcatatacttcttcctatcaacagtcacgagaaattgcataaaggaatggaatgtcgatttatagatacatttacacaaaccaaataagttcttcaatttatcgctacagaaacaaacaaactacccaacctgagaagaatcgggagcaaagacgtgagaaaatccttcataaacttccgatttcactcgtttagcctcctgcaagttcatgggtggcgtgagcgtaaccgagtggcaatcattaactttgatgcagacttcgctagacttcttcttattcgtagttgcatctctggcagaggtcttcttcgcgggattttgaggccaagcatttttagctctagacttgggaaaatgatctttgtctgaactcgttgacgacaaaatgggtctgactctgagaaagaccctaagattttcagagattgagtcaactaatttgggtttagggttttcagaaacttccatggacaaaatttcttcggtcggaaaggatggaatttcttgtgccgtggatgaagaagaatgaggtggaacttggggaggttttgtgtcagtggtagcaggcctggcctttcgggatgggttccgacgaatcgtgaccgagtatggacatgttagaggactcttcgtctccatggcagaaaaccagtctcagtctcagtttctctctctcaaagaaaaaaggttctgttcttctgatatgaaattggcggagaaccagttttttgaaaaaccatcgaatgaatggggcaggcccggcccgtacagtgacggcccatcaacgttcatgagccttttacattgggaacttacaaaaatactgatttttggctcaatctttacaaaaactaccacacggcataaataacttttataggcctttttttttttcttttatattataaacacaaaaaaaaaatgaggtatctatcttccacacctacgaacaaaaccaccacagaaacaccagaacaatcgaaaaacaacttttaattctggtgagattgagaaaaaacaatgaaatcaacgttaaataaataatcatggcaaaacaactgtaaaacaatactaaaacaaagcaaacaaaagaaagaaaaaaaggatttaaaaaaactaacaatgttctgcacagctgcaatagcaattatatttgcaagcccaatcttaaaaaatcaggaaaaaaaactactaaaacaacacaaaaataaatgtaaaataataaagagatataaccacttagataaacataaaagaaccacacaccttaaaatctctattctagtgagctcgtcaaatgtatttttaggcgagccagaataaaaaaaaaaccacaaaataaccacagagaaggaagaagaaatgtattttatagcctccatcttccacactcacggataaaaccaccacagcaccacaagaacacccaaaaaataattattaattacagcgagatggagcaagaacagtaaaatcgacgtcaaaaaaattatggaaaacaaccataaaacaacactaaaataaataaataaaaaaacaaaagaacaaaaaaataattaaaaaaactaatcatcttctgcacaacctcaacacttgatacaatagagactatatttgtaagcccagttttagaaaatcagattaaaaaaaaaccaaactcttatcttttcaaaaaacatgactgaaaacttcaaaaactaaagaaaaataaaataaaaaaaaagatgaagaagaataacttaacaagaaataaaataagaacatggagagaaaactcaaaataaaaaacgtgagtgtatgggttttgaaaaaaaaaaaaaaaagagagaagcctatgaagaagaagatgatgaacatggaaagagagaatagaaaataggatgaacatggagaaagaacatgtatgttgtgggtctcatttttatcatcatcaattttaagtaaaaaaataagtatcaacatcaaaccttttatttaaaaagcttttgctttttaaaaatgaaaaaatgggcaaaatcttcaatacttttattttgattgcatttaaccctcaaaactaggaaactgttagcaatttacagtttccatccactttaggtgttaagtgccttactaaattgtccatgtgtacatctacgtggacacagtgtacacatggcacaattttattggtcaacttaaaatattatttaaaaattaaaaaaatataaataaaaaaatattttttttcttttcagctttttttttcttttaaaaaaataaaataaaaaatttgaaaataattaaacttaaaaataaatttagtttgagggtataaattgaaaatgataaaaccctaattagaaaccctaattttctttctctttcttcctcactcgacacccatcttctctctctacatttgtgtgccagccactggaacgacgggaccaccgtgctccgatcacccacgcctcgacaggaccacgaaacatcg

SEQ ID NO: 14819 - DNA, 4784 bp, Cannabis sativa
tttgtgcttggaaagttgttctctgtataataaagtttccttatgatttttattgtgttatttgagagtataccgagatacttgttaaagcgttctatgaaaaattggtattgaatgtgtagtcgatgagactttgagtgtttatggagtggctgcaatcataaatcctctgtttgttaagaagagaaatatatgactctttgagcttttcgatatggtatcactgttgagctttcttaaacttcctttatttggttctttttatttattcttaagcatatttttttctctttcatatcttcatggcaaagattgttgatgtttatggccctattcataggattcttgcattcaacttgaacctaaaagtgatctatttggtataaatgcatttcttatctgcatcaaaatctactcttaagggatacctagttcttgtcatttgtaaattctaatcaggatggagtggtttatgctactttgtaaaatcatgacctgtgtcttcaacatgttgacatacagtttgcgattctaatttattccttgaaatttgtggaagagctttgctggaaatgtaatggaagaaccacttttgctaatgtgatttttctaattttattttaataatatactatctaggtaggatggcaatggagagtcctatgagagtagtggaaagcagcagaggtacaaagtggccctcttcggaagataccaccacctttggatctccactaagaagtatggcagtagagaaattgggattatttatgaatgatcccagtctacaaaaacaccaagcagatttagtaccaaatcgaagtggtagtgctccaccaagtatggagggttcatttgcagccattaggagtctattgattgaacaaaatattagttggaattctagcttggataatttaaaaaacaaattgcgaaaattagagtctgaggaacaagtgcggtccgaccctgcttatctagcatattatttctctaacatgaacttgaatgtgaggcttcctcctcccattatttcaaaggaaaaccgtgacctgctgcttcacattcgtagctttaggaacaatttgaaatcgacttctacggatgacagcggcaatggatccttgcatctatcacaggagtcactttctactcataaggaagcggtagaggaggatagtttaccttcacaaggttcagaagatttagtagaaattattgctgcagatttgcttggaattgacggagtttcttcagcaagtcgtcataaaagtttggttgatctgatacaggtatagaatatagtgatattttagtttcttttcatgcacttttcgcatttgttaatcgctagctctcgccaggccaagactgttgagaatttctttttcactagctgttccttttttagcttatgaagctatgccttaagtattaaagactatattgtttctttgtaatgagtattagcttagattagatgttacatttaggtatttaataaagagaaatcttttgcacatgataaaactttcagctgtttactacatgaatgaaaaagaatttgtacttccatggctttccccaatcatatgtacatcccaattctttgaagaacaatcctttttttctttcacctcttcttttgtgctaatggattttctttttcaaaaataattttagaaacattgcttgcttttaattctttccaaagtcagtgagttttagaaaaaggtcattaaaggtctcctcatctgttagtgttaagttgtttacatctttgagtactaaggaaggatgatttaactcgatgattcttatatcatgtattcttcaagatatttagatattgtaacatttaagcaattatactgtagaagtgtttattgaagcttgtgtgctagactagctgaagcctagacagatatttcattaatatattgaatacaatagctgacacgacgacctttctttgtttgccctgatgaaacagttttaatatatattgtctgattataaaatattattggcatattacacattatttaattagtttaaggatttaagaaaacaaagagtcactggaaaaaccatattagaatgtagaagcgtacatccaaacaaacaaaaaaaaaaaaaataaacttaattgtctgagatctttaaccaccttctggctttcccagtcaaagtcagtaccattagattgtgaggggggacttgagaaagactgatgcatagctttggtaacttgggtgttagtatgtggtcattagtatgccatatttggacaagttctctttagagtgtatgtggggtaggtgattgtataagatgtagtctagagttgttcgattcagtgtttttctcaatttcaattttgtgttcatgcttactttcactttgttggttgtaggaggacttccctcgcacgccatctcctgtgtataatcaaactcgttcctcaagccatgcaacaacagacgaaccagttgataagatattggaacctaattcaagcaatattgattcttctgagataaaatatccagattcacatgccagtatgttgacatccacggatggttctttgtctgttcctcttcgaagctcgttgcattctgatgaaacaggaagtttgcaacaagatgaaactaatgataagtatgttagtttagatgatactgcatcagctagtggaatatttcagttggccacttccagaattgagtcaaaaactaatttaaagactgaactccatcaagaggagcaacgttcttatataaagaatgtcgcaaaagtgcctttgtctgggcaacaaggcagctcaaatcagcttcaggggttccaaggtcaatggatttctcaaggaatgaataattttggtacttatatggaaaaaggaccctgtagtcatcccaacttccctgttgagatgcagccatctttgcacgcacctggatatacacctcctttgtatgcaacggcagcaacatatatggcttcaggaaatccattttatactaatatgcagcagtccaatttatacgctcaacagtataatttacctggatatgccatgggttctacacttcttcagccattaatggctgggtatccttctcatggtgcacttccagtgccatttggtgctacttctagtccaagattcattggtcaaactggcaatgttcaaacaggacacggtattcctcatgtgagtgatttgcaacacccaagtgaattttatgggcggcttggttcaatgccgcaaccttcttttgtgaatcctcttcatatgcaatactatccatcctcggtgcatgacttgtatggtagttcagttcaacatggtcagttggacccaaggggtataactagtagtccatttacacaacaagactcctctttctctagttacataggtgatcagaagttccactctccaacacatggaagcatgagcatctctccaagaaaaattgaaattagtggtaatggaaagtttcctttcatgggtgtcatgacacaatttccaacctctcctcttgctagtccaataataccatcatctccagttggtggagcaaatcattttggtcgacatactgaaatgaggtttccacaaggttcaatcagaaaccctggaatatatcctggatttcaaggaaaaagaggctttcaatgtgctgatgatcagaagaagttatcttttctggaagaattaaaatcaagcaattctcccaaacttggactctctgatatggaaggacgcattcttgagttcaggtatgtcctgtgtttgcttgatctcaaaatataattgacaatctcctgtatggaaaaataatttctcacttgtgtttaacttcagtattgatcaacatgggagtcggtttattcagcagaagcttgaacattgcagtgctgaagagaaagcatctgtcttcaaagaagttgttccatacgcttcaaagttaatgactgatgtttttggaaactatgttattcaaaaagtattgattccaaatctttccttatttttatttagctataacgctagactagtgatctccacagatgttttaaaaaaatcattttgacttttgacttattgtttcagttttttgagcttggaagtcctgagcaaagaaaggagatagcaaatcaactttctggacagatgctaactttgagtttgcagatgtatggttgtcgtgtgatccagaaggtatgttaaattttaaaatgcttatgtgaaactaaagatatatatcataaagttccagcgcatgctgatatatcctatgcctatttttttttttaaaagatcgtgcttatcttgtgttagccagatgtgctctttttgattgtatatttatacatatattttggtctgattgatataatttgctaatgtcttagttactcatgtggcatgagaagattaggtttcaccaggttttggtgttttgaatttcttttgttaccccttttccaagactcttgttaggatacgacattggccaagtatgtgattggttagtagtatataactacttgggcatcctcatctcttagagtagcttttgagagtgagttctacctaagtagttgtatcaagtggtattagagccatgcaccctcgagtgggaccgatgtcgcggaaggggcgacttgtggattaggcccagagtaggccactgtagagtgggccgccgtggacgtcggctccaaaggggggggtaacgttaggatcctacattggcaaagtatgagattgg

SEQ ID NO: 14820 - DNA, 2991 bp, Cannabis sativa
ttttacagcaaaaattttagaattgggggttaattgcaaaaacctgaccacttaaggaggttatgccgcaaataactcttaaatatgtggtgcattaataacttataatgtatcatatatgcggtgcattaatactacactcattcatgattaatattatgcattatataagagtgcatccatatatttatttgtgtatttttagtttatacatatttatttataagttgataaatgttataaaaattaaacttttatctacttttactttaatgtaacgtgtttataaatggaagcttttaatttaatattttcaatattttataagtattgggttctttgtgttgattgaagagtatacaaatgtagctatttttattggggaaagatataatcacttaaactttaaaaaattttatttagtggagtttgaatatgttagatattcatccatagtgaagtaggttttgtgattaattgtactattaaaaaacttcgaattcccgtcggtttacaccgtcgagtgaagaatgccgacagctcataaaactgtcgcctatacgagcgtcgcaaatgctgggtatagaatagaagacagttgaaaacaattggggaaatagtatgggccagggtttaaaactgtcgcgtatagttaacactataagcgacggtttaaaactatgacttatatatataggctacagttttaaatcgtcgcctatagtaaagttttcagtttaattataaattttgtatttttcagccacgatttttgccagtcattttgttataaaaaaaaaattaaaaaaataaaaattttttgctatttttctcttatattaattaactttactaatttatacaatgtcactaattagttatggtaaaatataaacataaatttaaaatgaacagaaactgaaatatatacaaactatgtactctaactttattagttattctaactttaattattagttatttgaaagtaactggttatagtgtaaagtataaacaaaaacaaaaattaatcatcgtaataaattttgttgcactgcctgtgctcggacatattcaatccactgatcacgcaagagattcatctcgtcatttgagtacggatttctcttaccctggaaaacaaaatagaaaaaaattatatattaattagtaaaagattttgtacactattgaaatcgagtagttcaatttactcatttgtttataatatatatttatataagtatgtttctaatgtttaaaattttaccaaaattgaggttgagtagaaccttcaaagaattataaactctagaaagtgtttgttcttgactattggaggctagtagtactactagaatttatttatttcaagatacaccctacttttccatatatatagttacattagaaagtcctacttatcatgaaaaacaaaactctcataattctgaaccagaaattatatagtttcccattataaaaataataataatgaatgggatataggacgattaaatgtgaatgtgattgtctgtatttgtcatgatcatgtacttgacaagaacaagttgttaagaaataaaaaaaaaaaatgataattaaattaacaaaatgtattcaggaaaaccaataggtgaagcttctaaagaaaacattcaactatagtgtactcgacaagaacaagttgtcatgaaatgggaaactacatacaataactttttcttttctttccattttcacataattgtttaaatccttaaatttttgttgttgtgattttcgtttatgtagctgttctaagtttttatttttggtgtgtattacaaaatgcaagattttaattggactggttgaagagggcatggagtgagaaaatggtcctacattactcagatgctacctggaaaaattggcaagcagtatagagagagatggcataattatcttcggcctgacatatttagatttttagcttcttgtctttaattgaaatactttttaagtttttgtttaattagtttgaaaataatgttgttttccccaaattttaagaacagaaagtatataataagttattaatatttactcactagtttttgttaaaccactattctttcactctttttcataatctacaatgaaatcaattctttaactatgtgttcatagtggcataaacataaatgataccaatagtcgaatagtagaagcaaccatacacctcagccaataagagctatgcatctacatcttgtatatattttgatctcactatcaggggttttaacataatcaacacaatattttgtaaaactacaatattttttactcaaattcataaccaatttttttttttttacaagtactaaaaacataaatgaactcaatggcagaagaaataataaacctcacaagcaataagagttccgcaacataatctattcgataattttttgttaaactaccttattctttcacactcatttgcctgatcaataataaaatcaacaaaaatcacatcaaaataaaatgaatagttctgttaagataacaagccttacactaagatcgcgtagtgtagttatttgatcatcctacattaaaagtctgataaaagaactaagccaattatgttgttaaaaccaatatacataacccatttaaaacttggtagctatacatttttcaattatgctataaatcaagaattattttgtatatagtgaagaaaggcagatatgatgctcagctcaaatgagactgagggcagaggatttcatttataggcaggggagcataacggctccaatgattacacagaaaacaatgtgccagctggcactacaccaaataacagaaaagggaaaaaataacaaaggacaaaagaggctaacagaaaatggaatctcctagaatgatggaatactaagacagtgattataattagaagtaatcagatattaggcataatactaatctgtcttgaca

SEQ ID NO: 14821 - DNA, 4330 bp, Cannabis sativa
aaattcctcgttaaagataattgctccaaacaataaatgtaagtgtggctaaaaatacatatggtgcatacctactaatcacatcttcatttgaatgaagttctgcaacttcagagatcagttctacagcaacatcactgctgtttgatgtaattcctctctcttcttcgcaatttgtggaggaggcatcagaagcaatctagacacatgaagaataagctattgagtttctcactaccctcaaggccatttagaaaactgccaactttaggtgaacaccagccttgtgggaaaagaatgctaaaaatgtcttgaatatatataagcacaaccacagcagcatttagaaaagaaatagaaggatattctgaattcaaaatgcaacagcaaccagtacagccccagggtgaaaaaagaaaaagaaaatgccaagattccttcacctcaaccttcctccagtccactccagcctcaatcttttttgaactatttggagtcaaaagttcaagtgccatcagctatggaacactacagagaagtggacaaagcagcacatccaaagaaacaatacagatacatgcagtgtattcatccagggaaagtattacttaaaatgaggaatacacaaaccaacatgtacatttgcatgtgtgtgtgtgtgcgtttatcttttataatgtattataatttcaccatgcattattctagaagagcagaagccataatgttatatgcaaagagagaaactgaaagtaatcaatgccttatactcttctaaaagaaagaggggttttgtagataggtatgccaaaataataaatcaaataatatgaacagttatctagtggagatttggagaaccatggcatatacaagctacctaaaaactttttgtagtgaacaaaggcagacaccataacaaaagccaaaattaaagaagttggatctacaagttattctctacctttcaaaagagagacccaaggttatacataaaacagcacacaacacaatgaaataagcactagtatttataaattgagacttacggctaatgaagtttctgtttccttttctccaacattctcattcaatacactcagactcctttcctcatccaaagatgtttgggcctgtactgcagaagacacaatcgttgcctcaagcagattaccaccatctccaccaatagtctgctgataagcaacttgaacttcaacttcaacatcagcactctgctcattacttgcagaagtataatgatcatcaaatacctctgttgtgttgtcaacaacttcaacatcagtcctctcctcattacttgcaggagaagtatgatgatcattagatacttttgctgtggtgtcaagtttggaagatgccgacccatttgacacttcattctcacaaatttgtgttgtattctcctcaatgtggctatgcacttcctctttcagaacatcaacttgaggaacattatttctagccccaacaacgtcctcatcatcggatacatcatctgctgtgtcaagtttggaagatgtcagcccatttaaaacttcatcctcacaaatttgtggtgtattctcctcaatgtggctatgaacttcctctttaagaacatcaacttggggaaccgtatttctatctccaacaacgtcttcatcatcagatacctctgttgtggtgtcaagttccgatgatggaagcccatttaaaacttcatcctcacaaattatggttgtattatcctcaatgtggctatgcactttaacttcatcttcacaaatttgtgttgtattctcttcagtgtggctatgcacttgctcattcagaacatcaacttgagatacagtttttctagctccaacaatgtcctcatcattgttaagagacgcttcatctacactatacaaatcagaagataccaacccatgtaacactttatcctcactaatttgtacagtattctcctcacctttactatgtatttcttcattgagaacatcaccattaatagaaacttcatctacaccagatgattcagtagtttcaatctcatatgttgtttctcccaccaatgatttactgagtcctgatacaccagatgattcagtagtttcaatctcagatgtcgtttctcccaccaatgatttactcagtcctgaaacaccagatgattcagtagtttcaatctcaaatgttgtttctgatacaccgttacatacagactctactacactaaaatcttcactgacttctctgcttacttcggcagggtagcttctttctcttacttcagaatgagattgcacttgttctaaactactttgaggccccaaattctcactcaatttttcaccattttcatttaccaaaccttcagtgtcagcatcatcgccatcaacgataaccttatcagtatccacgcccgaaactgatgtttcatcgtctttagcaattccaaaacgaaatacaacgcttccgtcagaacactctgtccaaaccaccatttccagaaactccatttagaaaaataaaactactaaatacagtcatacaaagtcgaaatgataactttccctgagaaacaaacagaaaaactacaacggaaaaaagaaaaaaaaaaaaataccaccgtacctgccgttgaaacgatgccgaagtccggttccgacttggagagaattctaaaccttgtccgctgtttccgggttcgaattacagccgattttcccgcaacattggtgtgatggtgagaagttctggggaagagaatgcgaggatggaggaagagagagctcagaggctggcaagctctaatagggttagagcaaaattcagccattttcgtttctctattccttttcattcatcttaattttcttttgctttttctggtaatataaacgataacataacaaaagaataaaaatcgtattttgtttttttgtctgaaaaagatctagtttggctttttagctttggccggagagtgattccgtatccaagaaagtttaatttccgatatctgccatggattccggtgggaagagtccgattccggttatagacggaatcataaaattccatctaataattctatgctttcctggtatagtgaagtgagtgctttgagttcttagcaaattactagcagttaaatttttttttacagtttctttcaattatacctgtgtgggctgttataatgtcaaaattaccctgaaccaaattcctttgccgttaaaattgtggtgagcatgtttattacagtatcggcttacactaatgaccactaatcttatctcaaagaaaaaaatgaccaaattttactttggcctaaagtgatatgttaaaagatatttctgactacaaattaaattatcattctaagttacctagcaaaaaaatcaaaagaagtctgtacttttatatgtatgactcaaccacttgaaggtggttccttttcgaaaaaaaattaaccaaggtaatttgattttgtatcactgaaaaattgttcatcgatgaatcaaactttaatttacatacaaatatagttaatttgatttggtttgattcaaaattgttgatgggtcaatcaaactataatttgcatccaaatacagttaagttgctacttggggaatgagattgtctcttcttatatttgcaagaactgatgctatatatggcagacttgtcttctcttttgtaaagttctgagcattggtatgtaacatcttcgagtccaacagtaaaattagtgtggttcatacatttgaataaataagattccaaattaatttatattaatacactaatattacaaaagatttagaaaggagctcattgatggcaaacaacaaaataataaaaaaaatgtttttctttttttttgagatcacaagctcttttcttcattaaatgtagaagacatagtagattaatcgaactaaagattcatttttggcaaaaagaaataaatcaaatatagatagggaaaacatggatagacatggaacctatcaatttaggccaatatggacaatgttgtgggccttacttggtttggtatatccgaatccttatatttactaataaattctactttcaaataatgaccattttataatatgtatttagaaaacatataaaggagtaaatattgcacaacttgatttatacatcaattttcatttattttctattccccattattaataacaaaactctcttctttttagagataattacaaatctatgtgaaggtgatcataaatacaacataatagtattacatctctcaaatttttaaaaaaaaaaaaaa

SEQ ID NO: 14822 - DNA, 3903 bp, Cannabis sativa
tgatagagatgcagcttatccaagtctttcatttgtaaatagcaaggcaagagacacaccaattaagaatcagaatgttggtgatcctacatatatccctgcatttaaatgccatcttggacaacaacatgttaagttagaggtcagttattattttcttgtttttgtctgtgtaattttaaccaaaatatttcccaatgtgtttaagcatttaattatttcccctgcctcggtttcataattgaactttgatttgaattagcttcctactggtacctccttttatgggactggagaggttggtgggcaacttgagcgtacaggaaaaaaggttagtagttgtatgaatgatgcatttgcaggataatctcctagcttctatttggtaaatatgtttctattttcaggtctttacatggaatacagatgcatggggttatggggctggaacgacatccttgtatcaatcacatccttgggtgctggctgttcttcctacaggagaggccctaggaattcttgctgacacaacacggcgctgtgaggtgctgaaatttcacattaagctgtacatggaatttaattagctaactactaaaaaaaccacgcgaacttagttttgtttatttttgtcaaatgcagattgatttgagaaacgagtcaataatacagtttattgcttcatccccatatccagttattacatttggtccatttgcctcaccaaatgccgtgttgatatcattatcacatgcaattggtaaatactaaatttaattttcttatcttgcattttgtttttaaatatgttatacatagatatactaagtcacctattcatattgtaatatcttttccaaacccatctttttactgatataatgtaacgtgctgttactggttcatcatcatctataatgttggcattatctcttttattttattttatatttttgtgtaagtttatatttttacactatttgaggatgtcctgaccaggaaccgtgtttatgccacctaagtgggcattagggtaccatcaatgccgctggagctacgagtcagagagtagagttcgtgaggtatatgctttgatgttttttaaaagtaaaattaaattttctctttttctctcttactttctgactaagcggtttgtgccaggaattcacaaacatttatttattgcctttagtgatctgtacatttatgagtgtcaagtagtacaatattttgacctccaatcagaaaactaaactcttgttattcccaatggagaggaagttcaaattttgaagtctattgtttttcatttcattattattgattgtcctggttttgcagttaacgagaacatttcgagagaagggtatcccttgtgatgtcatttggatggacatagattacatggatggttttcgttgtttcacttttgataaggcatgttctcctataaatgctatttgcagatagtattttattttactgtaaactcacttatacatattggtttcctagctaaaaaaatttgttagtctagttctattttatgtaattttgataatataatttataaattctgatatgatctaatgcacagtttagaatgaaaaattgtttgcttattcagctctaaaagtgctacttatgctgatatgagtactatttgtaactgttatctgatgatgtacttgatactattctaaccaggaacattcttatgctgaaactttcaggagcgctttccagatcctaattctttggtaaaagatattcacgacaatggtttcaaagcaatttggatgctcgaccctgggatcaagcaggaagatggttattctgtctatgaaagtggctctaaggatgatgtatggattaagaaacaagatggaagtcctttcataggtatattctcttcatattaagaatagtatttggttttaatgttacaagaagtgatttcctccatttgttttggaagaatttttacattgttttaattgtcttcatttatgattttttttccttttcattttgataaaataattgaaaggaattatttcagaaaaatctgcttagacaagatatgcagtatttccatgatggaagacttgttgatgagtttcatataaacttaatgagtgtttcaggggaggtttggccaggaccttgtgttttcccagactatacacaggagaaagtgcgtatgtggtgggccaatttagttaaagatttcatttccaatggtgttgatggtatatggaatgatatgaatgaacctgctgtctttaaggtagctgcaaatttctttgaaattgcaattttaaattccttgcatggtcttgaatcttgatacatttttttgttcttttatttttcaggttgttacaaaaacaatgcccgagagcaatgttcataggggtgatgatgaacttgggggttctcagagtcattctcattatcacaatgtaatatttatttcaaatctatcagggggtttagacaataaatgcttctagttattttctgttattcatagtttatttatttaggttgggtcctactcaaatcttgtccataatcatctttgacacttatttttgactgtttatcgtataattgctgtataaattactattgtactaaataaattatctctaaattttatccttggaaaatgctaaaaatgtaggtgtatggaatgcttatggcaaggtctactaatgaaggtatgaaattggctaatccaaacaagcggccttttgtcctcacaagagctgggtttattggtagtcagagatatgctgccacatggacaggagacaatctgtcaaattgggagcacctacatatgagtgtttcaatggttcttcaattggtacacaatatttagtctacattgtcatttaataataataacagtaatgatatttttcaaaataaaataatgataataataataataaagaaattcatgaaaaagaaaaaaaaggttccaaagcgtcactctttaataattattttctcttttgtagtatcatgtttaaatgaagagatgtagctaattttgttttggaatttagttgtctatatcctccttaaaaccaacatccacaatggccactctacggtgggccactttgcaatggccccttctgggctttcactatacatggctgtttatcgtagattgctcttccacaatgtaggtcctactagagagtgttcgcttttatacatttgttacaatcactttttaagaatcactcccggaagactagcctttgagtggacagtacccaatcagtaccaaccaatctcatagttagtcaatgtggaatgctaacaatgcacatgctttaagccaacatccatggtggggttcataactacttggacactcttctcataggctagtttttttgaagttgtactcaaatatttgtaaaggtaggatcagagtcagcgccttctagtaatagtaactaacattgtggaaaaagcgatctgtggaaaagcccaaaatagttcgccatagagtgggctgccatggacgttgtctttaaaagggagtgtatcattaagattccacatcaactatgtaatttgttggtgatgtacaattacttcagcatcctgctctcattgttgaggagtgagtgctacccaagtggttgtagcacacattcatgccctgaattatttcgattatatttacaacttgcattagatatcatcagtaatgctttccataatgtacaatattttatagttatttctgttggatgattcttgttgtaatttaatttattgaactttttacctttttatttttctttcttggtgtgtgtgtgtagggttatgccagattatgtcacgttttttatagttgaaaaatcaaag

SEQ ID NO: 14823 - DNA, 8575 bp, Cannabis sativa
  modified_base (3074)..(3081): a, c, t, g, unknown or other
  modified_base (3285)..(3288): a, c, t, g, unknown or other
tagccttccctgcaaagacaatcagtatgagccatggttggttaattcaaataatcccaatggaaccctttacttgattcattcctattaatattcatacaaagtcaactactgtcaatggcactttctttcctcaaaagtttatatttttccattatcacactccagtcacccaagtaaaactgccctatgttttataactgagaaaaacaatttcaatggagaacacatgatgttaacagcaaactctcttcaaattacagtttagcatttcttttaatcatcttccattcctccctagcctctccttttcattacccataaaatatagaaaagaaacatcacaaatatggttaagacttcctttcctacaactgacaaaatagtgtgccttaacagcataacggtgtaaaggatggtccttatgatgtaaattaggttaggctagactcaatcccaaaattaatccaaaaagaaaataggcattacctaacttaacattcttttttgtcatgaagtacaaggaagctccaaagctacccgccaaaattaatccaggaacatcagcctcagaatatggcatgccagaggatgtggtggctccattaacataagttaagaccatcaaagctccataaacacctgcctttaggcctaactcactccttgatggagtctctaccgaaacaggcgatttcttcacagaagtctgcagccattgaggcattgatcccattcctgaagcacttacaggcttaacatcagcatagcgaatgttactacttacaacctttcccgctcgcctctgagttaagctcctcatgagcaacatgtcatatgcagcttccacctaaatggcatttcaacataaccatgtggaatcaataaaggtttccaaaacaataaaataaagaattccatcaaaataaaatatatattactagaacaattccgatccatattgatagatatacactcagatcgtaaataggctaagcaacaaaattagactaaaaaaatcatttttgttatccatggcaaattcattgcagggacattaatgctaagataataagacccaataaaataatgtttgcaaccatgtagattctgagataatatatatatatataaatataaatatatacaaacaaaacactattttttcacttttccaaagttatatttttttgtattgatttttctgccctgtaaacaaattttcaagaagtgcctgtatcaaaaatttgaactttaactgactaaactaattatttccagttatttttcttaaattggaaaaaaagaaaacccattcaaacttcaaaacaataataatatttttcctgaaattgtgaagttaaatcctttttcaatcagcatcctcaaacaaatttctaaacccaacaacgaaataaacaaataaattaaagaaaagaagaaaacctgtgcaattgcgtccttgtcatccttacaagaggctacgatcgagttcttggcgcgaagtatatcatcgaacgaatcgccatcggagactccaaggagtttcaacgcgttctctaccgacatctcgaacggcgcagagtcatcggctctggagccggctcggactagcgtagacgttctggctaatgcacccccacgggtcgactcgattgagccgctccaaagctcgaatttgttggtcagtaactttcgaaggtaagccggtccggttcgtcttaccggtggccggttgtatggataaccgccagttatgcggttgggccggacggagagagtggctgccattatttccagagaccaaagaaacgtgaggctgatttttgagcaaacccaaagctccgaatctcactaccttttatataaattaaaaaataatttacgtttaaatttttaaatttattattattttttttttttgcaatgatttttaaatttaatttttaattatatataaatatataagtttaatttttttttataataataatatttaaattatagttttataatttttgtaattactaaaatgtcaaacacggttttcaatttgtttaaattattatttaaaaattaatttaaacatactaataaaaaaaattactatttaacacttattaattacgtacttagttatagaattatagtttagttattattatcgtaaaaatttatatttaagtatttatttataacatatagttcaatttaaatatttatactgtaaattatttaaaattaaattaaattaattttacttaataaactaattttttatttttcatcatttttaattatttacttgatgaaaaataaaaaataaaaaacggtaagctatgaatattagaattttatatatttatttttgtaataatgtttgttgattgagccgtggagtactctaccttatttatccaccgttagatgaatggaaaatgatggtaatcggtaagattagtgataattatttagagagatgttattggtgatatttaatattttattttatttattttattttaataaaaaatttaaaaaactattaactaattaaaaagagtcatttaaaaatgcacgcaaagccctaattagcggggagttcctctcatctctatccctgcttattccccaacgagaatagggtgaggacaaggtgagaatctcctaatataaaaataaaatttattttaaaaatttatatttatacaataataaattgcataaaaattaaaatattatatattgtttattattcaatatactaattaaaattttactaattattgtataaatcacaacttaaaaaatttataacactggtatatttaaaaaaaacagacacatattattaaatataaaatattattaaaaataattaaaatattaagcggatcctcgttggggcaggcaatgtcatctctattcatgtctcgtttaataattttagattaaaaagcaatcacaaattaattaagatgttattgtataaataaaagtaggcaatatctatataattatgaataatattattttgtaacatggaaaaaagggtaagttgaaaaataccactnnnnnnnntcaattaatcaaatttacctctaattttatatttatttgaaaaatacctctttttatgtgtattgtacccaaaataccctgacataagaaagtcacatagagagtatcttgaagtgacaggggtaaaattgatatagtgtttaaaaaaagaggtaaaaatgatagactttaaaaaagaatgtaaaaataaaagaggacaatatnnnnaaagtatagagtgtaatttcctctgaaaaaaatatatttcagcaaagaaagtacaccttattttggaatttatattgtgcttctattgtttttttctcttttttcttttgaaaatttcgaatcttataaaataatttagataacatattttctttatttaacaaagttaatagagtattttatttaataaatttcaattacactcgtaatatttatccaattactctacattgttttaaaatctaaatgtataaattctatttttcttttcttctttcaaataattaaataaagagctttcaaaagttaggcataaattaatagtattataattttcttcctaaagaaaaatatcattatttttttttttgcaaggaaaaatattataaattctaatctctttgtgacaagtgtattagaaactttattatttattagattgagagtcaattaacaaaacttaaaaaatagttatgtggtgtgtttatgagtatgcttacattaaagtgatatgatctaattaattattattgttagaaagcatattatattatgattattattgcttatgattgtgaagttaaccaaatatagtatactatatataaatgtatgtacatacacgcactagctaaaagattattataactaaataaacaccacaattattaatgtacttaatttaaagacatgttagaatatatatattttttttcatgttaatgtttattatagttataattttatttttatacatttttaaaaaatttagaataatttacattatcaacaacaaaatttctaatattctaatttagtatgtataaaatttataaaaataatattataattataatgaacataaaaaaaaaattattttcaaatatgtgttcttgataaaaattgtaattataagttatttacattttttgttttttatttatgtttaataaaagaaaaatcactgttattttttttataaaaagtacaattttgtattgaaagtttttttatatatatttctacgttattttataaaaatatatataaaaaaaacaataaaattatatcaaaataacaagaaaataacactaaaatagtatatatctcaaaaaaaaaaaaacactaaaatagtataaaataatatacaaataataaaaaaaattaacaataaaataattaaagtacaatttaaaaatacattaaaaaccgtattttatataaataaatattaaaaattctatacaattctatttttttgaattatttttttatttttaatatatatgtacatacgagtatttttggttgtccagtaatataatatgtgacactgattggtttgggggaccattatattggtataactggacggtcaagatcaaaatgaaacatttctataagccgttagatttgacacacctaatacatacaacaccatgaaaagacatatttagtagtgttcaagccattgacgtgcagctttcatggccagaatttcccaaaaagaaaacctcaaattatttattattattattatttagagtttttgtcaattaaagtttctcaattgtgtttaatcttccaaatttaaattttgataataattttttttaaattaaatgtcatttaatatatacattacgtttatattaatacatctaatatttttttttcaaaaatataaatgtgcaataaaaatatacatataaacaattcatcttatcagttcattctaaaaagtagataattgtgaatgaattattattattgttattattattattataattattttgatattttaaaattattggttttctttataaaatcttcaatgtaaatataaatacatatgaatgaaccaaataggtgaccgtttaaagtcgttacttttacacaatgtctttagtaaccaattggagactcactgttacagtgccactcccacaaaccctgaaatctttctaccccagatatggaacccgggttcgttgtgtggctggagaagctttgccagaccacattaatggagggtcaaatgagaaaaagaagaagaagaaggtagttgttgttgggtctggttgggctggactaggagccgctcaccatctctgtaaccaggtaataattacagttcttggttaattagtttcgaactctatctgtttgatatttagtctcgctgaaagtttgagttttttttttggatttttatttcaggggtttgatgttactgttcttgatggagataatggttttggtggtcttgaagatgttggtattcgaggtaaggaagctttcaaggcttgaataattacttttactcaattgggattttgataaagaatagtgagtgtgagataatttacattttttgggagttaggatattggaatccgtacagaaacatttatagccttgttgatgagttgggtatcaaaccattcaccaactggacaaaatcagctcaatattcggaggagggacttgaggtagcatagagcttagttgcttttaataagagaacttaagttttcttcccaccattaaaacataaatgattttatgattgagttgaagcttagaatgagaggttggtcatgaattttcaggttgagtttccaatattccaagacctgcctcagctacctactcccttaggcaccttactctatacccaagtatgttttgcttcaatccttttgattcttgtctttgtatttctcttgcaattgcaaattcagcattgttgatctgattaagaaaatcaaagtatttccagtgtttatagcttgagtatctctgtcacttgtgttactcaataatcactgcctgttttgcagtttcttcagctcccattggcagatcgattaacttcacttcctttcatggcagcaggtatgtagcctactaagtccaaaattctgatactgaaagattgaccaaagagactttttcattataggcagagacatttactaacatatagcttttctctatttcagctattgactttgacaacacagatacagcatggagaaaatatgattccagtaaggatttttattgcagtatcataacttttaatcaatagattgaataaaccaaagatgaattgttgggatttcttatttagagatttgattggtagttaccgcgagggagcttttcaagcaatttggctgctcggaaaggttctataagaaagtgattgggccattgcttcatgtcggtctgtttgctccagcagagcaatgtagtgctgctgcaactctgggaatgctgtactacatcatccttgctcaccaggtttgatgagttcagttccttttctagatttttcataaagtcccatttgaatatgaatatttactttttggtggatgtagaaagattttgatgcggtgtggtgtcgtgggactgttagagaaaagatttttgaaccgtggattgactccatgaaagcaaaaggatgtgaatttgcagagggtagaaaagtaactgatttttccctcagtgaagaaacaggctgtgtttcagcagtaacttgtggtaaagaaatatatgatgctgatgcagttattttagctgttggcatctctacacttcaagatcttattaagaacaggtgtgttgtgttttgtttctctttcgattgttgcattgtatgcggctgacaccctttacagtttcatatttgttctagctataagccaatgctaactgtggaagaactatatgtatagtgcagtgatgtgtacaagagaggaatttctcaagattttgaacttaaattccattgatgtactaagtgtcaaactttggcttgataaaaaggtgagtttttcttgatagagaaaaaatgtctgaaataactagaaatcaatcacaaatgatctgcattattatttaagatttttgccatgcttcttgaatttttctaaccgttaaaaatttccttaaattgttgagatttttagatttaaaaacttttgtctaatttcattcaattttactaattcagttattgtttatgtactaaatcatactccccaaactttgatatctacaaattatgtactctgaactttcaactacgttagatttttcttactaaaattagacaaaagtccttaaattcaacaatatcaatattgcaggaggaattttgaacgactttaaaagttcaagagacatgatttagtacatattaaagttcgaggagcaaaaatcctaattagccttgttattttaagccttattgtggtgaaagtgtttaagtgtttctctaactaggtacaaagaacaatgctcattactttacaggtaaatattccatatgcaagcaatgcctgctctggattcgatgcttcatttggatggaccttttttcacttgaatgcaattcaagacgagtttaaagacaatccagtctcggtaatacaggctgattttgtgagtatcgaaacctttccaatcctaaagaaattctttcaggcttattatatagaaatatacaccttatggcttatactttcttctatcaaatgtattttgggtgctgcagtaccatgccaatgagttattgccgctgaaggatgagtttatagtttcaaaagctatgtcttacctcacaaacataatcaatggcttggagaattgtacaattacagagaaagagattaaaagatttccaaaatccttgccacacttctttcctggtattcctttctataagactattcttttcaaacatatacttacattcataatgtacccttatattatgtttggtaggaaagatttttaggtgggaggagagaataaatcatgtgtttggtagagaggaaagatagaaggatacattttcccttcaaatgtacaaaatctaaatgacaaaataaagtatatcaaatgtcctaaatacccttcataacaaataaataataagctaattaggattttcgcccccagaactttgacatgcactaaatcatgtcccttgaatttttaaggctaaggaaagtctaatatggatgaaagttcagggggtatgatttggtacatgtcaaagtttgagaggcatgatttagcgcacaaacaatcaccgaattagtaaaactaaataaaattggacaaaaaactttaaatccaacaatctcaatagctcaaacgaaattttaacagaaaaaaaagttcagtaatgggagacttgttatcctttccttccatcatccactcgtctttcttaaactctccatccttcctaatttccttccctctc

SEQ ID NO: 14824 - DNA, 1365 bp, Cannabis sativa
atcagagcggtaacaattcatgggaccgaagaaggattcgatggtggaattcaggggagaaaaggtctctgaatttcgtggggaggttcagtaggtatcgcatggtttgacgaagatacaagaggagtttcagggggctatcgctaagattgtcgccaagcaattggaaccagtcgtgaatcagatctcccaactcactcaactactcttacctccagggaagacattgccggcagctgcagcggttagtgcagatcggtttcgacgagccacagaggggaatgggtcgtcggtgggggaacccaattcggcaggagctccaacaactcctccaccactgattgtgcaatcaacagggatttctcattctctgtttgcaccgacaacgacaccgattcaactgggatcattttcgccaacacagtcgcacggtcaggatttcaagccaccgagaatggaaatacccctgttcaacggcaataaccccgacggatggatttatcgcatcgagaaatactttctactgacgaagatgaccgaatctatgatgttagatacaacagtggtgggtctcgatggagacgctctctcttggttccaatggcaaaatcagcggcgacccattacgtcatgggcgatggtcaagcatctggttctccttcattttcgagcagtacccgtgggatcgatctcggaggaatttttatcgataactcagacaagcaccgtgaaggattatcgtgttcattgggaagtgttagcttctcgggtcaccgatgtaccagatcacatcctggaaggtaattttgtaaaagggcttaaagaagaaattaaagctatcctccatattctacaacccaaaggcctcgcccagattatggaaacagcccaacgaattgaagagggtcattatttaatgggcccgacttcaaaacccagtacccacaaatcgtttttgagccctattttgcctacccgacctaactacaatccttttactacacgttctcaatattcaacaacatctaccaaacctcagaattactcgtccccttccatggcaacgacaacctccaaggctggcagtagctgaccgaacaccatgaactcctataaacgattgacggaggtagagtaccaggacaaacgatcccgtgggctgtgttttaaatgttataagaagttccaccccggccatgaatgtgagcataagctgctgcagattatacttaccaatgacgaagaggagtccgacagccccgatgagaacctgcccctatccccagactccggtgatactattgtcatttaatttaattattaattagacatataaagtctgttaataaataaataaacctagaa

SEQ ID NO: 14825 - DNA, 5022 bp, Cannabis sativa
agtgagataactctgcgagctacactttcgagcgtgtttaaatccacatcaacattgacccggtaaaagcggataaatcatagttgtgtaatttttcaaataataactgcatttaatttacgtgttaatcaaatcccacaatttcaagagataattgttgtgggaaatcaatttgattgtaattaattgccctcctatgtaactataaataggaacaggatacatcgaaaaatggacagaaaaaacctttagtgaaaaagtcatagttttgtatcaaaaatctaataaaatagactcgtagactatgcaaactttttactgcaaaatcacgtaaaaaaactgtgtgttatttcttttccttttactactattatttctgtgcaaatccatcacgaaataggttttaatttagttaacaaaaatctgcgttaacagaagattatctaatgagtgaaatatttcaaaaaaataaatatgagcatagataataaataaaagataggacataaataaataagatataataaaaaacgtacctgcaagtatacaaagagatagataaagatagagctatattgaaataaacactactactagactacagagagagtcgtcattggaacggagagagggcaggcagtggtgcatcgatggctaagagagagtcgttaatggggtttggggtggagagggggtagcgggtgagatttggggcttagggctgagaatggtgataatggggcttggggcagagagagagagaaatagaagaagactagaaatggagagtgctcgaaatgggaaaacctaattttgagttgggattttgtaaaataaaacgcattaagcatcagttaataatagaagctaactactttagcgttggttagcaacagaagctaaccatgtttgcttcaagtgctaaccgctgctaaacgtctttttataatttttttaaaaaaataatctctagagtcggttttagttttactgtcagagatacaaccaacataaattaatcattatttgcgttggttaccagctgaagtaaaaagatgcgggttgacttttgcgtcggtcaacaactttgaccagaaacgttgaccgacgtaaaatatcatttttgtagtagtgaatttaaaacaataaaactggaataaattactaaaagaagattctggctgagccacagactatgtcgttttctttaagatattttgcggctctacccaaagtgtgcacgacagtctagcaaccacgacgtctccaagataaaacattctctgtatatgatatgttatgtaccgaatgatatcgctagattacacctaaattattgccctgagacaaatcgtaaggaagaagagaatttttgttgttgaaaagatgtattctttcgttgttctgatacgacttatatagagaagtcgatcgaagattaaacggtaagaaaacagtaatataatcgtggcagagttggatcatgacagaaaaaagaagatcattgactaatcttttttactaattcatttaacgttaaaaataattaattaattagtaaattaaaaataaaaaattatttagtttttcgttaaaaaattaagtgacacctcactcgctagcccgactcgatcgatcggacggcggcacgcgcgtatgtggtggtccggtgtgtgagtcctcacctatgcaaacaaacgggagacccttaggacccaaacccaaatctcatggctacacaatctatacactttcaaagaagtgtttttatcccatgtaagactctcattactatcacacacttcatatattttttagtaatttcataacaaagttccaatacattcattctcatgctatgtttatttttatcaaatttcatgttctagttttgattttataattggttttagttggaattgtgttttcttgaacattattactactttaacaatcaaattttgagggtgttcattcagcacataaatcaatacataactttatatttaaaatagacattgtcattaatttcaaattaacgcatcatttaatcgattttaatttttttcttaaaacaaatcgtttatacttattaagtaatggtaaattatacatatttaattaccagttatattttttcagtgtctgtggacaaaaggaattaagactgaaaagtacgtacgcgatcttattaaataatccagctaattaacatgaagctccaaaattaacatatataattatatatacatgtctctttttcacaatatagaacattcacttagtttaagcatatacattaattataagcatatgtatatattgtttgatataatatgaatattaatgcagatacatgtatatatctatgtattaatatatgtaactatgacaaacagatataaacatgtacagagatatcagatatgtatatatatatattgttagctattatttaattattatctaatatagcatacatttatatttgtataaatgtaagattttaatctagtatttgcatactaatttcctcaaagtcatcatcatctaatgccgacaagaacatttcgtctaagcaagaaagctcggttccattgtcatcatcctcatactggacactcttcagagaaatatcctccatcttcctttcgtggactcgacatagaacccatttaaagtcctgtattataacaccaaatataagcaaaacaaaacaaacaataatgcccagggtgatatatataataaaaactaattttatagcaatagtaatcccatgatacaaaatgactaattaaattgttaattaattagctgatcagaaaaaactcactagtttttgtttccttcgccttttataagttggacaaatagtagtactcatcaattcaagattgttgcaaaggttgtactcttccatgacccaattggtttcagtggctgaagttggagactggtggtagccatggttagtgacatagtacacataatacttcttcacaccaactttgttattagctccagaaacaaatatgggctcattcatgtccatttctttccaatacccatttgaggtcactttaccttctgtcgttttgctgaagaaataatagtgcatgttttcgctggacaatgccgtacctaacgaatcatgacccaattaatacaaatttagctattatgctgtaactcaatcattgcataaatatattatatcattattatatttacaactacaagtaattgctaggaacaaggatagagttagatttagtaccagtaaattcccaaggttgatgaaggcgaagatcaacataaggaatgatattgggatgagcagatggtaaggcaaaaaccttagggtaaagaaactgaaggatcagctcttcatctgttgggcaaaaccgaaatccaggaggtagctttacactctgattatctcccattttttttggttctaattaattaaggtaaggggaaatattaccaatagagaagccaaactctacagtaatatattataatatattagttatatgtttagtgtgacgatcgagttcagatatactttgcttagatattcatctatatatatatggtgctgagagatagagaaagagagattgcttaaaatgttttaaattcaagagttgaattgagtagagttgtggtgatgaaaaaaaaggtgtgaggtgtacaaaaacaaatgatccatattggtatactctagtaaaggataagccgacattttgtaccaattaattatgaaaagaaagctatatatgtatagatatcggagaatattatattctacagtttataatttatattacatatatgatgctaattaaaatattcaactaagaattataattaaccacataaccctacacgccaccgtccacacattcaaaaaagatagaggggtatagcacatatgggagacacagaagacatgattgaacgtaagttctgttcttaaacaaaaatgaaatttcataaagttttatatattagctaactctcatgcatgcccataccaagaaattaaatacaaattatatgcatggcttcaaaatataaaatatgtcaaatttaagcataatttcaaaatatataaaaatagccataaatttctatttcatttttccttataaaaaagaataatctaatatttaaaaaatatatatttatatagtatgaaatatttatatgttaaatctaaaaagtattagaaaatttatatttccatcataaaatctatatatatatatacccaaaaatttataaagagactctaatcattttattttatataaaatatatatttttagtttgtactattttcttttttcttttcatattcttaaatatataactataaaatatatttcaaatattatgaaaaaagaattatttgaaaattaatatatatatttaaaaaaatatatgaaaaataattattcaaattaacttcaactaatgtgagaaggaaatttaaaaacatattgggaatgattttttgaaattaattaatatttttattttttttaatattaaagtctattcataaattatttatcaagtgcaaatgagatttccttattaaaatttaattccatttacataccctgtctctttccttttatattttgttgaaattaattataaattattattcttatattgtaactaaaaaaatccgtggctaaaagtattagtcacaagaattacaatttgttttgttgtaactaaatgtgtttgtagtcacaatatttgttgtgactaatataaattagtgacaacttatatttaaatattttgttttagtcacaaataacgtcttgttgttgtgctttaaaaatcatatttagttataaaaatttatattataattaaaagattgatactaaaagtagcctactacaaaaaactatactactattagtgacaactttttaatcacaacataaatattttgtgactaaaagtgacatttagtcacaacaaaaacttact

SEQ ID NO: 14826 - DNA, 8848 bp, Cannabis sativa
acattgtcatggtgttatcttagtacttgagtcgtgcagacttttaccctaaataattggcactgtctgtgtcctgagtcttcttgactttacatcttgaacaaaattaccctaataataatttcaataaaatggtgacaattttatgattattatgtatagtagttaacatagacaaataattgtcgatttagtcaatcacagcttactggttcttgttagaatgtattagaatgaattatacattcattgtagaaggaagcataagcttctatgtcaaaacacgttagtgattagagttaaactatactcttgtaaatatactaaacgacattcttctggagaaagcctaaagaaacaattaacaaagacatctaaaccatgtgaaaagttgacaaactagaagtattgtaggttcattttatgcgcatataaaaccagctgatcccaacaattaaaaaagaaaaagcaatgggaagaaaatattgtgtgttagatgaagacgttatttgtggtgttgtgcaagtattttgaacttcatttatgtcgaattcagaaacaatatcatcttcttcataggtgttgaagaacttggctaacttctcagaaatggattctcgaccaattccactcaaatattcttcatttccctcataatcatcatcatcttcataagcaagacaaataccccacttttttagctcaactccttttatgatgggtggatttctaacagttacatgaatcttaaagccagttttcaattgggtaaccaacggattatcttttgaaaaacgacacaagtgaagttgatcttcactccttttcggtaatcctcccaagatcaaagttgtggtgaatatgggcaagtcttgcttgaggatccttgcttgtatgtcaactattccaggaagctggtgaatcatgtcatcttgattttcaaggttgagagaaacaactacgcctatagttacacttttgattggtcgatttttgcgctctgagaatgtaaccacatcttgacaaaaccaatttgggatcttgcttccaggcatgctaagactccttatattcctcaaccaaccctacatcaaacaatgaataatgagttacatatatggaaggtttaatataggaaactatgaaatgagagaaagagagagaggaccttagcaagtcttttcttagctactgaggaacaactatggcaacaagtcatgtgcaaccttcttatagacttaagtcgttcaaggccaggaatatcctctactttgtcacaatttgtaagattcagttcctctaagctttccaaattcgagatatctgaaactttttccaaggaaatacattgtgcacaattcaccaaattcaaacttgaaggaagtggagggagggacctaagttcatagcaatgagacaaatgaagctccttgagatatgaaaggccttttaagctagaaggaaggctggagaaattattgtggccaagatctaaaatctgtaatgatgctaacttctcaaaatcatcaggaattttgcccgaaatattcctattacgagcgtccaatacacttaatgaggacaaatttgagaaggaaggtggaaagaaatgtgcctcttgtgaactgcaaatcattgatgtctctggttcattatccttacgtagtccaacaacttgaggcttcttcgaaatgtgtaattctattaaacttgagagcatcccaaagctatcaggcaattcagtcactccagtatccttcattagtaaacggtacaaggatttcaaattcccaattgaagctggaagcttgaggagctccctacaatcggtaagtcgtatcattgtaaggttgtccaacttacctattgactctggtagttccttgattttagcatcaactatagtcaaagtagtaagagacatcatgttgcctaaggattctggtagtgatctaagagatctacatttcctcaagattaacttctttagtgatttcatggcttcaatttgatcaggaagttctttgattgatgtctcttgtatttcaagctcaacaagagaatttagtcttcctattgaattaggtaatgtacttaagaattggcctttccccaatgataaccgcttcaaatttggtaatgtaccaatacaaataggaagttctttgattggacttgcataaattagaagctctcttagcatcttgagtttgccaatagaatcagaaagtacggacaacgaattacaccacatgacacttagaatctcaaggttttctaaagatccaatggaatctggcaattcatctatcccagatgaatagagggataaatctctcaaagaacgtaaacatcctatgcactgaggtaatctttttaaattcctgcaatgattcaagttgagcttttcaagttgagttaggcagaagatagattctggcagtctttctattgcagtctcatctactagaagttccttcaatgatttcaggctacttaagtcttcaggcaattctttcagttttgagcaaccagagaggataagattttgaagctgctttaagcccgagacatcggttgggagattaataagttttgtacagcctttcaagtttaggtgaatcaatgtgctcatgttcccaatatattcatcaatcttagtcaagctaacacaatgttcaagaataagtttttccaacttcttattcttggataaattgggaatagcaaccaagttagaacaaccacttaggttcaatacccttacattgtcagcccaaacctgatagatagaaaattattaaggaaaatctattagatgatacatagaaaatctatatagcattagaaaattaaagggtgaaaataaaggtgagataactgtaacaaaaacatgtaaagggagttgcatacgtttttggtgtaccatgcccaaactgttttgattttgctatctgaaaggtcaagaacggaaagtcccagcgcacaaaatccagatggaagatttttcaaaggacactctttccactgtagccatttcaaactcacagggaatttaagctctccctcaaggttaacataatttgtttggagtagtctaagattgaccattgtttcaaaggatttagtaagaattctgacttctctcttcctttcaacttgacattcttggtagtctttatatgtttcttttaagtaagtaaatgcatttaaaaaagaggggttacttcggaagtttctccacgatatcattccaccagatacatccttcactgtgctcttcctctcgaagtctaagacaattccttgtgtatgttttctatgctgttgttaaacatgcaaaagtaatgcattagaatttggacgtgaaacaaatgcaatggaataaccaaagactaatatgcaaataaattacgtgtaaattagagtactacaaagggactccgtgctgccgaatacctcaccacatgataaggtgtttgtgtgtcaaaccatgaaattcattatttatttctacatatttcaatttaaaaactgctaattgccactcataaagtgttacctcatgtactgttgagcgggacaaattgcaacagtgtaagataatatttatcgtaattgtaccttatcatcaagtaaaactgtcatgatctcttcacgattccaaagtctactacgcatgcaaggatcgagaagattttcatgcttaacaatgtgtcgtcccatgtctctaagctggtcatgcatccacaaagtattctctggagtaattttgatgagtgattttgcagtgagtttggagattgctatgtcagcatcaaaaccacaccccttcaatatgtcaattgcataatctctatccatacccatattcacaaatagacaagaaatatctaagaatatacacttctcttcctcgtctagtgcattgtaacttatcttcaagacaccctgaatattgttaggaagaatctccttcaacttcctagcagcatcactccactccttagttgtcctcttatcaaacaacatagaaccaattacttccaatgccaatggtaaatacccacttaaagaaacgatttgattagacaaatcctcaaaattatttcgtggcttctttcttccttgtgagtgatagctgaagagttccaatgccgaaggctgatccaagactttgacctcatactccaaatccacaacactttttagcactgttatatctcttgtggtaattataatccgactcccattatagaacatatctcttttggaaattagagtttgtaggtgcataatattatcaacatcatccaaaactacaagagcccgcttctcattaagaaacattttgattgcagcttgaccttccctaatgtcacttacatgaggatttttgcggccagaaagatcgtcgatgagcttgttttgtagagatatttggccagcaacatctgctggaacttctctcacatttgatatgaaactatgtaagctaaagtctccaacaagtttattaaaaagagctttggctaaagttgtcttcccaatccctcccataccatgcattcccaaaactcggacgccattggatttaacttgtaaaagtttcacgagttcttcaatgcgggaatcaagtccaacaatgtatggagccaaacccatcggtgttttgctgattgctcgcaatacaacttcaactatagcttgaatttttggtccaacttcttctggtttctcactgtcaatgacaattaaataatatagtgtgccatgtagattaattactctgtacaaaatcagggtgatatcataacataatttcattagtcttgatgacgtccatgaagttttgtttaagtgtttttttttcttgcaaaaggtttctttttaaaatagataaaagccttgcaaaatgaaaaggtcaatcttcgtttatacattacacactcaatattaaaaatactggatggaaacaaaataaagagtattaaaaaactaaagaataatgagccagtattttttattttattgtttcattatgggaagagcaatcaaactcatcagcacatgcaaccccccccccaaaaaaaaaatatagatagtaataatttaatattaaatccgattacaacttaaatttaataatgtacaatttttttattaattttgttatagtcaattttctgtctttttgtgttgcctaagcctttaccacaatattttggataagttaattatacaattgctatttagatacgtcagaccttactacaaatctgacgtatctaaatagcaattgttataattttcttatccaaaatactgtggtaaaggcttaagcttaggctgatcctttgagtttgatttagtattgcaacacaaaaagacagaaattgacagtataaagctttgatatttcttaattttatattttttattaattaaataactacaaaaatggacagtataaagctttgataaataattaaatatatatttacttaatatctttaactttagaattgttgcatataaatgcacattataactattctctttcttcaaacaatgtcctaaagctaagcaacaaaaaatcaatagtatatttttatatatattgatccatatactctaaacccctaactgtgtgagactcttttgaattaaatggatgcatgtatatagttatggtcatttatatataattgtggtaaaataagttttgttttttttttaggaaaagcatgaatgtattaacttaaattagctgtataggagcacttagcatcagttcaaacacgaactcctatcaaattagtaataaacttaaaaaatcgtttttgtccatactaattacaatatgttccttaaaaatggtattccatactaagcgttttttagaaacaaaaataaaaagtatctataactaatattttttgaattttctctctataaataattctcattctaaagagcaaaaaataagtagcctactataataattaatacatatacttatctaatcaaattatattctaaatgcaactactattcttatttttattaatttcttgagattttggttaatattagtgtgttttaaatttgatattttaattatttattgttaacatttaatttagtgtttgtatttaaaaaaaaaaatcagaaaagacatatagttgagataaattaaataatttttatacaagtttgcatgaatgtttagtttgcacaatggagctttcaagccaaaattcaatcatgccgtggtcaatttttaaaaaagaataattacataaaacgctaatttttttgtaaaataattatatatatattttttatatttttaccgttttcataaaaataattagaaaatataaaagtaacatgaaaataatatttaattaacatcaaaaataacatgcagataacaaaaaatcaacaacaaattaataagagtacaccataaaaagatcgtaatttttataaaaaattaaaaaaatcgtaaaaatatttaagatttagtgaaaatgtatttttaattttttttgtgtaataagtgaaattatcccttttcaaaatactttgtgaatagactgtttctgatcatattcagtggtttagattagactcgacatgaataatggttgagcacaaaatagagtgaataagattaaaatttgatagaatttattatttaaatataatttattttatagttaatatatgtgtatacacattacgcacacaaaacttataagaaagttaataattacctattatcgataacccatccagaaagatttcccaccttatccatggctttcctccaccgccctaccaattcgggtgatcgtttctcctcgtgaagcttaaaatctttttcataaggtccgatctgtttgcggacgtcaccaggagcgatctcgcaaaaaactggcagaatcaacttattggggcaatcgcaaatctttgccaactcttccaaacaccaccgagaatcggcatatctcttcgatagtatgacaatggcggcggcagagtcatcgatggcctcgagcaaggacggagcgatctcctctccacgattcaggccatcatcgtctatgaaggttcgaacgcctttcttttcgagcgactcgtagaggtgttttgtgatgttattgcgcgtatcttcacctctgaagctcagaaacacgtcccaccggagcctgaatgatactccgactgacactgtagactggtcggagtattctccgatagccatctagatcttctctctctactacagtgtagtgtgttggggttttggaatttgttcttgtattcaactttactagatatttattctgatattgttgagactgaagttactttagtaaatcaaaataaataataattaaaagacttgatgaagacagttgattaaacttgggaaagtggtactacagagatttaattgctattgactttatctactagcatgtataaaaaaaagaatgaggtttagattttcgagaaaagaaagagtgagcttttacttgagcatttgtccaaagtattttatttgtaattaaagagttctgtcttctcctagattctttaattttgttaaataatttgtgagttattaatagtgttttagtctaatccgaataatttataagcacaaagaaaggtttaaaggttcattttatttagagcattgttcttagaaattaatggtttctaacatttttttggaggtgacattttatgattgtttagcgatatttactaagggttgttacagtaaattatatagaactcgatatttaattttaccataatcatatagcactgtcttttaacatttctcctttatttactatgtttataagaaaatagtcactcatgtaacacaatatttaaatcttattttagtaaggatgacgtggcaaatgtgacgacatgtggcacaaaattaaaggataataaatctcaaaacagaatagaaagtcatcttctgtaaaagatagatgccaaacataattaaaagattaaggaaacaacccaactaagggcgaacattgtccacgaagtatagcacagaccaaacatagcaagaagtatgtggccaagggcgcatactcccaaaggaggagttgttatccttttcttgcccgtctttggtaccatgcgccgtaaagcattgatgctataccaaatgatgaaggtcccgaaggtcatcccgcatgctcagcaaccttttgatctcttttattcaacttcttttagctatacaagtatctaaggaaggcattaccaaagttaacacatagcaaatgtcggcaggtcccaagatcaagttgcaacatgaggacaacacgggggaccaaggttgctcgtgctaaggccatgactaccaggccgcataataaagttgtacactttgtgagtatgtcagacaggtgttgcacttgacaaaaaaaacctacgatgtcctatcttgctgaaagcttagacactactaaaaaaatagcattcctgtttgtcaaaacgtcatttgtttagaaaactaacgatattaaaattgattgtcaattttaaactgacgatattggacattattactatgttaagcattcacgggttataaatttaactaacgctaaaaagttgattaaaaaaaacccagtccattgtcatatatatatataaatgtatttataaaaccctagacgcacacacatatccttctctcatttaactcccttagaacgtgtcctcatgctctaccatgacaggagaagctctggcaaaacgaggttcagacggacctccaaactctctctctctctct

SEQ ID NO: 14827 - DNA, 1623 bp, Cannabis sativa
agtacgcattgctactatattggtccaagatgccataatacgagttgctactagtaacttgaacatggaatttgggataccaactagcaaagctatgggcgatgagatctacacaattccaaataaaaaaattatattggttatcagaaaatttaactaggcaagttcaatcagcttcgagaacaattggggaccatccataaaaaagattaatctttacctcgaggagccccttcaggggtgtgggcagcttcccgagggactgtggcttttataaaagtagcacgagcatctcggtcttgattttcttccttgataggaaccctcactgaagaccaggaagagagattttgttctttcatatccatggtggactgatcctttccaagcaacccgagagctacaaggtttggctcaagaagaaggaaacttgatgccttcattccaaatggaaaattcactagaatttaatgatattgcgacatagttgtagatggagtaggttttaacatcattgctgtcaaaggaaaaaggaggtattaagattgaaataaatgtaagaaaaacatcataacataaacatggaaagtgaattatgaaacttacgatgtctttggaaaaatgtatgagcacaaggatgaagtcctattgtccaaagaattggtcattaaattatttcttgttaggaagatcaataataactttgcactcccctgtgtaaattttgaggtagaagaagcctccgaaagaattcttctacatgcaagtgatctcgtatggttcgtgaccttcccatcccagcatgtggtataaggatctaagagaggctaaaaccttataacaattacgaatcagctggaaggagcaattcaaacataatcacaataatctttgaaatagctctttaaaggaaggatagcctcagcatgtatgtgttcaacactccaagccaaaatttttatggatcgctcatactacactgtgagttactagcaagtcaaccaagaagaaaacaactcttcttgtctctctctcaaccgaccgacatacgaaatagtcaccttgtttaatgcgatatgattgtaaaaagtactgacatacgggtcatggaggttacttttgatttaaaaaatttgacttcgaattgcattgtggggttttgaggtagttttggtttttgagctttggaaggggccataagtttaaaaaggttaacaaggggtaaaaacaaaggttttgccaaagggtatttagtaagatgaagaggcatatgccaagcagcttctcacaaacaagaacgtttaccctaaataattttgattatgaattgactaaatcaagcaaaaatataattagactgtttaatctctcaatatggtcatggattttcacctcattacttcaagttctgttttaggtattctaagaattgtgttaaagggtaaatcaaaagaaaagtgaatttcacgatctaaaaattatgggttttcaagtttagagtcagacagattcattgctcatctcttgaaagaaagaaaaatacattgaaaaaactccacataatttaaaatatagaatcctaaaaattactaaatgcctcaactagattaaattagattaaaa

SEQ ID NO: 14828 - DNA, 3499 bp, Cannabis sativa
ttcttacgttagactgaatgtggctcagatttgcacttcattcagtctttctacgtggagctcttacttattaccccaatactatgattctatattattttagttattgttatcctttttatactaatactagttccaccgctattttaatattatttccactctttctttttcatcacaatcacaatcatgattatgtaatacttatacaatgataattcttacaatattactcactgcccttttctcttttagtaagtcaactgctgttattgcattatctctcttttttttcctcactatttttaccaccaaaattatgattgtactatttttactattacggctattaccactttctttatatttttactattagtactctactactattactactctctttactatattaattttttaatattacctcggcatcttctccctactgctactactattactctctttatcttaagtaatattactactctttatactcatcatcacagtctactattactttctttatatttagtaatatcactattgatactcattatcacagtcattcattaactaataatgatattattattatttctaattattcataaaaccttttagttctgtaattttttcttgaaatttgaagacatgaacatgtatataacaattgcatttacaagatgggactttagaaggttccaataatttggatgcctacgattgtcaagaatgctcctgtgttatatctgggagagattgaagtggggctttagggcctcccattttatttagagatttatctaatttactgtttgtcttacctccactacaggtcctttttttaactcccgaattttggttttttaaattttttatttcacagttaggttttcatcaattttatgcatttcttcccacaggcctcttactttcttggctttatttgaattaggaactaagaggatctccttcttttggatgtctgggtcttggtttgtgtttctttaatctgcttttagttttcaaaatttttcttattaacaaaattaccgaaatatagtcagccgcaattgaatttaaataaagtggctgctttaatgttattttttatcagtgtatatattctatatatatgtatgttgaaattcttgttgatagtcatactccaaaccgctcagaacagaccatttttgttttccctacaagagtgcaagagtgcaagagtaaatgcttgatcacaaataatgaaattgaagatctcaggcaaagctgcatttgtagtctgaaaattatattaaaaatttatgattctaaatagactaaactagtatgaaatgcacgagggagaattgaattagttcacagaatctgattatgatgatgtaaatggtggtttcttcttctcatgcctgcaaatatggcgtttggtggatgattttggatttgtatatagtaattgaggttatatacattgtgagcatgaaagcatgtgtttgacaagcttttccagatccagcttttgagtggaagttgttggcttttcattgaaaagattgattgtttcaatacattgctgtatactattttgctttttcatataaatatatttatatatatatataaatctggagtaaactgcccctgcatgcaacagaatggggcttgggattgtcatgtgtactctctagatgagtattatgtatgtagtagttttggtactctttcagcatcctgcagagttcttggaaaatattctacctgagttgctgcatttttagttggtaagaagtaaatgacttgcttttttctcttgaaaccaaagtctgcttttatggtcgtcgttcttttaattgttaattttgtagtagactctggtacttttgtaactgaattcttctcatcagtggcgaaatataaatgctaggctgtacgagacaattcctgtgtaactattgctctggatggtttgatttaattggctgtgtctatgtatctttctacttcttgagcaaattagctgacattaagtatttttaggcttcgtagctcactgtggcttcagttcaaaccacatcacattgctgctggagccacttaccttgctgccaagtttctgaatatggatctaggtacttatcggaatatctggcaagaattccaagcaactccagccattcttcaaggtatgcttaaaatttattttctaaacttatcttgagtacacctttgtgtccatatatgctcattgatcggaaaagagaaataaagagaaaatatagcaccatattgaatgtgttggaattttctaggtagtgttttgtatgagcacacattttaagcttttttgttgtttgcttagcatctgattagcatagcatgtgtgaatgttgttgcagatgtgacgcggcaattaatggagctcttctaaaatataaactgaatataattttcttactagattttatggtcgtggtatacaagtgtttttctttttgttttttttgggggggtggagcaagtaatctatgaatgaagtactctacttggagagggctatgaaagtgtattaagaactttaaagagtatcatcctgtgaggaggttatctactagtagtagagtgacaaaagtgaaagtaaaatgttgtccttttatctccgctatttgtgtacaacttattatttgtgaaatgtgaaagttcctgcaaaatgggactggcctaattgtacttgtccaatattcactcaaataccataaacagattcttggctttttaagcactactaatagtatactagcctagtacttcattttcaaaattagcatattagtattcacattattaacaataaatagaaagtacaactgtaatagagtaatttgcggcgataatatctaagtttatcttctagttgcagattaatatttaagtgccaagtcaccatttacatgtcattgattggtctacatcatttaatttatattttgtttttaaaaattaatttaaacatttaaaaattattttaaaattaaaaagttatttaaaaaatcttttaaatatataaaaaattcaaaatagtttattaacataattacaataaaatgatttattaaactacttgaatgtttatttattaacttcatccatcatctcaacaacagaataaaaaaaaaatccatcagcaatttgaattcttttttgagcctagaaactttctaagcaatactctatgaattccatcttcaatcctctttcctaactccttccaacatgaaagtaagacaaaaatcaaaaatcagaacacaaacccatctcttcctcccttacaactccaacccagaaacttaagaacaaacacccagagaaattttctgggttcaaaataacattcagatctgcagtgagagaaggtaatttagagagagaaagagttaccatccgatcaaaagggttatggtttcataaccccatcatttacagatttgtacct

SEQ ID NO: 14829 - DNA, 7135 bp, Cannabis sativa
aaatggagagttaaaatgggattgggaggtgcagaatctacacagagagatccccacacactgtccataagcacgttctttctctgatttttctcatttttatttccagccttttgcagtctttcccttcttcttctttttcattcatcattatttttatatttatttatttaatatgttttatatgtagatgctgcaacggtcgacagactgatttgcatttatattattgatttgcatagtgtgtataggatagtatatagtattcatgttgagctaatttgtctcttacgcttgctctcactgttatggtttctattacaggacaaaatatactagtaaactgtcctttttctccttccattgagaaaatttggactatatccatttaatatctacccaacaggggtaatcttctactggtctgccctctaatgtagttcaaaagctatcctcacaaaaagaaaaagaaaaaataaataaataagaagagataactctgaaaaatgaataataaaaatctacatacacggtttaataattttaaataccccaaatatgtatacattagaattctgaataccaccaacatttgtggataatgttacattcccccacattagaatttgaacaagtgtactatagtctttgcactaattccaatttcaccaatgatatggaatatttttgcaaaattcgtcatgggaatgatcacccccaaccatgggagaatttcatgcaaaattcaaacttcaaagggtgttttgggagaactttgcaagacattatgacattgataattactaggtaaggtaagtaaatataatctatttctatctttattgtttgaaacatattaaaatatgcatgatatttaagtaaggaggttatacgatagagataagaacgtagaattggagcatatattgctctcttgcacttttctattatttatttatttatttaaaacttttgggagaggtgattgaaactgaaaggcatgggcatttaaaatgaaacctgcaaaggacagtactactcgatagcaataatattatgcacacattgggaaagtagagaagtagaggagggttgtgactatctgtcataccaataaggcataaaaaaaaataaccatcaaaaatataatagaaagggtttttcatttttgtgaaaacgaaaaaaagtaaggcatattggtgtcccaagaaggtcggctataagacctggtcaaacccacatccttcaaaaaatctcaaaatctggacaccattaaacaaatattattttataccttttcttctttttctgtgaatacctcaatctcaaaagttaaaactcattaattaaacgttttcaaaaaaaaaactcattaattaaatattaacacagatccaaaaggaaagctctcggaaggagctacccgaccacttatttattttaatggaaacattatgattaataataaacctagagataagtccaaataaagttacattttctattgttctagttgattaaacttcaaaaataaagaataaaaactacagtttttatataagtatttcaagacctcatcttcgtagattgacggataatagtgaatagacaaaactggaatgaccactctgcaccaaattctgcagctaagatactccacaatggctgaccccttttctttaaaaaaatggaatattattttgggacttttctgaattgcaaaggccagaaagaatttcaaaatagaaaaaagaagaataaaaaaacataccaaacggcctcgaagagaagttacactgttgtagatgagttggaaaatagaagaatcacagattgctttgagtaattgtgattaaaagaaattcatttccagtaaaagaagtacattatattattaaccaaaatatatagagttggcgagggccaggccggtctaaagatgttttaaactttaaaccctaataatagacctctcatcatgtggtccaccaccgaccacccccagtcttgaggcagatcagtcccatccatatgtgtgtatatatatattaaattattgctcaataaatctcttgacataaataaagggattaatttcgtatatttttttatataaaagaacccctaacaattactacaatattaataataaattattattaagtggtttgggatgagactgacgtgccaaaaaatttactataaagcaaacatagctggcgactctgatccactgttttgaatcttggcctcatttcccaaaacctttcacaaaacaacaaattacaacaataaaataatattataccaaatagttcatggaaagtgacagactaagataagctcaaatcgctacaaacatgaacataatatggccccaccccaaaaaccaacgaacaacccctgacgcgcgtgaatttcaatcgtcgtctctttctggcctaaaagattttttaggcaaacaaaaataagagacagagggagatatcaaaggaaaaaagagaacaatgtaatgaaacattagctttttttttttttaattttagaagttaaaagaacagttagagctaccacatgagaaccatcatcgctaacgaacgatcagaagagcataaaataataataacaaacccagaaaataaaaaagaaaaaaaatcaaaatcggagaatatttacacctacaattctaacttgggaagccagattttttctctaatgacaaacaatgtcgttttgggaattggggccaaggaaaaaaataaaattaaaatggaaaacgttactgaaagctttaccccctgcttctcataaaatatacttctaggctctctggttcggttttaatcaggttcgctctgaccggtttcgactctggccgtacccgtggccgtgactatgactgtgactgtagctgtgaccgtagccgtgaccgtgaacgtgggttttgttgctacctgctccgccgttaacacttccttctgatcttttctgcggagacgaaaagagctggccgaatccaaagaccgagactgatttagaagaccctctaagagaacaaaccggtacgtttagaaccggtgttactcttacgttggctgagtatgagcgctccattccacggtgcttgtatctgggaccgccattaaagctgcttgggctgcttgagcttctctccaagctttgaaacacaatcttaccagatgagttcattctcgggctgtccactgaaactcccctgctgcttcccaccccatttgattctccccctgtcgacttacgcaatggggtccgtcccactctcgtggctgctgttggatggtctatcaacggtctctgattgaggctctccgacgagaccgaggcaggtcgaggttttaccattcgcattcttggagggttgtttggattccggtgaatcgaaatcgggttcgtatttggcttgtctgagtcgagcgagtgtcttggaagatcatcatgttcgtggctcgaagacgatgaagaaagcgagagccgtgacgaaatagaaacggactcgcaatccgagtccttcaacaacggcagagacaaagaagtctctaaagagttagacgaagaagacgacgacgatgaagatctcgaactacggtgcaggaaattcttaaaagatttgggagcacttgagctaaatgaagacgaagaagacgacacagttttctgactctccgccttctggttcgtattacagagtctcttcaaccctaacagctccctccaccggctcgagcatctcggcgccttgggagaaaacaaatacggatcagtagtagaaatatcattcctccggcaaaacttcccagtctccggtgaccgaatccccaccgtagaagtcatctcatcaacacacgacggtttaatcgaagcaaggtggagaggaacgagcttcccatcggagaaaagcttatcagcagggagcatagcaaccggatcgtgaagcctaaactcaaaatcaccaacggatgactccggatctaacgtcaacgacggatccgaggtcttctcaacaccagcaccggaaagacccaaaagatcatcatcaggaacctcacgactgaaagaaatacgaggactgagccatccataagaaggataagaagtaggcggcggacagtcgagaaaattctcagccgaaactcctatgttgttgacgcaagcggccgatgccatttctccggcaagagaataaaagaagctataacaatgtaaaaataaatgccagtgacatggaagagcttaagaagaagaagaagaagatcaatggaggagtagggtttggcagtgaagagagagagagagtagtttagttgatttgggaccaggtgggaaaatggtagtggcgaatgagagagtttggagacttagggtggcgtcgtgtcaacattttagtacggctcaagatgctatatatatagtagctgaaaactaaagaggagcgtactagggtcacacatatacttactcacatcgctttctttttcttttaatttttctttttaatttatttcattgcaaaaaatatttttaatgagactgtattcttttcttcttttaaatttgttaaatgtatctgaattttgtactgtaataatattgtgtgtcttaatggtgtgtaataaataaatattttggaaagaaattcaatactactaccagttttgtttttttctttttctttttttaccttattactatgatgtagtcatttgctgaaattttgattattgagaggcgtacatatttatatagatatgaatttaaagtttccttaattggagaatttggtaatccataatcaaatggattgttatgtagttgttgacaatatattaatgaggtaaaccaacaaactttttggtaggaatatttaatcaatgagataacaaatataaaataataattgtattaaaatttttatgtaaaaggaaagaaagctaaaatggatgataacataaagtggttactgtaaaatctatacatttgaacattatcttcttccttttttgtaaaacctataaaagtaaaactaaaatcaaatcaaatcaattcaaatcaaatattaaagttttcaaaatattgtgcaatatataattagaagaactataatttgacgctgactttgtttcttgtataaatttttcattcataatcgtaaatataatttatactcttgtgtataatagtaataataaatgaaattaaccatttctatatgctaaatgatataattatagacccagctcatttttttttattattttttaagtttttttttttttttgaaaacattattattttaagtttaaaacaccaaaattatgtagtttgtcttaatacataatagccatcattcttgtacctgttccatttttttaaaatatttatttttgtcatgagattatacttatttatgaaaaagcacaaaaagaaaattctttttaaacttcaaccaaggtggctttctagttaaacaaaaacaaattattcaagcctatgatttttaagtggggttagcaagttagcttaacgtgacacaaagatatagagaaaaaaacactccctttattcatacaaatacaataattacaagaatacaaattaggtaagcgttatattcaataattcaaatagtttttaagaacaaaaagtcaaaaaaaaattagcaattattaagataaggctttgaagatacaagatgcagttaataagttaagcccaagaaaaaaaatgtcatgatacgtacttatcatacagagttacgtagtgaaattagttatccctttatatatgatgtggagtgtggagtgtgacacaccacttgaagaaaaatataggaataaaagagataattacaatttttttttaatttttatacaatggtgtgcgtacaaaactatcaattttttgtgtatgatttgcattcacatatcattactcttactattatattatgattacttaaatcaaacactaaaatggataaaaataaaaatacatacagaatatagtttggtatgacattgaaagcatttttggagtctaaaaattatttttaagagtaagtctttcatgttgttggtgaagatttttaaattagaatgtgatctgttttctattttattattttattctcaatacaataataataaaaaaaaagtgtgaagcttttataaattatattattaattttttaaaacacttctacagttttttttttttttttggggtaaggattttcttctacagtttagtacgaataaaataaatattcattgagaaaaataagggtagataataaatgggccattaatgctaatagtgtggtacaaaatctcctcaataaatacccactagtgtggtatatcctagttttggagaaattagtaggggggcctttctacttatttaagtagtagaagagttcttagataagcctagcatattcttattgagaattgttaaaaattattgttgggtcctagtattcttttagtgtgattatattattattagtgtaattaaatatcgaatcttatataattttttttattaaatagctattatgaaatatcgctaactaattataaaacgccacttataaaatatacaaagtactaatagtgttcaataaaaatgcttattcttaatataaccacacttgaaaagtcattcaatatgcacgtttaataagggggaggagagctaaatccattatctttagtttggaataatcaatatacaatcatggcgaaagctcatactctctaatgcattcatggcaacaaacactaatgactttaaactccatgaatatgatggctaaaagccataccaagttaccaacaagaagtcggtggctgaagttctaaataaaataaaaacaagtttcatttattgtttgttaaggtatttgtgtctttttcattttgtgagtaactagtttttaattctctatagtatgcatcatttcaaggcctcttaggtgttggaggagaactttgatcaaagcctttgaagtctgtacggctttcaaactttctttgctttgctaataataaagagaaatactaaatgatattagtagtgctacacaaaatgttat

SEQ ID NO: 14830 - DNA, 5042 bp, Cannabis sativa
gcgggtttgattggcggactgggcttaactcccaggtaactaactacctacttttcatcatctttgacactactgatttaattatctgacataattcgtttttgagcagctgcaatattggtgagggaggtattgccctagctgaagctgtgcatggttcagcacctgatattgctggaaaggttaatcttcttgaatttatccttacacgtagctgcactaaatgcatttgcagatatttcttgttaactcagtttcacttgtactcattattaagaatgctagtaacatatgctttattttctgaaactcgtagacatagattcaactacaattaggctcattctgattctgaaaattttagtcacagttatttccctagaacatgagctgaatcttataatatcaaaactttatcttaggcatccaataaaaggataaaataagtaatttacgcaatggggagtgtcaaagatttcctagaaggtgggttttattttgtgataaaagagtgttggtggtttttggaagtgcaaaagactttatggatacaaggagtataataaaatagtgttagagagattgaaaggactttatgaattgtatgaatttggattaggagctgttgctcttggaagagggaggcctttaccaccatttgtgttaggtctcaagtattgtcctgctgagtcttgcaataaacagagaaattttgatttactacacacacatggtggtactggagagaaaataccaccagcacacaagttaatagaatcgtatagtatagtaaactacatctgtatattgtagaaccagtaacacaatacttagaacatgacacaaatggtctctaaccttggttttcttgctttgtttaagcagagggcaagcccggtaaataaaactgtgttagggtttgagtaagccttcatttggaaactgtggtaatcttttattggacctattttcagctattctttaatttgagtgcataaaccagagcataagttgtagagagtgacgtcgttatgcctgaaattccttgatttgattcttctcaagtgggtgatgaaggttcaagcgagccctgtgttactagacatattcattgttactgtgtcatcggtgtcctttaatgatgttttattgtagcacccatttggtttttacttgcttctaaacattcttccatattgaaattatccagaatctggcaaacccaactgctttgctgttaagttctgtctctatgctccgtcatttggaactccatgataaagcagatcgaatccaagatgccattctcaacacaattgctgagggaaaattccgaacagccgatttaggtggaaattcatctactactgacttcacaaaggcaatatgtaatcatctttgaaaggaaggtattgcgtatgtaatcagctcgtctttgagtcaatttattttcgacatttttccagtttttcttaaagagaaataagaccacacgacagatgatctgggctagaaagagatttttatcgcgttgaaagcttggagggcatggatgaaatattggatgattgacttatatgcctttcttcttcaccgtctcaaaatgaactattggtgacctttgaatattgctattctttgtccatatagatttacgaaataattgcgtaatgatgtgagactctaattttaacttatacaaattttttttttccaaggatgaaaggtcatattttatagtcttctacattgtttgattacaacttctctcgtcaattgtttctgcttgggcttcaaccataaaaactactcactctcataggtaaaataacctttcgaacctttttttttaagtggttttaagctacaaccactattttattttattgtgtttttttattatttttttccgtgttaaataccattctatttttttttacttttattttgaccgtatataaacatattgaattttattaatttttgtttttaaaaatacaatataattattattctataaaacttttagggtgtttttacaatacagtccattaaaatgggtgtactgatgtaactcttaactgtttcgatatttataagaattttttattctaaatttttttagagagatgcaatttctgtagtttagggtctaatacgttttgtggatgcaacaatatgtgagaataatactatggttggagttggagtagccattttctctacaaataattttataatggcatctttatccaaactattaaaaggtcttgatcatctactaattaaaatagtatccctagtcaaaatgaaagtctaaccgaaaggtttttactttggttagaatagttttaagagtcattttttcttagtgagtttattttaaatgtttataagacgtgttttttttgtttgcttacaagctctttattagctttttaagcaaaagctattgcattattgtaggcataagatagacttaggatgttggactcctaatcaatgctttttcgctgacttactaccaaaaaattggatttttttgactattttaaatagccgaggtaccgatgcctattcgactgtgacaaaactgggtaaaataggcatcagtggaaaaacatcaggaaaagtttttctcaactgtgcaaaaccttcagcaatacaaagtagcattctcgatggttttccactatcacctatagtataggcgaccgtggaaaattgccagctataaccatcgaaagaattgaggaataataccttaaatataatgaatcctctaacaaattcattatttccagtggtcctttatacaaactttgagcctctaaatcatcactctcctctgaatcatcttctttagtagaaacatctttgttcttttcgatcaaagatgaagaagaagaagattaagaataacatacgacttctgcaatgactccaccttcttccattgcagaaccatatggctacaaatcgagccttcaattacattcaatagtgatagacatgaggaaagaaaaagaaaaaaatgttgatcagatcagagaacgaacaaaatgagatcttgtcaaaatctgaaaacaacaatcagaaaaagagagagcaaattgttcctatctatgggtcttgccgagagaggagacgaaggataggaggggttagcctttgggtcttaccaagagaggaggtggcagtggttgtgggttgctcattgttcgagtgagagagctgagggaggagagaggacgaggtggcggaggaggtggttgtgtcgttcgaatgggagagccaagagagagagatatctaagattgtatgaaatgagatttgaattattttaaatcgtcgggaatagtaaacgactatttaaaccgtcaagaatactctattattgctaacggttttaaatagtcacttatttttattagctattaaccctgaaaattaacaatgctaattctcgagattagtcaaaggataacaataaagataaaagagggaaaccttaaatattagcaatgagatagccaagtcggagtaatgagcaaggccactcgcatggtgcatactcacatggtgttggccggcatggccaagcataggtgcaaggtcactccaccaagccaagggagattgtctcaaccatgcttgactcaaggtcactcgaccacgaccattcaagaagtcactcggtcaaggtttacaagaagtcagtcgaccaagacaatgaaatgtcactcgaccaaggacatctcatctttgtagatctctttctcagatttctataacaacttgaatcatccaaatcaaattaatattgagggagttatgctcaaaacacgaaagggtgcaaggcgagtaagacccactcaacgaagaagccttgggccatatctcccgaaggtcgctcggccatacctcccgagggtcactcggctacacccctcagagagtcactcggccatggcatgaggaaactcactcgaccatggcatgaggaaggccacttgaccaagtgtgtgttgaggaaagtcactcgaccaagtattgagaggaaattcacttgactaagtgttgaggaaagtcactcagcatgctcatcaccgagtcattcggtatgcgcttcatgcatgccaccaatatgctacttccacaacaacataattatacttagtgaaacttttctgtgtaagggaaatgaaggtaacaagagtacgatcacaaggacaaagtgtgcatggaagatatgtacaaccagaccctctgcaagttttgaaggtgataaggtacaagtagtggagacactacacctgcaagtgctgacatcccgaccaagggtgcacacaaccattactctgcaatctgggaccacccgacaccaaacaaaggtacaaggcacgaggcctccacctgcaacctccagctcatagatgtcatcttctcccttgggacaacaattgtatcctagaccattagaggctaggaaaattattgtaacacttgattcccagaattacgtattcctcttccaccattgttgctctatacatttttttaagttcttaaattttcacactttcatcttcgtcctatgtcttgtgttttagtttcgatttttcggctttaagttcattgacgaattttcaccatcaacattagtgacaatcctcgcaaaaaatcgatttggggatcgacaagagtagtgctttttgtggtagtaactctttgtcgttggtttcaactatgaataatggttccgtgtactataattaattaagtattttgcttttcgatgttaaagctttattatgtagttttcttggggcatgttagtcacaattttaatattacgactcataaattaactaagcatgctcataaaataaatgatgaactttcttgaatagaaaaggtaattctttttcctcatcaataaagtgattatgtttaaaagaaatacatttcccttataaataaataaaaaatattaaaagacactcatagtgtgtagtactattatgaggtataatattgct

SEQ ID NO: 14831 - DNA, 2605 bp, Cannabis sativa
aaatacatgtgatgctaattaattagaaacattagtataatgtctcatgcaatattaatatattaatatttcaaaggctccctatatatttcagcagcattattaatttacttttgctatcaattagttaattgatgaataatgacaattaaaggcccaccaaattagttgcttcacaccttttttcttcatattccttttctcaagtgaagataaggtctatccattaatcaatattacaatattgaaatcatacttgagctttaattaccaagcttttaatttggtgacatataaccatctatatttatatatttgaaacaatattaaggcacaaacttgtgcaccaaaaacactaatttcaactttgatagtttattggccatttatatattattaattatacatgtactatttgggcaattgtaattttgtttagttattatggctaatttaacatttttggtatatggataaattataaattcatacttttgcggtatggtatataatgtagttacatgagatttcacaaattttaaccttccaataatttaggaaagatgatgaaatccgaatttaaataatttattgggcacacatataaatatcaaaacaagtatatgtgcaatgcattatttaaatgattttgattttagcatcctaaagtatttgaagttttcaaaaatttgtaaaaggttcttcagctacattattcataatagtaattatcatgcgtataaaaaaaaaataaccacaggtgtaataaaatatgtaaattttatttttgacgctgtaaattattcaaaaatttacagattttgttgctaagacattcaaaaatatttcattcatttaaagataagatcttagtgagcacataagaactcaccaaccaaaaattaagaaaacccttacaactgtgatgtagactccatttagcaagcatatgagtcgcctgattagacgatctaggcaaccaaaaatagctaacaaaattagaagacaaaacaactaaaaacttagaaaacaaaaaggtcatgttccagtgtggagtaataaatgcagactcaatagcaaccaccaaagatctggcagttcgagagaagatccacactgaaaatacccaatttcagcaacattttcgaaccccaaaaagtagcatacaactccccatgaataacaaagaggaaagttatcttgaaagcaaacaaagccaaaataccagtacaatcattacgaaccatagcctcaatcgctccaataccgtccttattcgcaaagtccacattaacccgaaaactaccaagtctagacaaggtacatcgtgccaattgaaagtcattgccaccagaaacattctatatcttgaactcaaaactaaattctaatgactacaacatacacaattataaaaaataaaaacttgactaaaattcttttagataccaaaacaaataaatagtacgtaccagaacaaaagttaaacttaattaaataattccatgtcgaatatactagaacaaaagaaaaaccttctccttaacttgccacatgaacaattacaataaattaaagactactatacatgtagtctctttcttaaaggaaaaagactagtatataataattagtttagtttatgtatatataaattattaataatagagggtaattaagtctatagtacatcctttaaataggtattttggtaaaatttttatctatgtcagtatttagaaaaatattttagtctattttttaatatgatcgtatatattataattatttaagaccacacctgtaaatttttagaaaattttaagtagtttacagtaccgaaaataaaatttacatattttgttgtacacacaattatttatttttgtacgcatgagaagtaactgtttaaattttattttcgatattataaattttttgaaaatttacaagtgattttaattaggtacacaatataaaaaaattaaactaaacatattttttaaatgctaacatagggtttaccaactttttaggagagttttctacataaatgtccgatttcacaaaatccacactttcatcacacacatatatataaaaaagaatgttgtagtaattcaagcataaattaatgcagagtgttcatgtaaaaactacagtcactagctagctacatatactttggcaaaagattgctttttgtcagtactattgccattttttgctcataatatttttcttataattattttaaaatttaaaaggataaaagacaaaataatctttacaagacatcttttgctgcagataacagttcttagggagagaagatagtgagaatagggggacagaaaaaataggcaattattaggccttttaatcattaattctatgttaatattttcttttaatttgttgttttttaattattattctaaaataataatgaagagattaaagcactctcataagcttcattattttaaagaagcttatgtgtgagaaccaatgatcgatacaaattctacctatggcaggcgatggggtctcgccgatacttgcccctattagggcagagatgacaattaaggagataattttt

SEQ ID NO: 14832 - DNA, 3057 bp, Cannabis sativa
aattgcataagccaactgcagtaagaatggttggacttgcgagttttcttcgacaagaaacgtgtgaaagctactttatttttcatgctgaaactaaattgggaaatgggtttaggacatttttgtattttcttggtcttgcttattgtttcctgggactatcagcaataactgctcgtttttttcggtctatggaaactgttgtgaaacacacacgtcaggttgtagtgactgacccttctactggggaagaaaccattaggcatgaaaaagtttggaatttcactattgcagacattaccctgctggcatttgggactagttttcctcaaatatctctagctactattgatgccataaggaatttggggaacctctatgcaggaggtttgtttgtttagtggatcttctttttttttcttttctttttgcaataaacaaattttagaatttaatatgggtttttttgtgtgtctattttttgagtttcttaggtttgggccctggaacccttgttggttctgctgcattcgatctctttcctattcatgctgtttgtgttgtagtaccaagagctggagagttgaaaaagatatctgacataggagtttggctagtggagcttttttggtctttttgggcttatatttggttgtatataattctagaggtaattagtaatttgtgtaaatcttcaatttcttatgttacaggatgttatttttgtttcctgtttaccacctgatcaacaaaaaatgttgtatcttgtttactgcttgattatttgcaatattactgtttcttgtcttcaccgtattcggtatttcacacatataagtcattagagatgattaatttgctaagtcgttcacctttctgcttatgttcttcttaatggtcaattcatcaaaggaaaatattcaattatgaatctagaaatgagatagttttgctctatgcttacaggtttggaccccaaatgtgataacgttgtgggaagccttattaacagtacttcagtatggtttattactaacacatgcttatgctcaagacaagcgctggccttacatatctcttcctctgtaagtgacttttatttatgttagacacaaaaacacaaatttcgtcactatttctcttatatgtttctgagttttcgttttataatagctggaattgtaaaaccttattgcaagcacattttgtttttatatatttactttatacattttggtggatctttcattctcaagaaaaaaaggtgaaaggccagaggagtgggtgccagctgaggcagcttcaggcaagcatgatacaactgttggcaaaggctactctgaaatacttccagtcagtgaaaatgcagacagaaatgttgttgatattttctccattcattcaagagatgaaataggtactttgaaatgccaattatggtgtcaattagtcttatttaaactgtaagttcagatgaaatagattatgttgtaattattattatcaaagagaactatgcaacaatttccagccaagtaactaagccatccaaattgacagaattggcaccaaaactttcccgataagcattccattagaggcataaaactatgatttatattataaatcatccacaattgtcatgagtcagcacaaaataatacaatgtgaccctctggaattataagaagggggccttggcaaaatggcctcttttttaaagtcaaggggactagaatttgtaaggaatgtgtgtattgctcttggaaccatgaagtgataccagaagataatagcttgagcatgtgtctgcagatttgagtagctaaatattgcatagaaaaagaacagagaattataattagttttttcgttgcattctgttatgtcttataacatcatttgtttaaactaacatttaatttcacattgaatgtcagagtttcctggcccagggtatcaaaaggtgcctggattcgatgattcagcagaatcgtcaaataaaaatttggaggaggaaacagcttcagaagattctgatattcttgtactttggagacagcagtttgcggatgcactcatggtattgcacttctgctgtgtataagtaattacctagccacatctattttatttaatctcatccaaaattctaatcaacacattttcaggaactcaactttgattgttatgcaatagcatcatcctttttaatttctaaatctaacaagtttaacacagatatatattatatgaatgttggaagtgtttctttttaattaattcaatatttttctattatgtagttgagtgtgcttacacaaggatgtctttattgattttttttcttttcaaactcagctagcttctattatgtgtgtgtggcaagcataaagaaaatgtttttttttatcagtattcatatttcattcctggtgaataatttcattctccctgcacagttggaaagcagagaatcaagaaaattgaataatgtatacctgcgacttgcaagaatttcctggcagttagttttggctccatggaaacttatgtttgcttttgtgcctccatataatattgcccatggttgggttgccttcatatcttctctcattttcatcagcggtattgcttacatagtgacagaattcacagatctgataagctgtgtcacaggtagtttgagtcatttaagttgaattttccggctcctatcaatattgttcttaaataatatgattctataaccaagttggtccacccaatattatcccccctctatattttagattcaaacatgtttaattctttgcaggaataaatccatatgtcatagcatttactgcattagcaagtggcacttcgtggccagacttagttgcgagtaagattgctgctgaacgtcagacaacggctgactctgctattgcaaacatcacttgcaggtttagtcatttaacgtccatttcaattaacaacttcttgtttaatgcaaatggtcaagatatattttgtttctgagttttaaatggaacctatgcaaattgcagtgat

SEQ ID NO: 14833 - DNA, 5085 bp, Cannabis sativa
  modified_base (4546)..(4547): a, c, t, g, unknown or other
gatatttgattttacatgcatgcatggtttttatgtatttttgtagatacatgtctaccctccattatcttttatggtggcaaagcgggggaggaatgtttatggtttcaattggctgttaaatagacaaagtaaaaaattatcaactaaagaaataaaatcaacagaagaacaataattgaggaacttgcttagaactgaagtaacgatttgattgatgtcttataggttgtctgcaatgttcctatttgggcgtcaattggtggacaggatgtggatcggcttccttcagcctcaacatgttacaatactctcaaggtacgtgtagatttgtttccttatctctctttcccatttttaaagtatttgtactagtcttttatactgctgtgtagttattagggacctctattagtggcttaccatttaataatgtgtatgtttccttcctcttatatttcagcttccaacgtacaaacgtgctagcactttgagggagaaacttctgtattcaattaattcaaatgcaggatttgaactttcttaggtccacttcaggtgaaacctttgtcctttcaaattttgtccgcagcacagtttggattatcgttggtgtatccattctctgtcactttgtgttgcttaaaatatattctttgctattttcttccatttcatgttgtctttgcaatcttttaataattctgacactgataatgctaagaagatcttattaagcaaagatccataacgtgttaggtaccaaggcaagtacacacatcactgacagttttgttttcgtaacaagcttgcatacattacaccctatgtaaactaaactccgaaattacagcttgtcaatactgatatataactgcaaagcctttatataaatatcaatgagggcctagcagtgacaaattctttgagctctggaatagctttaagagatgagatcgaatccttgctgaagtagatcaccggccaagacctcatttgcagcttcagagggatgaaatccgtcccaaaatacatatccggtagcattagaacatgtccctatagacctggagttgcaaagcagtgaagtttctagagtacctgttccacagcaagctcttcttgattcaaagaaacctattacatgagtaccccaagagaaaaaatcagttaccctggaatgtttggcttagttaattagttacaattgattgtctaaaccttgctctcttttatttacaatgaccgatttcttcggttcgctaactaataattccaaagcaggcgtggtaccatcttaccgttatccgagggctttgtgaccatatctaagagaggctgataaatttcgaagaccacaagcttgagaccaggaagcctacgcagactttcagatgtgctatttaactttctgttgaatgaaaaggcgtctctgtttaacctggcgacacactggttacttcctctgccaaatagggtgatggctgctggcaaacatccgagtggcggtaagtttgtgacaccaaccctccttgctcccaatccgtacagagtctgtcacaatgcttttcatgttatgaatgaatatgcttctgaacaaacaagttgagctaaagttgattcttttaatcttgtttgtatttacttgattttacccatgtaaatttgagatttattgattgattatatataaatatatgccatgccatgccattggtaagtaaacttcgctaaattatgtacttttaacacaactttattaacatctaaccactaaaatctatattgatttgatctgcttttgcttacaagttacaacatatttccaatcgaatataaattcaaataatttaccaagtaatgtatcatgttgaacccagaaaaaaggtgtttatacttcgggacttctatatatacattcaaccttttattcttgcgattattgatcatagtttcttcacaataacccaaaaaaaataaaataaaataaaatggaattattatatgaagaagagacctgaatgaaagtggagtatgaactcattagcctatctgagaactgatcagaggtgtaagctccataaagaatgggatcaatatagtagttttgtataaaatcactactccctgcactcaaaagatgtattgaaccagagaacaaggcattggctctcttttgtcctatcatattcaccactttcttctgatactccttgtagtaattcagttgctgggtcaatgaaatggcactctaaaaaacccaaagaaaaaaaaagactcaaatttttatacatatatgtatatttatagagagaaagagagagttttgtttcattagtgtttaacttacatataaatgggctgtttcatcataatagccagaagctcctgaggcaaagttggctccagtcaagaggttctttcccttggcttcttggctaaggtatgctggtggatatgaggtgaatccaagatactcagctgtgtgaaaatattcaaaaataattatcataacacctaacaaaagctcattacatagaaaataaatgaaatggtaccagtgaagtctgtggctaactttccattacagaaccttccagttggtttgtgagaaataaagtctctcccataaggaggaaagtttgctttgacaacagtataaaggttgttattgttcccaacatcaaccactgagtcaccaaagatcatcaaaccaggaacaaaagggtctccattagtcactgagaaaaacaggacaacaatggccaaagaacccaagaacagtccacttaaaaatctcatttttttcctttcttcaaaagcacaacccaatagtaagatatagagagagaaaaatacaaagttgagtgaatgaatatgagaaaatgcaggtgggaaggagggaattatttaaggtggtagattttacaaatgtatataaatggtcaaagttgaagatattattattatggttccaataaagctgtttagtttcaggcaatggggcatttttaacaccccaaaaaagaacttgtgatatttgtctttttttatcagtcttttgttaaccaagtgttaatataattttctttttaatgtcaatgcttgtgtttttgttatctgtttttaagaggtgggtgcatatatacaaacgatttttgttaaagcattagacctataagaaagttggtgcttctcagtatcatctcacatctttggcatatatatcacaatctcatatagtctactctatgccgtgtcataagcaatttgttctctaatatgtatccaaatgaaatgtgcaatgcaaaaccatacaaacaaacaaaagttttacttggaattaagtagtaatttcccaaattagaatgtgaaaaaattatgagatctaatgattcactattccactaatacaattagctatatagactatgttgtagacaatctatgtacttactatcctctttattagacattattataaacactattgaaaagttggggtttggtagactgaattaaactggcaaatcctttatgagaacagtgtcagtaagtggagtaaatggagctcctcgtagattgtattgaagaaaaaagaaaacctttttcagctttgggttgagagtgctaattacaaacaaggaagacccagttggacacgtgtccatcgtcttctttactcagcttgccttaatggggtatgatgaatttgcttggtggtttcacttattgttctatcttccactttggttttggtggtggggttcagaaattaatggcacttgaaaacccactagaatgattatgtttctagttcatgagtcgagaaatttctatttctaataaaataattgttataaaagtaaaaaagtgttagagcattaggtagagagctggtaaatcaaaggattaattacttttctggttacttctattttatgattagattagttatagttgtaaattcagaacacatactaaaaaataggccagaacaaaagtaaactaaaataatcacagctgacaacaaaaacaaaagatcaaaacaaaacgcaatattctagatgcatagtgttataaatacatgctgaatttttcgacatgacacgaaattagcactagtctataagatacgagcactactaggtacgaaaaaaatagtttcagcatgacatgacatgacatgaaaaatatttacttaagcacgatacaacacgagaaatacaaaaatataataagagcacaaataaactagctcaaaagacatggcttgcgacaaagccgaaatttacgatacgatatatataaaacatgtagggaatcaagctacttgtaaatttattataaatttatatttaatatttttttatttactaggtgttcacattgtattatatataccctttgtatatactagaatatatcatcaaaaaataaaaattattttctctcattttgcttcatggtattagagcatgtaaaagcttctcaatgcatataattttcctcatcctttcctttcttaaaattagggtttggaggnnctatcttagaaaactaattaaaaggagttttctattctcacctccatcccagggagcttgtcccacctcagatcagcaaaacccaaaaattcggtgtccatctgagttgtgcgtgggtcccatgggccacctccatccactatgactttctccacgcgccagcgcgtggatgtacatggcaatctccagcggcattttccgcatcatctctctcttaggtttccatcttggctcttctccgactccagcgacgtttttccgacgttgtctctctctatgttcgtcttctctgggattctatacttgttttgtcttgttgtctctctctccatggcagaacaaaactcattaagagtcgtctctttagtcgcaagacaatgcaatactcatgcacttcaagttattcaaaatcctcattagggatgcacacggggcggggaattggcggggagtgctccccccgtccccatctccattaaggattttaatccccatccctgcttattcccccatcagggatgggggtggggaatctcct

SEQ ID NO: 14834 - DNA, 5052 bp, Cannabis sativa
  modified_base (39)..(77): a, c, t, g, unknown or other
  modified_base (5010)..(5022): a, c, t, g, unknown or other
tgaaccatgcaacataaattgttatttctgatctttatnnnnnnnnnnnnnnnnnnnnnnnnnnnnnnnnnnnnnnnagggcataaaacccaacaagcaactctattctcattgttgtccagattttcgtaagcttgacacatggactctaatcctggaagtctaaataataattggccagtttgtatccttaatcctaacccccgccattgatctgcttaaggtcctgaaaaaggacctccatgaaggatacgctccatgcaaggcaaggacgcagggagtatccacgattagtagtctctcccagtccctgggagtgaagctgaatgcggataagggcttcccaaaggacactaatacaggtcacagaagaagtcaagatgagttataaccccgttcagtgtcataaggaagctccacccgtacctgtcaggctgcagacaggacaaccatgcttttttcaggtacaataccaagacttttccccacgttatgccttattacagagtatgcatgcctagttgtacctgctcaagtgatccaacggtcatcgacaagggcatatcaaaagggaagaccctgaggcaacatgtgtgaagtgatcaaatagtacaagctgacacccttaaatgccatgtgatgaattggccacctaccaaatcaagggtaagaattcatcgtagcaagatcggcctaacaatcacgtgaaggaaaaaatggcctataaataccccttcattctgtaaggaggggaaactctctaaagttaaaacacattgtataatatataaaaactctactaaaattcctatgaagcttcttcttcttcaagaggaataagaagaatagagagtaccggtcctacttatatagctaataaaatagactcgtggactaaggatagttaacgcatgaacaacgtaaaaatctcatatctattatttattatttcacttctttcttaagttctaaatatttagtctctaaaaatctcggtaaatattttggtgctttcattgagagccgaggaatgatcgaaacacgcacggcgtttatcgttatgaatctcaagttatgaaaagaagagcctgtccaagaaaatgacaaaggaagcagcttgactacccactgagatctggtgaaaagttgaatgtctgctggccaagggcgtcgtcaaggataaaggcctacacctctatccaagcaaagaaagaggagaaggtggaaacaaactgccttggagttcttgcagcacccatgtttattttgaaaaacccagatccggccggtgaccccttaagagaacggcaagccttcagtgctctcgagtctaggcaccctgctgctcaccaaggcacgaccatgcagacacggaaatatataagatgtatttgagtctagtggtgatgttcagaccggttgcaccagtaacaagtaacccacggaggactataggatataacagacatgtcaagctaagcatttcgtcactactccaatgcctcaaccatcgatcccagcgtcggtgctgatgctggtgctagatccattaccgtcgcctacttccattgcctttttgtcgagccatgaagttgatcacaaactgacattgtaggccccccgcggtagtgtcgactatgagttttcttccatcgtcatcaaagtctgccatgtttctagttaggcctcgttatggcactattggtagaaagagtgtagttaaggcaaataacttctgatgaaggttgttgatggggattctgtcattatgatgtaactataactcttggggttacatcgaagaaagtctcgagacattaaaccagttggaaaatctctaccagaggaatggttagacgttataaaccagttgggaaatccttattgaagtagcagttgcattgctagaagtccgaattatcatctcgccccgagttcttatcacgaatgttggactaggaggtcaagcccagaaggatgccagttcccagtcaaaagggtaccttgagatctccctgaagaataagttaatctcaagctcctagaatgtgtttctcagcactcccaaatttgttggctcaagatggaactatgtcaaattatacacgttccctgaagctaccgagtgcgtggaattgccagttacatgaactatcttttggctttaccaaacctttggttgaaagatcactgggggttcgatacgacttcaacccactttctgggaagggaatgactacttgaagtctgtctcacacccaatggtctttcacaccctttggtcttttaaggcaaagtcatcgcttgaattttagtacaacttcagcctttcctcacggaagccgaagtctgccacagaaaattcaatgtgactctcacctgcacgaggtttttctgtatgtgaaagatcattaaagatcattggggtttgatacgacttcaaccctctttcccagaaaggaaggactccttgaagtctgtcacacgcctagttgtgtttcacgccttttggtcttttaaagcgaagtcattgcttgaattttagtataactttagcctttccttgcagaagcataagtttgctacataaaattcaacatgactcccgcaagcataaagttctttgtgcgtgaaagatcattgggtgtctaatacgtcttcaaccctccttcccggaagagaaagactacttgaagtctgtcgcacgcccagtggtgtttcacaacatgtggtcttttaaagcaaagtcatcgcttgaattttagtgcaacatcagccttttctcgtagaagctaaagtctatcacataaaatttaacatgactctcgcaagcatgaagttttttcgtgtgttaaagataactgggggttcgatacatcttcaaccctctttcccaaaagggaggactggttgaagtttgtcataggcctagtggtgtttcaaaccctttggtcttttaaaatgaagttattgcttgaattttagtgcaacttcagcctttcctcacggaagccgaagtctaccacataaaagtcaacatgactctcacctatatgaggtttttccgtgcgtgaaagatcactgggggttcgatacaactttaaccctctttcccagaagggaaggactgcttgaagtctgtcacacgcccagtggtgtttcacactctttggtcttttaaagtaaagttgtcgcttaaattttagtgcaacttcagcctttcctcgcggaagccaaagtctgccacataaaattcaagatgactcctgcaagcacgaagttttccatgcttgaaagagcactgggggtccgatacgtcttcatccctctttcttgaaagagaaggattgcttgaagtctgccacatacctagtgctgttttacactctttggtcttttaaagcaaagtcatcgcttgaattttaatgcaacttaacttcagcctttcctttcctttcctcacagaacagaagtgaagtcgaagtctgccacataaaattcaacatgactcccgcaagcacgaagttttttttgtgtgtgaaagatcactgggagttcaatacgtcatcaaccctctttcctggacgggaaggactgctcaaagtctgtcacatgcccagtgatgtttcacggccctttgtctcaaatttgaggccgctacttgagttttagtggagttttagctttccttcaaggaagctaaagtcctccacacaactcaacaggggttccacgagcacgtgtaccttcaccatgcagtttctgtcatgctgagggattattttccaaacttttgaatgaagatattattgtcaggcacgaattcgaccctctcttcttgaaggaagaatcactcaaagtttgccacccaacttagtctttacgtatagtggtaagcatgaagccttcacttgattttaagtacgataaaaaccttcccctgagggagttggaagaccactgtcaaattcaacttgttattcattgtttgttgggaaaattctttcacaagcgacattaggcagaaaggacacaaatggggaattcacatgaatatggttatgcctcccagaaaggaacctggctagatccttgacacacgtccagatctctcccttacgtgaccaaaaagggacacaatggtgccataagttatgtttcaaacaaatgactgagaaattggaggcaaccaaatctctccactcatttggggggtgttatgcctagctgtgtgtgacttggaatcagcagtgcgatttactcactcaccttgtcaaagctattagcacttcatgcatattaaaccaaaagcaagaagcattttcaaccgaatttcctaagggaaaaatgcttcaattcctctatgaaattaaaagttggggtaactttggagaagagatgcatttttagctaaaatttccccagaagaaaaatttgcctgaattccttctcaatggcctcagtggagtccctaaaatttaatttgtggggtgttggaaagagttgaagactcatgttggcaatgtttgaggcaaggaaattgactcaaaagtcattatttccagcaccatttacggacaagggaaagtgcctgaagtctatagcccttacgggcatcactcccagggcgctggagtctatggcaaactcaagatcactcccgaaacccatgagcccaggaggtatttgaaaagccaaagctcccccttccgcaaataaaaccacccttgagctagtgttccttgagcagcattctcgaatcaataattagccacaaatggcatgcagaaagtactaaggctccgtgacaacttgccaatccgggaataagaagttggagttcgcggatgccaattcatctgaaggggtgaagactggtaaaaagggttaaagtattggtcgctggaaccatacacttcacaacaacctaacaagaacaacccttaaaatagtctaaaaaacagaagtaaagcctcaaaagaagaggtaaatgttggaaattattttacnnnnnnnnnnnnntactaacatgtatgttggattaacaaccta

SEQ ID NO: 14835 - DNA, 4914 bp, Cannabis sativa
  modified_base (4845)..(4854): a, c, t, g, unknown or other
tgtgatatattatattatcaagcaaataataaataattaagttagaaatgtttgattttgatatgtttatgtttacaaattaattgataataatatattgttgtgatgatgaatcaggtgggagatcatcgatatcacgggtagagagtagtaatgtgaataatattaataataatatcaacaggttaagtgttaatgaggagtacaccaacgctttccgaacaagttcttatgaagaaatacggggaagattaaaaacgtcaaacactaatacttcattatcatcatcaacatcctcctcttctccattttatttggataatctatctgagtatttattagaaccaaggccggaaatactaaagaagatgatggagagcttgaaatttcaccaccttttgattgaatacttcgacgcaagcttacaagcatgtcaaacatgcgaattgcttctaagaacaattcatcaaactcgtttggattatcggaaaatcagaaaggtaattaagatgagcaaaagggtattactactaacaatccatgattatgattatgatcatgatcatcacggccaatattattatcgagccatattcagagagctcgcttcgattgcattgcttagaaaccatttgacaattataagccctcttcaatatcgtgagattcgggaaagttacatggttttgctccgtaaactaacgtccaaacacaagaagatcaaaaggagagaaaaggtcattaagatttgcaagaaagttggaggagttggccttgtgatatcccatactttgctcttggttgccttgttagtatttgcattacatggcatatttggtcttgtggctgttcctgctgcaatggggtgctcttcaattcaattgggtaagaagagaaagttggattcaagggtgaccggaggtggggttggtgagcagcttgatgtggctgcaaaaggggtttttatattgatcaatgattttgatacgatgagtcagatggtgagaaggttacaaaatgaggtggagcacaagaaatctgtggctgatatatgcgtgaggagtaacaagtttgagcttttgaaggaggttgtcaaggagtttcaagctcaggattctagctttttggagcaactagaagagcttgaacaccacatatacctttgtttactaaccataaaccggtccagaaggctagtaattcaagaaattatagctagtcaataatgaatgagacaagctgaatgaatgtacttattaggcctctttgatttcatgtcctgtacggtaaaactgtccaaaccaaataagtcttacgattgattttttattttttattgttttaatgacatgagtatatgatagaagttatttcactacaatctactatttatacaacattttctcgatactctatctcaacagttgacccttctcctaatttacaaatttttattggtgcaatgccatgcctttagacaattagacctttgctttgcgttacattacaataaatttagtcattattttgtaactttaataatacaaagaaaatgattacttatcttcataaacaattaaaataaaatactttcatctgttagaatatgtatagaaaaaagtacatcaacagcataacaaaaggataatgacaatatatacttatggctttcgtttgactaaatttctaagccaataggatgcgggagcaaagtttcacttatagattttcttaaagagaattgctacaagacaccatgccaactacatcaccatattttaaatgcaattgaccaagaggttctacttattctactttctttaaattagaatatatgatgaaactcaatactaaactacattattagcggatgccctttattagcatttctcgttttggactagcaaatttctctaagttttttatactcctcggaacccattaaagaatccttgatcttgagccaatctgctggtcttggcatgataatgccaatatagccctctctatctgcctgaaaaggaaagcaaaagacaagtgtgagagtataacgaaccccaaacaatccagcatataaggaaattgacttattaaacccaatatagattaaagatcaaaccctccaattatcaatgtgaaaaagctatgtaatctaaatccttcatctacaagtgacagacagtgtattacatatcacagtttctcagtcttccattatcataaatgaaaattacccaagacaaaataatcttaaacagaacaagaatttggactttatttagaaactcgcttcaacagaaaatatggtaatagtagcatgttaacacattctcttgtacactcggagcaatagtacgaattagcttgatttttattgggaacagaagaatgttagcttatggaaactcattatctttgtctgatatattagtcccatccatattaagaagcagaggtgaacaaaataagtcatttattttaatatagttgtgttacctctataaaatattagtttctacttcggtcatggcatgctaataagttaaacatgatcaattggatcttaagcaactcactttcagaataccaggaatccacaataaaacacttcattcaccattagatgataaagatagttaaatcatgcaagaaattagtacaacaccacaagaagagggaaatacataatgggatataacagtcaactatttcctttctcacgaatcacaatggcatacttaaacttgaattacaacagtcaacacagaggaattaaattaaaagaatataagtaagggattgaattgattaccaacgaattaagcaagtgtggctgcttgattaatttgtcatttacttccagtaatgagcctttcacgcaacacctgccaaaagtccccatccacacaatgtaagagatacaaaacaaaacaagcatcgagccaacattggtgataacgataccaaataaaaagaagcttctacctcacaatgtaagagttgttcttggtgaaaactttaaagagagccgaatttggctctaaaggttgagcattctgcataccaacaattttcacattcattaaacagtcccctattcgttatggccaaaattgaaataacaaaaatcagagagaaaaaaacaaagaccttcttccgttttccagtgactttgatctcacttcgattagatttcccaacattaaaatcaacggctgtgatacctccttcgtccttaaaagccacatgcgtcgtagccaaaccaatcacacacaatcttttttttttttaataacataacaatcataaaaattcaataaaaaaatttactaaaaagaacaatactttataattgtaaaatttaaaggggagtttacccatttgcgtgacgataaacgtactgatcgtgtcctggcttcaaaaaatctggaagaagaaagcaaaacaaaataatgtcagaattaagggctttagaaaaagcgtttttgggtttaaagaacagttatggtggtaagtcttagggagggaaacctggagcgaaataggaaataaagtttgattgaacagcggatggaggagtatgaggaaggtccctaaagtcagggagtagaagcttgtaaatatcaccttcttcttcttggtttgtggtggcggtttcatggtccttcacaactgcagaatctggttgagctgactgcttttcaaactccattgtcgaactcgaactcgaattttttgtgatgctgatgctgatacctacgcacacgtagatatccaaaacaggttaatttcactttagtccttatgtttacttttatctccttttgacccttgctaatttagatgaaatgctattttttgtaaaagattatatttttacatttaaattttttttttttttatatatttttacaattttctatagaaataacacgaaaataataaaaaaaaaattacataaaagtaacaaaaaaataacatccaaacaaaaataacaacaaaaaaataacataccgataacaaaaaatcaacaataaagtaataagagtacaacataaaaaaatcttattttttgtaaataaaatcataaaaattgtaaaaatatttaaaatttcgtacaacatatttttgtaattttttattgtttttgtgtatttatgaaatgatcccttttaattttatacatttatgagacccatatctcaatggtttttgctcaaggtgaagcagctagacttaatttttttttaataaaaatgttttaaatttattttttgaaaatattatttttttttatatatttttactattatttattaaaaaatataattattatttaaaaaaaaaaatacttaatttattttaagaaattatctcatatactattttttaactttttttaaaaaaatttatagtttgagttgctccgatattttctatgtgagttgctatatgtagattttgattacaatttaggttgttttgttagttataggagatactatgtgaaatttcgtaaaaatacaaaaaaaaaatgttttgaagagtaaaaataaaaaaatacgaaatgatatttttctgttgtttcaaaacaatgttattttgacgttattttttcattgaaaaaaacaagtgaaaacctgtaaaaagaatctgtagactaaatcaaaaggttcgtaaaattgtaaaaaaaaaaccaattttaggtgtattgtgtattttctttaaaaccaaatatggtagtaaatttgtttaatatgaaaacaaatgtcatattaatattactattattagcctaattaggatttttgtcccctgatctttgacatgtaccaaatcatgccnnnnnnnnnnttaaggtcgttaaaaataccccctaaactattgagattgttggaatatttaaggactttt

SEQ ID NO: 14836 - DNA, 7041 bp, Cannabis sativa
acattttaatctacatattattatattaaaaataatataacatatacatagtgacttgacaactatgttctaaaggcctcaaataatacatgtctctttttaccaaattttgaaaatgactcccatatacatatggaaatggttcgaaattttccacgtgatccatgttaacaggtttcaagttatatcttccttattatcaaatatgcagtacaatttatttagccaaatttattttgctttttaatttgaatggttatttagtgaaagtgaaaaatcgtatcccttcgacgcaaaactttgagctcgaggcttttattcagctagatattctcgagatttcttaaagacaaatttctatttggcccagaagtctcgagaattatagttgaaccatggagatccaaactcaagattctttcacttatctattttggttcatatgaaacacaatcatatcttagcaatctccgaggatgactaacactggttgtatagagcggatatcaaattgtacttcttggataattttaaagatatttttcagtcttcttatcctccggagcctcctaatcttcctaattttattctctctgttatctcggaggagatgaatgagaggttaatctctccaccttcagtaaaggaaatcaaagaagttggctggtctcttctccccctcaaagcgcctgactctgatggaatgtcagcaaaattctatcacgagcattgggagatcatgggaggtgacgtcatcaattttgtgtaggagttttttgattgggtcagtttgctaagggtgttaataattccttcattgttcttatcccgaagaaatgctgagaaatttgatgattatcgtcccattaattagcttatgcaatgtggtgagtagtgtctaagcttctggcacatcagcttaagcttaccctcatgaatttgatctctcctttccagttagtttttgtttcaggtcattgggttgcgtagtataccattttagcctaggagattattcattcaatgtcgaaggacaagaggaagaagaaatttgttggtatcaagtcggacatgtccaaagcttatgatagactggagtcgagtttcttgaataaggtcttaatgtgctttgggtttaggaatcactttttaaacctaattgctcactgtctgtttctttctcggtgttactcaatggaggacctttaaaatcatttcagcctttgtggggcttaagacaagggatcctctatccccgtatctattcatcattgcaagtggggttctctctcggatgcttgctaaggaagaggttgctcatagaatctcaggtttcaaagtgaattgtaattgttcgtgtatctctcacctcatgttttcatatgacacaatgatctttagtgaagctactagaattaagaggattctctcagattattgttgatggttgagtcagaagattaataatgggaagaaaaatatatttttctcaaaggggacaagggagtcccaacaagagccaattttcaatgtcttgggctatggtttcttaacaggcagcagcaaatgctttggaaaccccttatttctctcaaatttctgactttaactttgttttagagaaagttaaccagcatttacaagggtagagttttaaactgctttctcaagcaaggcgagctattcttactcgaagtctagttcaattcatacttgtttataacatgtcagcatttgtggtctctaaatccatttatcataagattgataagcccacaaggaatttttggtggattggcgcagaaaaaaagtctaggttcctagctcttacctattgcgactctttgtgtaaaccaaagtacagtggtggtctggtttttagaaagagtgcaaattttaacagggatttgttatctaaattgggttggctaatcgcttttgggtctgattcgttgtgggtcaaggtgttccaaggacagtatttccactccaggacctactggaatgcttcccttccatctgactgctcctatgttgctaaaggcatttttggagttacgacatttgttcgtaataaatgtgacaagcttattggtaatgacctatctacggatatttggtatgattcctgacttttttgggatagctgggactcatctcgagcagccttcaatccaatttcctcatctacagagagcagagtgaaaaattggcttgatattgatttgagggtaactggtgtagggataaacttactatctttttcaaaccagatgaggtggacaagattcttaatcatagtaagcttcatgcatgcataaatgatatttttggtgtggaagggtacgagcaatggtcgattcagtatcagttctgcgtataaggcccttatcaggactcgtttgggactcgactctggtttttggaaagacatttaggggccctattctcgaaagatagaagttactactgtgaaaaatggctgccaattgttttccctcaaatgaaaggataggcacttttttgggtatgcctttccagtgttgcctttgtgaatatcattttgattcaattcctcacctcttttgggaatgttctttctcaatggcagtttggttctctagtaagtgggggcattattactcaaaattttatttttaactcagcgaaagacattgttcattgattgcttcacctcgagcttatcccaaaaactcagtgcgagaagtggaatgagtttactatctttggtgtaaccgtttgtgaatcgctttggtgggctagaaattgcaagtttcatgatggtatcactcatatgtcgcctgtgttgaatcatatcatcaaccagcgttttagagaagtggaggtcctagcttctagtttttttttatgttcagccgcctaaaacccttgctacttcagaattgcctaatattttggaccatgatgcgattaacgtgttctttgatggctcttttaaacatggagttggtggtgttggtgtggtagcagtcggggcagacgaaattattaagggccttcatactgatgtttttcttgcttcttcagccttagaagtagaagtcagagctggtcttttggtagtttgttttgctcaggaagttaggtgatttcagaacgtttttttgttaaattgcaaggtcatttgtgaggcatctaagctttgtcgaattccaggatgggaagtaaatggtcttcgtctttctttattttctttattagatcaaattgagtgtcacttttgttggattcctaagaaggataatagtgttgccaatgctttggctaattgggcaagattttcaaatttttctggttcattattttagggagttaacactcgttgttgttaataaactttagtcttgttttatttctagttttgtttctttttcaatgaagttttttctggcaaaaaaaaaaattagggttatgttcgctttttctatataattataaaaagtagctttatatatatatacaactatagtgaatcatttgtgcaaaaatacgatttaaatttattttttgtaaagttacagtattcaaaagaaagagattcacgattggaatttcacacagtgaaaagaaaattagatggttacaatttgagttgcgattagggttgaaacgaccataaaaatagatggttgcgatttgtattgtgatttgggtttcaattttagataaaaccttaagcaggtggcaacaatatcttgcaaggcctagtggtcttgaacgccatgaacaaagactagcacatcaaataggttatagtgatataggattgagatttgggttgtgatttaagttgcaatttgggttgtgagttgaattttgatttgagaaattagcaaaaccaaggggagtggactggaatgccatagatggagagtagcagtgacgaatggttcgatgctgatttaggattgcaatttgagtttgtactctaaaagtatataatctcaccaaaataaagaaaagaaaaaaattcaccgaagaagagaaagacatagcaaggtagtggtctccaatgtaattctccaatggtggtctccaatgttggtctctaacatcattaaataaccgtatatacagtgattttcctataaaataataataatgacggggttttagctttcccttgtttggaatagagcattttgaatcaagtgtccctatgattagctaggagaataataaggtaagaaccactcaaagcttatgagaattgtcgaaaaccctaatattagtgtttagtcagagttaattcgtagctaatattattttttgtttttgtctttaatttaatggtattaaaaaaattaaagtacaaacatatattagtttattaaatccaccataatgtcctttatctttctctctttgttttcattttgttccaaatttgaaaatattttctatcaaggattcaggaaagtttataattcatatacatagcataaaataatcaaagggtgtattgcaaaatgacatgtgctgtataacaataatatcataaaattatgtaatgaaatggaagaatgcaaaaaagggtgccagtgccattcgggaagctttttattcttctacttttttttcattcctctttaatattttaaattcccattctaaatagagaaaagaaaaaaacaggaaaaaggaaaaagaaaaagagaggctacattagatggaagaaaataaaataaaagaggaagaacaattaaagaaatgctccgagtactgggtgttatgattattgttttggtatcctaccaatagatctaagcatactactgaaactgtaggtagagaaaaagataaattgtatttatatatatatatatataaatatatatatttgcaaggctaaactaagcatttattcttttctttttctaaagaaaaaaatcattgtgcagagacatttacattactatggttgtcttctgcactttgtataatttactaatgaaagtttatactaggatttcaaactgcatacaattttctaataaatgatataaattaaatactctacatataactaaagattacctacatatatttgttttgacctctttctaattatgttaacaacctttacttaataactaagtaggaatatgctcaagggtttgatttctgaaaataaaataagtgactaatactcatttaaaactaataagtgtgtcacattaataaaatccatgatatacaccacacacacacacaccccaaaaatggtgacatgaaaaaatgatagtaaaacgtgtggattagaaaaatgtcctaacaaacaacagttcctttgatctttttactaagttttctttccaaatccccttttgactgaaaactcaaatatgcaaactctttatggcatagccttcaaacatggatagggccaccgcatccaaataataacatatttatccaaaaatatgaaatggactttaactttgtttaaactcaccttgcaagcaaggtacttgttccctcttctcagcattatataaagctcccatattgcctcaagttttcaacactgcaccacagaaacacagtcattcccctctcttgattgtctcttttcccaacccaaaaaaaaaaaaataaaaaaaaaaatcatcatggctgaaaaacacgtacaagcaatcatccctcatttttcgtctggaggcaagagagaccataacaggaggcatatgatatctgacgacagcacgatggtgagacaaattcgggaaactcacagtcctgaaactcactttcttgatgtcaaaccaattatcctggtcattgaggacatctttcgaaggactgctcctggcattgatgctatgataaatgtattcatcttctcttttctgcaatctccatcctacatttagtacagatattgtgcaatctttgtcttttttagttatacttggtttgtgatttgcctgagttttggtttgcagggtgtacatttagatacaaatgatgagaaggtcagcgcagctagcgtcgatgaaatgctcgaagcacttgctcatatcatacataagatttcctgtgaggttgttcttcaatccagaactaaactaaacaatgcagcagttcctttttcttttcttttcctttttttttcataagaatcagttcattgttatccatgttagttaaaatagtcaaggctgggatttgaacccaaacacactcactcaactacttgaattggtctcaagtggcaacaatccagtagttcttcttctttctgataagaaagaagaatcccaagtgtttctgcaccaataagattattcagtttaaaaagtaatatagtaaagagaaagtactgtattaggtgcataatgctacaagacacatgaaatattctctttatgaactgattagtaaatactaaataccatatatttggccagatgttttgcaagtgctcagggacggatctgcatgcgtctactctggttttattcaagatgctgtcatactatccatgggaagcaaaagtggttctagccttggctgctttttctgtaacttatggtgaattctggcttgtcactcaactctgtgcaacaaatccactggccaaggctgttgctcttctgaagcaactctcagacatgattgagtattcgcgagccatgaagcctcagcttgaagcgatacacaatctcatcaatgctgtcatgaaggttactaaactaattattgaatttaatgacctaccaacagagtacctttcacaagactcggagcaattatcagttggaaaagctcatattcctgctgcagcatactggaccgttagaagcataatagcatgtgcttggcatgttgctagccttacagatttcagatatgagtaagaaatatgaaaaccatgattttaaaaactcaattcatcttagactatgcagaaaaataacagcagcactcttgttgtgatacatggattccaggcacattgcatcagcctcagaaatatgggaactgtcaagcttggca

SEQ ID NO: 14837 - DNA, 4467 bp, Cannabis sativa
  modified_base (64)..(67): a, c, t, g, unknown or other
  modified_base (2308)..(2312): a, c, t, g, unknown or other
ctttacaaagacttagctattaatttaagtgctaaaacctttgtgtccacgtgtccttgtctgnnnngtccacgtacattgggcaaaatcaggggcaatattagtcattccctgaatcatatgttcaaagcaacgtccctaaatgtcagtgacatgagcacttttaaattagacaaagatgtcgtcacttatgtagagctcatgtagcgccatcaaattgcaaacttttgtggttgcctccaacccaggtttttccctcttgtcctgagtgaccttctgttacttctttgacaaattgataactggagtatcaaaaaaggattcactgaagagtcgcgagctctttgtctatttttgacacgcgattaaggattggggcactcttcaagaaagttatctgcaataacaatgttagtaaccgcacatacataaattttttcacaaatgatgctgggagcattattacctgcgggttgtctttttctttgcttagctatatgcacctttcgatcttcacttttgcctctcgaagggctcgttgtacataggttctcgctgaagtctgacatcgttacttatcagagcctgttcctatagttttgtcgttgtacatatgatgcggcaatcgtgatcttttgtgggcaaactacttagaacctctataatctctatgcaatctccagttaattatgtagatcgagttgttctccctgtgaactcaacgaaaagattagaatttcttcaagacaaaaataatacaagtataaaagtatgcgacatacttggaagacgattaaaatctaccctattcccttgtaatgcaaacgcataaaaccatttcaatttccagtcgcccatattagaaaccgcgccttcaatcctgtcgatcttcgagttggcccacttgctaaaatggtagaaaccattgtcgtggccaacatttttgatgttggggaaatagctaaagtcttcgacagaaggttcaccctgcgtatactctttgtacatcacgaaaaatcccaagacaatcttgtagctattcggggtgagttggaagagtgcgacgttgtaatgagttagattatttttgacgaagtggaacggaactacgaccccacaacgaagtatgagaatcgagacaactgcaacatcggtttggatcattaggtttgtgaaaggaaagcgtggttgttgtctcgacactagtactaacttcttacagccaatttgaactagattcaacctttggaacttggtcaaatctaattttcttacctgcagttctagatcctcgcaagagaatggttcttccagaggagcgtcttccacaaaattaaacctgatttcttattcttcgtcattatccacgtcttcctccccgtgggtaggcaacttaaactcctaactcatttcttcaacctcaccatttgagatagcgttggggcggaagaaacttcaaaattggtcatctttagattctttactggttttgtatgcctcatgaaattattgtatgtcttatgtggtttgctaagaatgaaatgaccaaattgttataatttgtactcttcaatagtatataaactagaactaatattacaattagtatgaatttgaacataaatattttttattcattaaaataataaactataacaaaagtgaccaattttatttatgtattcttttttgacaaaataaatttatttctcttttatatgtattttcataatgcgatttttattttctacaagaatttaataactaaatatatatgaaattattatgattgaattcatataaattctaaacttatatatatatatatatatgaaattaaaatgaaaattataattaattattaaattaaaatgaaaataataaatacaaaattagaattatgaccaaattattataaatgctaatcatcatcatcatcaatattattgaaagaatgtgatatggtcgcatatatatatggttactctaaacaaataaatggtttaaattatcaattatcaaaagaatagaaaattcatgatgatgatcatgttttaaaaaaatgacaaataaagacccatatacagttatcgatatggaatgaaatgcgtataactaattaagaaactattttcttttctttcaaaatattaaaagttgtttgtagcagctctccaatctgcgtatattgcatttgatacatttcataaaagaaatgaaggagtcggatcctctcaatgtcctcatcatctttaccatcttttttggtgaacatccctgcatcaatctgtatatatatatatatatnnnnntatatatatttatattattaataatcttaaactcacatatataataatagctaagcaaaaaccaaataataatattatacaagaggagagtattgagagtaatgtaaaggtcatgcatatagcaaatttaattaagtaattatagagtgacataatttttaccatttcaggtaatagattgtcaatttcatggtgaaattcggtccagacctgaggatttaatcaattaatattattgttaatgacgaaagtgtgcaatagataatgatatatacttatatatatatatatatagctagaagtagagcattcacatatgtaattattaatagtaaattagcatattaccctgctacagaagaggagttttgcgaatacacgtaatggcaaaggattaaaatctaagaccataggattacgtcccatttcctcaacaggcatgaaaattatcaatacatttctcgtgtaagtgtcaaataatgaccattcttccaaaatttggtgaaacaataacttggaagttctcttctgctccaatgaaggaatcacctaaataaaaaaacttaaagttaattaaagaaaataaaaattatctctttatatatataaactgagaaatacgaatggaaaaataaatgaataaagtatcatacaaacacaaactatatataaaaaagaagattagctcacctttttcataagcctatttatcaaaactttcgcatatttcgtatgaagtccttttgtcaatttctcccaaatttctacgtagggtgttgccaagaagattttatttacagctctgcacatgtgaagttacaatgtagccaagcaacaaattactggcctatatataaatatatagatataagagagatcttattacatattttgatgaatttagctaagtcagtattaacaatattaattaaagcataaaatatatatctatacatatgtacttacaaggatgctttcatttggtcctcttgattccattcttggtcgttattttgatcaagcttcttctctattttctcaatcgattcagttatcatcggccatgtttgatatgccatgcttgtcactgtctccgttgccttcttagtgcactccatgtcaatggttgagtacttttcttgattatttattattcctaattattaacaatcaccaattcgaaaaatgaaacggaaaagaagattaattaagtttcttgactttcttacacatgctttcttggttaaattcttgaaataattaggaacacatatatagtgatgtttgatgatcatgatttgcttcattttatgcttatatatattgtgcaattattacatattttacaacattaaaattatactaattgaccatatataagtagttactatgaatatatggctcaaatgattgatcataaaacttcataatgaaagaatagtttgattataagtacatcataataataataaagaataataaatactattacgcccccccaaaaaaatatagtaatactaataaaaacacttacctagataatcaatcgtccttgaagttgggaagaattacaatgtaatgaacgcgtgactgaagaaagggatataggtatatgtatgtagatatatttatactagggaaaacgcagaaatatgcaaagcatatgttttcatatagcttatattaaagggatttttttcttaataggtttcttagatccaaaatttacatttttatcttagtatgaaaaaataaacaaaaaagaaaagaaaaaacaagaaaaaacttttttttttttttcaaaaatacaaactgagtaaaacaatccccttcttcctctttctcattcgtttccagtcgctccagaacttctccatatctcctccatttttgttctcaaccaaggtagaatttcaggtctaaaaaaaatcgttaatgagaagggtacaatcgtaaagcaaaaatcgtacaagattgatgatgagctcgtcttcttcttctatgaagtttccatgtttgagatcaggtttgaggtaattaatctaacaaagcctgtacaattcttgccacaccttaggtagtgagcccttatgtgtgcaataagtcgatcatcttcttttttagtccaagtccctttatttgtattgagcaagag

SEQ ID NO: 14838 - DNA, 3441 bp, Cannabis sativa
tttgagcgtaaaaatgtaaatattttacaaaaaatagtactttctgtaattattccttttaaattttatttcattctatttctattcttatattttcattaaatatatagaactctatattgaactataccatgtgcttgcgtgtaatacaatttttaaaagtttttgttttgacgcgcgcgtaggtggcatattgagatgccaggcatcttcgacggttcaattttgatcatgtcgaaagctgggacaggcactgctatgtttagcatgggtatgtatgtatatatatatatataaatatatatatatttataatctaataagttatagaaaattatacatatacagatatatatattaattacataatgaataattattaatttttgcagggattttcatggcgatgcaagaaaagataattgggtgtggggctcggctaactgtgattggcatggtgttgaggtttatagcaggaccagcagctatggctattggatccattgctgccggtttgcatggcgatgttcttcgcgtagctattattcaggtacttcttttcaaccatataataaattacttaccaaaggatcaatccatatggagtttatattatttatcactttggcacacagtcaaataactgatgtaattctaaaaatgtgttgtaatgctatatttttaggtttctgcaaaaatgtaaaagactcttttttataatattgtgctaaaagttagatgaaatttggaaaaacatataatattgtccaattttacatataacaattaatacattattactattattttttaaaaactatatttaatttagtattaaggagtatatagtatttacaatatattatcatttagtgactattattgtgatgcagtcagcgttgccgcaatcgattacatcttttatatatgccaaagagtacggattgcatgccgatgtgcttagcacagcgtaagaatatctttcatatatacataataatattcattgtcttacactatatatatttacttatgtatatgtaactaacggtgtataaaatattcatattgcttttctctaaagaataatatttcattttcatgttattacttaataaattaaaattatgatattataaaatatttaattcaatttatcttgatattgttcacttgtttattgcagggttatctttggaatgatcttgtctcttccggtgctaatcgcttattatgcacttttagatttatacattaactgaccccttttttaaacaccttattaatttgtgttgacatgaatttgtaatgtattatgtattcattataattggcccatatgttgttaatctacgtaacatagtcaacttattaattaacttataataaagatatatagaatgaaaatttcttaatggtgctttgaggcggttgttattagtgtgatttgctagtgtaatttcatatggaatctcgcgtattttattttgaaaattgttgaccatgaatttggcaataaaatatatgttgttgggaaaattgagatattaaatgtaaatatgaaaccaattgttattaactctatgctttaaaatacaaggattataataaaaattaaataatgttacaattctattacaaaaatacatataaaattcagaataacagataaagaggagaacacaactcaaagactataagcaataagtaaataacacaaagtaaattgcataaattataaattattggagttcttataaaaatattggattttcggcaaaaatttataattttactgtcacgcagaattttttacaaaaatacaattcttttataaaactaacctaaaataacaagacagaacaattaaaaataacaatggaaaaactaaaaaaataaccgtgaaacaacagttaaaacttaacacagtatacagtataaaacttacacagtattttttttaaaaaaaaaattccccttacagtagaaaagaaaaaaaatttaaaatttgagtatgtagtataaaaactcctatttaaaatcttaagatttgaaaatgatgaatatctattttttcaaaaatgtgatattttatcattaaatcttaatagattttttaagaaacaagatattgttaattaaagtttatattttaaaaaatagagctattttatttaaatttttaagattacaaaaatataaaatatctattttgatattttatcttaaaaggaaattttaggaaataaaatatcattaatgcatatatatatatgtaaatttcaaaatttatacatataattaaaattagatatttttgaaattaaatatttagttatttataaaaaaaattatttaaaaattatattttaataaagatagtcaaattgcataataatcctattttttctatctatttgctattagtgttttttatttgaattatttttttttttaataaaactattatttaatatgatctaaataaatgtggttaatttgatgatggatcttatgattcataataattcatacatttgctgatagataaatcaaataatttgtatcaaacaagtaaatttgaaatttttctttcatttgtggcataacttaaaaatatattaggaccattcaaatcttatttttatatgtgagtccttaattgtttttgtgctttgcttatatgcataaagagcacatttaatttaggtaattaaaatggactaggttgctaaataaaacttcccttttagtagtagttttatttatgcctaataatattgtacttattcaattaataataattacttataaaatggttaacttcctctttttgaactcaaccctccctcacatgaatcacccaattatataggttcatttgccattttttaaataattgtattaggctagctaattatactagtttaacctaatacaattgaatagcaacataataaattttaaatatatgaattaatatttattaggttattttgaaattagtttaagaaaaactcatttaatttaataaataaattttggtcaactaaaataaatgtatttttcaattaattaaatagaaaaatatattaaaattgagaaattatttattaattttctaggtcaacttaaattagattatcttcgcacatatatatatcaaagaaaaaaaaaatataagttgaagaattatttatattaattcttttaacaacttaaattggaatattgtctttaatgtaacatatatactaattttgaattttatactagtaatttaaaatttatatatgtatctattctatataaaatgtggttatgtaacaaaattcttagtttaacggtattattttagtttcctacgttaactttaacaaaatatccttaacttaagagaatattttttgttaattttataatattattatatatatattt

SEQ ID NO: 14839 - DNA, 3906 bp, Cannabis sativa
cacaaggagcctatgtaaagttcaattttcgaaaattatcagctactttacaagatcaaagttaatggagagagcctacaactgacagtaagtaaatttagtacggagactaagggcaaaacatgctattgatacaagagaagaaacacggtattagagctgagaagagaaagtagaaaggacttggtttccactacttatttacaattttctgtatacagatatccaaacatcttatccagttttcagaaaaactggttgatacaaataaattggttgatcaatcaataccccaggtaaccatcttggattattattgcgtcctgtcatcaaacatctactgtaatcatcaaaatatatatatattttttttctttttgttcaaatatttgtcaattcataaatatgtattacacattctgcaattcactcacatgaccaaaattcttcacactcatggagtgtatgcttgccggtggggatgagctccagcctgataaagagcaagatggtgaattgctttaggatacacctccctcaaatcaggatgttgagcagcagcagaacgagctccctcgagggcattcaatgcacgggcttgctcaagagccttgctgttaccaacatgtaccgaaaggtaacatagtaactttgtaccctgaagttgaggcttgccatcaaactttagcagtctcattaaaggagggacaccctcaaattcaatgatggccttagaatgctccacacaattgaaattatccggagagacaaacttagccaaagcagtagcagcctctgtagctacatcaacatttgcagcaccaaggcatgcaaccaaagggccgacaattcgggtttccctagccgaaaaagttctagccaaacacccaattgagttaatggcaggaatttgcaatgccggagtaccctcttgaataacatttagaagctgatcaacaacagctttggcagctggagaattggtcttaaaagcagctcttctaaggtcaggacaagactcagctacagatacaatctccttaactgtcaataaacaattaatctgcaaatcattctcttccttctctataatcttagctaagcaaatcatccctttggtctcagtaactttacgactattaatcaaactttctctacaaagtttccaaagagcctcagcacagccaaccttgagcttatgctttagctcaggggactcgacatctttctccttcttgtaatacccaccacggatactaccatcagaatggtgagaagaaaaagagggattcgaagtcagactcgaatgggtctgaaaacttccaggttttccagtcaattctttatttatttgaacaatggaaagaatactagttttaccggaattaatcttcggctcctcaagaaccgtatccatggcgagtaaagacacaagcggccgagttacgttctctctggcaaactcctcttgtgcatcagcatcgagctcggccatctgggccactaatttcaccagcaagacttgaactttcatcggcgagtccccaagaacctgaacgataaatggaattccaagagcatcggcaataaatctaaccctttccgagtctgtagcaaggttaataagcgcattggcggcggcaatttgagcgtccggtgaagaactctctttgagaagctttaacaatggcgtaactcccccttcgtcaacaatgatcttcttgttccgatcgttgtcgcgtgcgagggacgcgagctcgttagctgcgtcgactcgggccttgagctgacccatttgaacggttgcgattgaggaccaaacccacgaaagaattgggtcgttactagcaatcggaggaagagaaaggttagcaccatcagcgtcgaaaatggagataacccatttcatatctccgatcgaagactcgagaaggttcaaaactttacggaaatcagcagtggtggttatagcaaagacttgacggaggattccactgtgcttgcacttacggaccaagtttagggctcggtcaagattcttattcacctccgcaacgattcgcctaacgggtcgatcgtaaacggactgagtcgtcgaagcgagtcgcacggcggagcggagcaactgggaaagccggtcgacctgcttagcgagttcggaacagtcttgcttagatgactcggcttcttgagccaatttgatgactcggtcagctaagaggattggaagtgagagctcgtcttgaagggtcttttcctcttcaacagccgccattgttggagctggaagagctctactactctcctctctaatctgtaaaaagaagaagaaagaaagaaagaaaaaaaaacagtaactttggcagaggtatcaaaatctagtacttttgatcagagttgtcgactcagtctgaggaagctacctatgcccactcacatacaacttttttttttttttttggtatttcgaagtcaacattttcgaccaaaaacgaaaatttagtcaacaattataaatacaaagaatttattaattaatcaaaattaatacacagtgaatatttattaatgatataattaatttaatttgctacaaacacaagacataacaatcatttcagatgtacttaacttaattattacttatttaattattacttatttagtcaattattattgctgtgtaattattgttttttcaaatttaaaaaaaaaattgtttatggcattttaaaacacagtcgtagagtttaagattaaaatatatggtgatgaagtagagcctaatgttttgccacgtcatttgttcatgaaaataattttgaggttgggggtgtgactgttgtaaggtgtgggtcaacttttcatatttatattcgtattaatatacagtccacttgttatttttatataatatataatattagtgactacttttatttatatgttattattatttggaaaagctcgagaataataaagaaaaatgtacacgatatatacataacatttataattaatcaactgtaattaatacaattaatttaatgttgacagtatgattaaacgatccaatctaatatttttttccaaatacattttaatctaattagtaattgaacttaaataattattgttactattatcaatttgctatctttctttattgagaaatgttagaaagcacttactttgtgaactttataaaatgtgatattgttattagtgtttattgagttacacttattttattttaataataattttattatttcttttgagaagaaaactccaataaccacatttcaagcaataagcttaaagaaaaagtggaaagaaaaagtggagaagagattgattatattaattcatctcatctcatgtaagatcagatataaatacaaaaaggataatcaggtcaccaaatctagctaataacttttgacaatatgtatttaaccaaagaatgagcacaaccttaatagatttagaataaaaaaaaagactagcaaagtgaaattcaaaaaacctatgtctaaaatttgttaatattaaacacaacgaagtagctaaagaaacctagttattaaacctcaaaactacattcaaacaacatattcaaaaaacgcattctaaaaacccaatagacaatattagatggcaatattttttaaagctaaagcttccgctatttcaagagagaaagtacctaaaatgtgccaaacagcagaaaccataacctcaccagtggagtgacgaaccaccataccctaaccacatctatcattagaagcttcaagagtaacatcaacattgatcttcattgttcccctaccaggcgacacctaagcaaaattgggagaaccatttggagaggaaggcaagttcctaagtgagtgagacaca

SEQ ID NO: 14840 - DNA, 3958 bp, Cannabis sativa
ttttttttttttttttaagtttctctaacttcatgaaaaagtaagtgtaaggttgcaacaaaactgatgaatcaacatcggctgtaatctctagtcttctaagccaatgatgcaaatcgaaccctctttatagctttatttggtgtaactacttgggtcagataaaaagaaactaaagaatctatctcagcaaatagacaataaaaaattaatcagccataaaattcttgacaataaaaaatggtgttctaacttaaacatttcttatgtaaaacacacataatgaactaccttatatccatttatgtaataaactcttaaattagacacaacaatgagatttaattccctcttttgtagacatgcaaagaaattcagcaaaatccaattgcagatgggaattctataatggtgacaaggaaaagcagaggaaacaaacttactaaaactaagaaattcagcatgttttttatggtaacattatgttatgtttaaaggttatttaagtgagcatatatgcatgttacatgagcttataaaagaaaatgaagtaaccttttcaactttgagtttgacagaaactagagcatctttatgatgacgaggacgacgatgatgattatcgtcgtcttctgtctcaaccaagtctgtcaaccttagatcttggagagacacaagaaattcagaatcccatttcccttgccatctcccatctcctgtggatatcgttatgagacgccgcggtggaattggaattggagccatgccatgattactacttctgctctttcttttactaatctgttgttgcagcctcaagcatcaaataccaaaatatatgatgagcaaatacatcataactgaactaaaattaagaaaaaaaatcactactataatgaaatttagcattaagttaaagatgtaacataacatacaatgttgtcaaaaaatcaaaaagaggagaaatgaaagtaaaaagatcatatggccgagctgggctaaggcagactaggcccgcgcctagagtccacccaacctaggggccaaatttttttttttttttaaatatatatatttttttagtaatttttaaaaatattacatgatttataaataaagattttaataatttttattttcctaaaattcacctaatttcaaggctggctttggatcataatgatgagaatacttgtgtgttgagcctttgatgaaatgtatcatataactgaatagagaaaattgctctaatgaaatcaagaaaagggcaaaagagaaatgataatagacactcacaatgacattgagatttctttgtttgaatatccttggttcaaatcctacatgacaaacaaaagcaattaacaaaaatagaaactaaatttatttatttatttatttatattaaaagaaagaaagaaaaaaaagatggtatagtaagattgagtaccattgatatgaagatgattaaatttgagaaagctagaacggatggccattgttgcagttgtttgaggaagtgggagaagaacgttatccacttctttctttctcagatattcctgtgtgtggttataaccggcaaccggttcaactatatttttaactcaaaaaaaggtgcaaacataaattaaacacaaattttgactaagagaaagatgacttaccaagaatttcttttaccaatgtcaaatttagatgtacaaatatctactctggtttcatagaaatgtttagaaattactatttaaaaaagatttaagattactcagttagaataatctcttttttattacagaacttaaaataaaaaaaaatttataaaacacctcataaaaatattaaagattattattccctaactaacaaacatgaaaataataagtaaatatttttttaattaaatgcaagtaagtattatatttttggagaattatctcataaaatatttttttttatttttttttaaaatttacggtttaggttgttttagtagtttctatgtggattgttatacgaattttaattgcgatttaagttgctcctttaattactgtaaagatttatatataaaattcaataaaaatacaaaataaatgtaaaaataatctgaatttgttagtaaagacatcattttaataataataataataataataatatataaataaataaagataaaaagacaaactatttatagtcttctctctcttctggtttattctgtgtggtgagtctgaacttggcttggctgcccttctagccatggcagcaacatcttcttatcttcatctcaaaggttagtacaaattcactcacagaattcatcctttccatttttcttatcttatttgtcctctgtttttctttcttttttccctactaggatggccactttcgatatcaaagccaggaacttcaaatgtcactgtaaggattattggaactgggttgttctgtaatgctcaaaattattctatttatgatttataggaatttatttgtatatttctctccaaaaaaaaagaatctattcgtatatttaaatattaatcttcgtctccttaattggtttttaatgcctgaattggtatgggtaaccaaaacaaaaaggaggttgtagataactttcttactacaattttttaagtaaattcctttggatttagatagatttagcaatgaaatttcttctaattttcttttggatgaactgcaatgctattaaattatggaattggataacaagtatatggaagctagatcactaattttctaccttagcatatagatttttcctttttagatcaccattattgataatggcattttaagtagtatgtttacaaagaagagtaaaacggttcttgttgattatctccatgtatggaatgactagtacggttgagaatcatggggtttcatctcaaaaccaattggtgatgagtggagtagcttatgttcttacatatggcttaatactttttacatttaatctatgtgggacaatgttctccaataagtactataaatgaagactctaaactttaagatttcaatttagtgaatgcaaattcttgtattactcttatgaatttttgtagctatcttgtatagctatttgattcttatatggcaatatatgtttaatatttgattctaatgttttgtttttgcaaacaagttaaggcttcttccactatggttgtgacaggaaaggtacatgttcccaactaaaggtactaagctgagtcgaaaagttgcagggcgtacgttatgtttcatcaaatttggaacctctactaacgtcgagctcacaaaactcgatatgaatcctttgctgaagttacatgacatacattcagttgcagaagatttcaagattgggatctcagaaccatcacatggtatctcaaatcttgttgggaaaatggtaatgttaggggatttggaccctgctacagcaaagttggctattggcattttaggaccctttttatcagcattttctttcttgtttatagtgagaatagtcatgtcatggtatccaaaagttccagtggggaagttcccatatgtgctagcttatgctcctacagagccgattcttgtcgtaactcgaaaactgattccaccccttggtggagtggatgttacccctgtggtctggtttggagtaattagttttcttaatgaaattctagtaggtccacaagggcttcttgtccttctgtctcaacaagttagctagtgatactttttacaagatgcagggagcaaagaaaattgtctttggaggtcattttgtatataatttgatctcatatgagtgagataagaaaatttttattgtagagaattgaacttttgttgttccatattgttatactaggtgaatatacgtgccgagagtcacgtattgatagttttatttaagattttagtctttttaagattt

SEQ ID NO: 14841 - DNA, 4781 bp, Cannabis sativa
cccctcaaacttggaattggtgcatggactaatgccaagtttggttcgaaacaaaagaaatcgaggagtagatgtggctttggtgaaaccatctgctatttggtctgcagcaggaacatgttgaatgcgcacctgtttctgagcaagtttttcacgaacaaagtataagtccagctcaatatgcttagtcctagcatggaggacaggatttgcagtaagaagaatggtactcaagttgtcacaccagatgacaggggacctaggaatctgaacatgaatttctgagaaaagagagtgtatccaagagatttcagacacaacttgagccaaactcctgtactctgcttctgtgcttgaacgagaaacagtgtgttgcttcttacactgccaagcaacaagattagagccaaagaaaatggaaaaaccagatgttgaacgacgatcatcaggatcactagcccaatctgcatcacagaaggcagtgacatcaagttctgttggtctttggagagtcagaccatgagaaatggtaccactgagatatctcaagatccgtttaactgcattccagtgtgtgtgaagaggattcgacatgaattgacacactttatttacactgtatgagatttctggcctggtgatggttaagtactgtagggctccaactatggatcgatagtgctgaggattctcaacagggtcaccttgaaaagcagaaagctttaatccactggtcatgggagtaggggcaggtttggcatcctgcatttgagccctactcaacaaatctttaatgtatttgccttgagataaatgaagacctgtctctgtatgttcaacttcaatgccaaggaaataatgcaattggccaagatctttaagagagaatttgctatccaaggcctgaataagagcagcaacttgagtagcatcactaccggtaatgatgatatcatcaacatagacaagtaacaagatcatagattgagaagtatgttgtatgaaaaggctgtgatcagattttgaggagacaaaaccaaaagagagtagacattggtgtagtttatcaaaccaagccctgggagcctgcttaaggccatagatagccttattgagtttgcaaactaagtgtggagcatctggcaactcgaaaccagggggctgagtcatataaacttcttccttaagatcaccattcaaaaatgcattattgatgtctagttgttgtatacaccatccttttgctaaagctagagacaaaacaatccttatggtgacaggtttaaccactggactgaaagtctcagtgaaatcaaacccaggttgttgatgaaagcctttagcaaccaatcgagccttgagcttgttaatggtaccatctgcattaagtttgatcttgtagacccacttacacccaataggtgttcttccatctggtaatggaacatatgtccaagtgacattttttcttaaggctcccatctcatctgacatggcatgcctccacttttcttgttgcatagccatttttacattagtgggttcttgaacagcaagataaactttgggtttaaagatcccagacttagctcgagttttcattgaatgtttgtttgttattggaactttggactgagacacagatggtagtataggttcagtggaaactgatggaggagactcaagagtaagaccaggacctggagcatcaggaaaaaattgagtggtggactgagaagagggaatgacagagacagtattttggagttgtggaggtgactcaacagtggcaacaggttgataaacaggtgtttcaggtgtgagagcaggtggattagaaggaaacaagtattctgcagtatactgagtagtagactttggaatagtagcagagggcatagtttcctcactgctagaaggcaaagcagaaggttcattgttgggaaaagcatatggaaatttggtttcatcaaagattacatcacgtgaaatgtataatctccctgaggcatctagacacttatagcctttatgattcaggctatatcccacaaatgtacaaggtgaagatcgaaaatctaatttgtgtctgttatatggtctaatatttggataacataggcaaccaaaggttctgagattactatactcaggtttaatgttgaataacctctcaattggagattgttgttttaggacaggagtaggtaatcgattatgcagatatactgcagatcgaaaagcctcatcccagaatttgagaggcatagaagcttgagcaagaatactcagtccatgctctacaatttgcctatgttttctttctacaaggccattctgctcatgagtagtgggacagggatgtctatgcacaataccagatagtttgagtggttctgtaaagctcctaaactccccaccccaatcagtttgaagcaccttaattttcttacctagttggagttctgtttcagctttgaaaaattgaaaagttttaagggcttcagatttatttttgagaagataaatccatgtgaacctagtataggcatctacaaagctcatgtaatacttatagccattgtgtgaagtgacatatgaagggccccaaagatcagatacaatgagttgcaggggttcagtataaacagttgtggactgttttgggaatggcattttgtgtatttttccaagacaacatgcttgacaaacagaattggtatttttattactaacagagatattacaagcattcagtacagaagtaacaactctttcagaggggtgtcctagcctattgtgccacaactcaaacacagacacagatgaatcatgacaattattacaagcattgctattcgagacagaaggactaggattagaagttacaagacaggcatgttgctggttttgcagattggaagtagaacaagatgtgggaatgtgagatagcacctggaattgatcttgatcaaaaatatataggccattgtggagtgtcccagtcaagattgtgactttggtcctcagatccttgacataacaaacaaacgggtgaaattcaaagaaaacacaattatcttgagcaaacttggaaacacttagtaaattcttagtgatttcaggtatatgcaaaagatttttaagaaccaaagttttgtcagattgctgagatttaaaaaatgcactaccagtgtgttgaattgtgaggcctgaaccattccccacatatagcctttcctgaccattgtaatctgcattttgaaccaggttggtaacatctggagtacagtgattcgtggcccctgagtctgggtaccatttggtatctgtactttgagtggggattgacacttgagcagcatgagcttgcatcgatttgttgctgtctgaagtaggaatcacaccagtatagcttttgtcgaatcgataaaagcactccaaggccaaatgtcctgtcttatggcagatctgacattgtggtttgtttggagtagtttgaggcctgcctccaaattgattgaagtaatttcccctcccagaatttatagaactcgatccacctcgggaattaaagccagaattagcatttctgttataataaaaacctggtggataaaaagaagggttgtagggaaactgacctcgaggggctccattggagcccctgaaatttcgattgtagtgagctagaaatgcttcatatgaccactgattttccagatcagatccagcattggttgaagcaagattgacatttagatcaaactctttgtctgtcttctcgattctggattcagaggcaagaaggagagcttctatctcagctacggagtatccttcaatccgagtattcgacgagatgatgaacgtatcatattcgcttggcagtcctttgaagatggcagctatatgatcacgcgcagacatgacttcaccaacagaagccagaagatcaacgtgttgcttcactttcagtaggtagtcgtttaaagataaggatccttttctgagattctggagttttgttctgaactccaagatcttagatgaaacctgaagagtaaagtgcttttctaaggcactccagatctgtctggctgtgttgcacccaaccattcgagtcaataaactttcagtcatggaggataggagccaagacaccaacagttgatcttgaacctcccattccaagaattcaggattgtaattttttgcagaatgatcagcttcactcagaaattgaggaggaggagcatgatcttgaatgtatctcatcaatctgttgcctctgatagcagcaaggatctgttgtttccataggaggaaattatggtcattcaacttaatcgagatcgaatgattgaagtacactggtgaggattcatcttcctttgatctggatcgatttgcattcgagaagcctggtggaggaccagtgttgttggagctggaattgttggcttcaacattagccatattcgccaccaaaggtgggaaaggctctgataccatgtaagtgtttggagcttttcttaccattgttgcagaacatcaaagatcaagaaaggaagcaaaagagaagaaagatgaacagagcaaacagagagaaagaaagaatgaattccattgattgtattgagctgaacaatagttccttatatacacagagatgagctaacaaactaataacagaaaatataacaaccactaacaaccactaacaactaaccaactttataactgtcttgacactccccctcaaacttggaattggtgca

SEQ ID NO: 14842 - DNA, 7631 bp, Cannabis sativa
  modified_base (40)..(41): a, c, t, g, unknown or other
  modified_base (2905)..(2915): a, c, t, g, unknown or other
aaatatttaaaattccgtaaaaccgtatttttgtaatttnntttttatgtttttgtgaaataattacaaaatttatagcactttaatagaaatgttgataaaaaaagtgctaaaagggtagtgtattgctatattttagcacacttaattaacaaaaattactattttaatggtgttctaaaatgtgtgttaaattttgcacatacttaaagttgtgctaaatttggcacaagatataatattgtgctaaatttggttcacaataaatattattttttatttatcataatgctactaattattatgatttattgacttttactatactttacaatctttatttactatattattatattatcattatttaaacaataaaacataataatttttatacattcttaataaaatatcaaataactgtataattaattattattttttttacttattttacaatttgttcattacaattgtaaatagtgggctaaatataatacaaatttattttttgtgccaaaattagcacaaaatttaaatattacattggagatggtttaacatgatgctattcttataaatttctttttagaggagtgctaccgtcaacttcctattacaacctcttagtcaatctctgtgcctgaaaataatttcggaatatttttttttaattttttttatgattgtatttgtcataattatagcatcatttctgcaaatttttaaaaaatttcgaatagtttccagtgccgaaaatagatttgaagttttttaaacatgagtggtaaactagaatatcagaaactctattttcggtattgtaaaatattcagatttttttaaaaatttacagaaatgatattataactataacgaatactattaaagaaaaaaagaaaaaaaaatattccgacatataaattcgaatgtagaaattaattaaaaaattctaataagatgttgtaattaataattttttttttttaaaaaaaaaacaagtgcatagctataagcaccctatgatgttgaacacatgattctctttatcatttatctttcgacaacacataactatttatattatataaagagataaataatatttagtaattaagtttagaattttaaaataaaaatcccagtcaagcatgcaagttgcaggggtataggtctgcccctgttttatgtatatacattataccagtgcaagtaagaattaatacgagaatatatagggtaggtgaggttgtactttgtggatttgaaccgtattaattataatttattgtacaaatatatttctcctcttcttttttcttttttttttttgttttgtttttgctaatatgattatcttagattaatcacatgtataacctgacaagtatagttaaaatctgaaaaggctaaaattatctttgataaataaaaactctacatatagttttgctctttataccatgtttataaagtaagtaagcattttgcacattgtttaggcgaagtagtctctattagaggcattaattaataataatgagttagagaattttggagtttttttgggtaatgtgatatgagaagagaaataagtatagggcatggaaagaatgtgtacgtacgttggccacagtacagaagtagcaagaagaatcttttccttaattactcaagcatgccaaaaattatgatgatgctttttttttctttctctacaacactgtatttaatggtatggcaggtaagaaatttgttatgacaataattactaacacataaaaatactctcttcttgttataattagactactgcaccagcacaacttgatcataattagctttaaggtttttcctcttacacaataaccaaatactaaaaaaaaaatttcttgtttatgttcttcttatatgtataaaactaatttttgttgattcaaaacaacgctaaagagaaaaagtagtttgtttcaactttcaaatctaagttatggaacatttgctaaaagacttaatgaaactatttattttcttctttccaaggaagaaataaagaaaggaaattggagagagatgagtaaagactaagcgctgtgagtgagtaatggtcaagtcttttaaccaaagacttgaccaggttatagagagattgactgaactactataatggctgtcataaatgaaaaatgtaaattaatttatatgtatattgagatttgaaaaggaatgaggtttatttccaaaagaattgccggcaaagaagagtgtgtttttagggtactatttattgaaaagaaaagaaaaaatgcagtggtagttggagaaaaaaatgataataagagtgaaagaggctatagtttgaagcagtgaacctaggaaatgatatttgatgaggggggcaaaagggtataccaatttaccaaaagactcaaaacaaagaataagttaagttgctttttctctctccctctgtgagttttgataaataaatgctgcttctatgaaaaatttgaaggaaaggtaagatcaattaagctgtgagagaaagagagatctcatgatcttcctccatgccatgatgttatgttatgttatattcatattattatttttgataaattatatataaacatccaatccgtaaaaataaatatgacattaaaagctccagatttgtccccgtgagcagctctttcacgattcttgtaccttgttcatgaattaatgttccccaacttcctttgtcgtttggtagttgaaatttttaatgcaaccttcttcaatgctaccacaccctcctacaccagctctctctctctctctctctctctctctctcatgttattggttattactatcaccttcttcatcaattcaaaaaacattcactctctctctctctctnnnnnnnnnnntctctctctctctccctctttctctctgctctctgttattatatgtactactcttcacccaatggcctctcccacttatagctagccttcttcactcttgttatctctgtcagttcattcaaaatatgtatatatatctttactcatatatacataccataccacacctctagagataaacaaaacagataataactgtatatattcatatataatatatatatatatatgcaagttttcaaggttactatatagcagtagcagcagtattctcttcccatataacaactttgatttttttttttttgtaacgttaactttgtgttttgctttgttttcttaatctttcttgctgtgtatatattagatatgtatatatcatataaagaaggtgaatggatcagtttaacgggatattggtccggttcaataagaaagttgagttcagaaactgattgagttctgctttttgattgagccgtgccaatatcacgtgccactgttcttctctactcattctcttttcacatcatcttcttcatcctcttcctcgtctacaaaggtaacatcttttttcttttatttttacctcttttactttgagaataagattcatgctttatcactgtttttgatgtttctttaataattatcagttttcatgttccacagcctagttattctttgtcacttgaagttagtgactgatgagaaaacaattgaattttcttttattgtttcacaaaaaactttgtacgtaaatcttagtattgtacattatttcagagtttgagggaaagaaaataaggtgtggtttttggttctttgagtcacgtagtatgggtttgttgagtagaacaataactatattgtgtaatcttttattcttcccctcaagtcacttgacattaagaaagattacagattgagcaagtgtaaaccagggtatgatatttataatgtacatggtgtttgttttgttcttttaccacatattctttctgtttctttttccagtcttcccttgtatatactgtacttaagttttactatctgagctctagtgtaaaacacaacaaacctaactccagattttgaagcttgggtttgacaatgaaaaaacaaaaggttcccaaacattaaacaacaaatacatgcataaacaattttgttatgttttcttttcttcatattggtatgcacctataattgtgcgaaacacataaacatagtgttctctattcatattaaacaggttctcttttccatcgaacaattcttttaaagtagcacaaaacatttttatctagctttcccatgtaacaaaaataaaaatgaatgaagaaataaaactagtcaaatctcagctaacttgtacggcgttgcttcaaaggttgtctctttgtatttaacacattgtggcccaaagagagagagagagataaagacataaacaaatagaggtataaactagttaaatattgtcctccatgattttactgttggcttattagccatgtctgtaaactgtataaaatttattcatatttcagggcatctcttaccaaaatcacaaagcacctcaaatagagcatgagcattaaatagtgatgcttgcagggtggttctgtgtgctctctgcatctaaaacatggcgctgtgacagagtcagattccttgtgtcatgtaataaatggtagaaagagagatttcaatacaaaaataatgcttccatcatagatatagatgtatactactcccaaaaggaaaaacgccaaaggcagtaagagtcccccacaaatatgtgtatttattaagcacttgataagccataatagaactgtaacttacaaattggctcttcaagcctcaaagaatagaattgtggttgtcagcctctacctctgcttccattttgggctgttacaatggccattctcctatactaaaatgaaggtggtcccatttagcatatttctccctctccctctctctctctttctcactctctccctctctatatgtgatagtacaattttactataccccaactaaaaagattaaaaaagtaaagtcaaaaatacgtgtatatgcttttgtactaggagctcgaaaaatccttcctgaggctggaagaagcgaaagagtttgcctcttagaacgaagcactccacaaagcattctcaccctctccgcatcgcctgtggacttctttgatgcgatcagccgacctacaaatcccactgcaggtccaatcaaatgaagcaacgcagacgtttcctgcttgggccttccattcacagtctacagccaacatagtcaacataagcacagcgtacttcaagatctatgcaagtcataacttctaagagatcgatgacttaccaggtggagtaccgcaacataatcttcgatcatcaatatgttccacgtcaagtccgatgaaccaagatcccaaagagacatcctcattagcatacttatgtaggacatgcctgaaaaacatagtaaagatgttttaagagccaaaatcttaataattgttttataaaagtttccaataacagaactttaaataagcttactggttaattgatatatactgagccaaatctcttgagatggcatatagctgtcccgtggcatgacggaaatacttgtttccattttcaccaaacttccagtactcaggttcatggtatctcactcctctgtgtgacaacaataattaaaagattttgagttaataaaacttttcttatttataagaagataagaaaaaacacacacacacaactatgagaaaatccccctcacttttgtgcaaggactggaccagatttcatgcatccaatgtacacccgaggctttgaccgatgtctgactagcgtttctccaagtgttgctaagaaaattttacacaagataaacttattagtgtgacaaatattacataacaaatcaattcaataagaaagttttacatggcaatgtatactgatgtttataatccgaaatttatatttgagatgcgaattaacagacaatttacatgtcttgtaaaataaaatagagaagaagaagaagactcaccaatatttacatggacatcatcatcaactttgacataaaaatcagcatcccacaaagcagcggcagtagcaaaatatatttttgtcttgccagacaattcaaggtaaccttcaacatggtcctgatcataacatttttaatattttcttttatgagtgattaaaaataataccaaactgaatttacaacaagtgtagcatcaagaggagaactacaatatagaagaagaagaagaagaagaaaaattaccagtcttaaaatatctccatgtttcctgtcttctgcttcaacagctctgtctagaataccccctgatgtggcactaaatgaggagaaaaagaaaattgtgagattcaattgataactttggacagattcttcaactgataaaaggcatcagcaattaaatttccttgtgacaatgtgaaaacaaatgaatcccccattaacaaacagaatggccaagattgacatagaaatacaagaataagaatgggaatgagaatagagatagtaatggagttgaataaaatttaaaatacataaaaaagattgataaaaaaaaattctcatcttgcattgaaaagtattttcctggaatagtcattccacataaatggtggaaaagtaatttcattggaatgacattccaatactttaaaatacaaaccaaacaaaggaaaaaaaatgaaaatgattcctttccattctattctactccattatttccaaccaaacacgaccttagttttcattactagattgtaaatcactcacctatgaccaatgacaaatcgaatgataatgcccttctcctcctcaagcctctttcttttctcacctatttcaaatgtttatcagaaagatcagatgacagatttacataagcaaggtagcataagtttggctcacaaaaaagctaatgcgaagaagtattatataaaccttgtggcatccatgtagcacgaactgaatctcttcttttccggctactgaaagcagtattaataccaacaaccataagatattttctcttcccactcccggatgaccctgtcttttttaagtcttccgataagggagcaccactgcgaatggattcttgtgctgctcttgccgcagctaactccatctctaaatttgaaatggtcttatccaacgttctgcaatgaaacacaacatgattttgagttccaccgctcttacttttaagcaaagttcaaaagaatatctaaggttaatacttcatcagtgtaacttactgtattgcattgtgagtcttgacaacctccccgtaaatgtcttttgggttacgccttacctctttctgatgcaactaaaatgatgcaaatcagaccaaagaaacaaaaaaccaaaagaaaagaatgacaagcttattaaaagtaagaatacgataaaggtggaacatcacgatttgcctcgatcaaatatttagggcgaagagacaaatattcggtgtttgagataccaaattgaaagagataagaattttaatatcacataggattaaaatcgattgaaatttgaattttcaagaaagacaaacctgttaacgattgcgagtggtcctcctggcctttcgattgggaatggttgttctgc

SEQ ID NO: 14843 - DNA, 6441 bp, Cannabis sativa
gagaaagttgatgatattgaagaaataattataagagataaatcagaaagtgcatcatcaaaattcatgtcgaaaatcgatgacgatacactatcagaaattttggtcagagtctatgattatcaatacctaattcaatgtaagttggtatgtaaacattggtattctctaatatgttctgatcactttattcgtacttttattcatgaaagtcataaacaccaacaacaactagaaaccttaacatatgatgtttttctcaacttacttcccataaaacaattgtttatagagaaatcaaatattcatgatttaagttggttttctacaatacttaaaaagagagcaacaaaagagtatggatatgtggatagattttatgatggacacattagggctacctacaatgatttgttattgatttcttataccacacaagattgccacgattactacatatgtaacccttttactaaacaatggattccccttcctccaccacctaaaataatgtccactacaaattttaattacattgactattttgaccctttcctttatggatcatctatccctatattcattagatttgtgtttgaacctagtaagtgttgcaacaaagtacaattgatggggtgtaattgtatgaatggtactagtactaggtttagggttttgttggttacttcttgtagaggtattcatgatcctgatcttttgttttgttcggagactaaaaaatggagcaaaattaccctttctttcaaatctgaaggaatgatatttgatgtggttgcaaataatggaattttctattttttcgaaacaaacaatatgaagctagtagctatggatccctttaaagataaaaaaaattggtttcgtgtcattagcttgccgtctagtttaataaaaacacgttgcaaagatcaatttttggtaaaacacttcagcctggttagaaatcaagtgcgactgttatttactattaatgatgacaatgattatgacaagaaatttcatgttatttgggaattaaataccaatggtgatgatgatggtagatcaacaaagcaagattgggttttgaagaatgtgataactactttgaatacatcttggtgttatttctatcctgggaatggcgatcttatgttcttcgcagataaatataataacatatatttatttgatattaaaaagaattatcgatttgaaaaatctgatgaaaaatattgtataagtaaaattatgacccttaagcatcctgtttggcctacacctcttccatccacttggtaacttattagctaaagtcactagcaattactatatagctattctatgtcttagcaagatgtttgtctatgaaatgtggtgtgtttcagattatttagttattatcaagattattagttatgtttagcaagtcgtataaacttttcttttatgtttattagaaatctggaattaaatgtgaaatgaagattgtttacactttttcttttattatattattatttgtgtgaatagaatgtgttgggcctattttctctctagtataaattattgggcattttaatcaaaaaactattatatgttatttgatgtttattagaaatcttgaattaaatatgaaacgatgcttgttttcttcttccatatattacttctttgatttacacaccttattttgcctgtgaaacatgatttttaaacaataccatgtatactttgtagggttttctataaataagtttgcaggttaccttattttttaaaatcaagatatagttagttaatgatcaaataagcaatccaaattgagatttggagatggtgagaggtaaaagatccacccaacaaatattccactcatatataagtatggtcccgttatggtcttctctgtaagcaataatactattcaggtccatacaatttctagatttcactattattttattgcttttattgtgcacattgtatatatagctattcgataaaccactattgacatccattttgacctattgtgacaaaaattataaaaacgtgtacacttaattcttcttattcactagcttatttatcactacaagaatattatttagttttttgaaactcttgacaaaactaatgccatctttcttctatgatgtttctgatcataaccccaatatatttcgattcaaatttgctatttatttatttatttgagaagggtaccaaatatagatatagtgtaattattcaatatcggaatttatatatttcttttaataattattataaaagaaaattcaaagcctatatattgtatgtatgtgcatgtgtctcaccactcaacaatatattttgtatagcataactacataataaaaataaaaaatatatgtctccattttttgttgtctccactatttaacccataaaaaacagaatattaggttaaaacaattaacattatttagtaaaaagctggttaaaaagtggtgctaagtccttaattagtccataaaatattcttgtcattgtacatttgtacctcttttaatttgggtaacataaacatatatataaaattttatgctatatatatacatacataaaccaatgtgaaaaggattgagtcttgttttggctttctctgtattttgatgaactcatacaatcgcaatatggtaaagtggagcccatattaatttttgttttcttgttctttaaaacaaaatctcactatcatgggaatagtcactactatctccccatatagtccataccccagctggccttctatatttcaaactgaattttgttgttgtgaccctgagtttgcagcaatatgatccatctatctatccatataattatatttattatttattgcaaatgggaaaagaacgtgaaaaaagcttcactataaatatattatatcacttttaagaccaacaaaaatataaaataaaaatgttttgttattattgttttttgtaattgtatagtcagttaagccaagcaaaagaaaagaaaaagagagaagtaaaaagaagagtaagttgcgttcccacttaattatgtcttttttctatctatacctatataaagggctttaacaatatcaaacacttctcaccaataaggagctaaaaacagataagaataataatatttaataatcaaatggctttaggccaagagcgtttgatgagtttgggtttgatctggtggggggtggtgtggctcttggtgtttgaaccacatggtgtgtatggctcgaccaggggttggctatttggtccaagaaaaggtatagtggcttcccctgagattggtatatgcaagtcctctgttgtttcatatggatacaagtgccaggaaattgatgtaagtaccaaccaacccaagttttataattacttgtatagtagtatataatataattattcatttttggttttataggtgacaacccaagatggctatattctaaatgtgcaaagaatttcagaaggtagaactggggtcggtggtggcctgaagaagcagccagtgttgattcaacatggggtccttgtggtaagtttttctaatttgaacaagtaatttttataccttttgttgttttgattaatggagtgataatggcatagtgatagtggaggtggtgaagctttattaatgcttctttgacaaagagagatagtaagtggtttgattatgagtgttggtattaagtggtgtccagattatagatgatgatgctctatgttgaaactctttcacatttgtagctataaaataaagtaataagaaccgtgtttgttgggggtttaaagttgcttttccttacacattatgggcagaatttatttcagttatgttagtcaaaagtgggaagggagatcagtagaattaaaagtgattttttccatgtgtcatgcttaaatgcatacttgataagctatcattgaccctcttaatcatttcaaactaaaagtatataatttaaggacagttacttggaaagtaactgcttgattttcgctggtgtatacctaaaaagtcttcaccatgtgtcaaagggtcccttgggaaaacattcttgaccccatgtttgtgtacaaaataaatactactcgtacgtttctaataaagccttgtacgaaagcgtaataataaaagaaattaacactataactttttcattcacattttgtatgattcattcttacctttttttttacctttaatcttgtttaaacataggaccaataagttactaaggttaaaccaaagcagtaaaaaaaaagtctaatctagaagagtcataattgaagtaaaactacaaaataaaggataagatcaaaactcttatgagccaaaaattaaacatttaactgtttacgtgtgataaaactacaaattacttaggtatgaagcaagatcatgattgaatgaacactgtgcaggatgggttgacctggcttttgaatgacccagaagaaaatcttccaatgattttagctgatcgtggctatgacgtgtggattgctaacactagaggcaccaggttcagccgtagacacaagtcattggatcccagacaacccgtaaattcttcttcctctgctttattttactctgtctttctttacacacttactaatggtgtatgtatttgatatggcagaaattttggaattggtcttgggatgagctggtcacatttgatttacctgcggtttttgaccatgtttataaagagacaggacagaagattaactatgttggccattctctggtgagtactcaacaattcaccttattaatttattacacatttagttttttatatgtgcacaacaactctgtccctgaaaatctggtgatgttttttgttggcagggaactttaatagctttggcatctttctcagaagggaggctagtggatcagctcaagtcagcagcattgttgagccccattgcttatttgagccacatgaacactgcacttggtgttgttgcagccagatcctttgttggagaggtaatctaataaagtaaatatataaactcaatgatttcaccaaatcttaacaaattataagaactctccacttaagtatatatctggttaatttttctacagattactacattagttggtcttgcagagttcaatccaaaagggtaagaccaaaaactaagcacagtccaaattagtatttctatctctgatttcaattaactcaactaaagaaacctctgtctaattgtagggaggctgtggctaactttcttaagggcctatgtgcttatccaggagttgactgttatgacttaatgtctgcaattacaggtactaataccattattactttatatcaatgagaaaataaagcttctcttactaactttttgactggttcaaggccgaaactgctgtctcaatgtttcaaccgttgatctctttctaaagaacgagcctcagtcaacatcaaccaagaacatggtacacttagctcaaagtaagatacttaattctctcctaacttaaacaacaacaacaaaaaatcagttgtattgattatgttatttgtgttatataacagctgttcgaaatggggttttggcaaagttcaattatggaagagcagactacaatctgatgcattacggtgaaacctcaccaccaatttacaacctctcaaacattcctaaaaaccttcctctgttcattagctatggagggcgtgatgctctgtcagatgttagagatgttgggatgttactcgacagtcttaagtaccatgatgttgataagatctctgttcagttcattagggactatgctcatgcagatttcatcatgggagttgacgctaaagacattgtttataactctgtcgtctcatttttcaaacatcaacaataacaacaacactaatcaagtttagttggggtcagtttaatgttgtaatacaagattgaataattatacctatatgttattagtagaatctcaatcaaatacgtactttatatgatcatgagaaagaaatcttagcatactatatcatctactgagaaattttgaacaatttgtttgcacaggtctatgcttatttatggacaaatgttttttttttcctgattcttttatctagttttttcagcaaaaaaaattgtcccaaagtaatatagtagctagctattgcatgtgttttttatttaattatttatttatttttcgagagattaagctccaaagaccaccatcttttaatgaacttaaaacaaagggactggggacaaagaaattaatcattaagggtcatttaggtaaagggaaatttgattttctatacttagaaaatcttaaaattttttccctaaaccaaaaatttaaaacttaaaaaaactatacctttttttt

SEQ ID NO: 14844 - DNA, 1988 bp, Cannabis sativa
ggaacccttcccgttggcctcactttccagccgattaccgctcgacgatggcagagtacagcgatcgaacggggtcattggcgagcgagctgcttgagttgatttcggagagcctaggacttccgtcgaggtgtattgaagacgcagtgggagaattctaccagaatattacgattagctattacccgccgtgtcctcagccggagctgactttgggtttgcaagagcattcagatatgggggcgattactttgctggttcaagatgaggttggtgggcttgaggttctaaaagatggacaatgggttaaggtgcagcctttggatgatgatgccattctcgttcttttggctgaccaaactgaggtattttctgctttatatgagctgttttatgcctgttcttaatgtgattattgctaatgaattcttgagtgttgttcctggtatcaaatggatttaatctgttgaggagaaagaagaaaaaggagtgtagtttcaagtttgtttgaatctttttgatgatgataccaatacttttccttgcctaaactgtcaaacttgttaatttaaggtcctcaattaagtttatttaggaagagccttattggatgaatgtgtacaagcatatattcaaaactagataattccccattatggtttgtgcatggcgatttaaccgtattagttttttcagtttgttattgttgcaatcttgtatctagtatttgctatcttacgaaaggtttactgattcaatactctagcaaccaatctatgcttttgattcccgggttggttatggttgctcttatagttcaggccctcccttttgggtttatgggaactggaacttgtctaatataaagctttgatattataaagatttaaaccatagggtagtaatgtgaaatctttctctacatccttaggatctttgtagtggtttttttttttatggaagtctttttatatatctttggtcctaaacataggtcaattcttgttatccgagcatttaaacaattttcttcttttcttaatgtaaccaattatattttagatactgatgtcagattgtattgcctgcagataatcaccaatggaaagtacaaaagtgctcaacatagggccattacaaatgcccatcgagcacgactgtcagttgctacattccatgatccagccaaagcagtaaagatatcccctgcttctcaacttctcagcaagtcttctccacctaggtttcggggtgttgtttatggcgattatgtgtcgtcatggtatacaaagggccctgaaggaaaacgaaacattgatgctcttcttcttgaatcttgatttttggatttgaagtagcctcaatcccttcttttgccccttactttttagtccttatactacattctgtgtatgatgaaaactagaaaatgaaataaaagtttctcccatgttcataatcatcattttgcaataaaatatgtcttcttgttatcctatttcgagttcaaagataaaagtttattttctttcatcaaatacacttgcataatagtttgaaatgtgtctcctgtctcccttgcaattgtactagctcatctaaattgacacctgaaatgttttagattgcaagttgtggaatgtatgtactggatttggttgcagcataatggagaggcctagaatgttgtttcctgcctcccccggtctggtatttcgttggccatttctgaaatcatcactgcatgagagggtatgtatgtccttggacctgtagtagaaattaacatgcgctaaacacctgagatgggaacacttgtaaaatgattcaacagaaatgtaaaatgatagtaatatgaagaaaaaaaaaagtgtcgtcaagctttttttaacagtcgtcataaccgaaagaaaaaatacaacaatataaaataattttcttttatctcaactagaatgaatgggcagctgaaaaatgtgagtcaaatg

SEQ ID NO: 14845 - DNA, 7459 bp, Cannabis sativa
aaaaaaaataaaaaacccaaatgttgtaagatgaagtgtagtttaaaaattgtttattttataacttttgcttaaagttttatttatataatttatagtagtgtaattttagcaaactaaaataggtattttaaaaaagtgtgtaatatagcaaacagaattaattaatattgtcaaaataatttctttttttttatataaaaaaataatttcataaaaatggtttggaaaatatgtagggatgatattaaccaactaatataacaattaaagatttagacacttatatactactcttaaccttaaataaatgctatgtttattatgaaccgtactattttattttttaaaaaatcccattagaaaatgtaagaattttatgtatattaatttatataaatataaaaaagtgaaagttctaaatctaatagattataagtggtggtagtaaatttatacaactggtattttattgtccaaacatttttgatatttaatcaaaataaatgtttgtcatatatttttcccattctctaaaaagaaaaactcaataataaattatctcacattcctcttgttttatatctcacgtgtcactatcactgcctactaacacaccaaaaagtaaattaaaaaagtgcaaagcctctgaaaaatatcccaagaaggttttttctgtcatttactaaagcaagggtattttgggtaattcaagtccttgcccatactaaactttcctaggtatctttttggtttggtttggccgttccacgtacactttcttattttaatttgggttttattaatttcccttttattttttctgacactgcaaattaccacaatttcaaagagtccattctgaattagtctctaaaatttgtcttcttgttcacaaagattgaaaattttaccgagtgtcatggggtttctttgattcaagaaccaacccgatttgaactcaaaccgtttcatagaaaattagaatatttctttttccaattttattttatttttgtaggtatttattataataataatgaattaaatgaatttattagaagaaaaaaaaaaaaattttaagttacctttttctatcaatcaagggttttggttttggttggttttgttattattgtgagtgtggtatatataaagatatttgtaatgccctcgtttgatatttgaataaaaaagtaatcttctccagcagcagccaccaccttatctctctttctttcttccttttttgctttcgttaacctttcctcttatctgtgtctctcttcatgttcttccattgaaagagaaaaaagttgaacttttgagtattgggtttcattgaagagagacatggaagctgttctgcaaacaaaggggcttctctccttgcctcagaacccgagagcaagggttttggtcccatcccttggcttaaagcaaagggttttctcaaccaagcctaaaccccttgctgggatttcattatcctcaaatgggtttaataaatttccaagctttgtttcaaaaaatcatcatgggtttggttcgaaagagagaaacttgttcatctgtaaggcagaggcagctgctgcagctgaggaccagcctttatttaaagagcctgaggctcctaagatattgggtgttgaaattacaacccttaagaagattataccacttgggttgatgttcttttgtattcttttcaactatacaattcttagggacacaaaagatgtcctggttgtcacagctaaagggagtagtgcggagattattccttttcttaagacttgggtgaatttgcccatggctattgggtttatgttgttgtacacaaagttgtctaatgttttatctaagaaagctctattttatactgtgattcttcccttcatagccttctttggggcatttgggtttgttttgtatcctcttagcaatctcatccaccctgaggccttagctgataaacttctccaaaccctcggtcctagattccttggtcctcttgctatccttaggatatggagtttttgtctgttctatgtcatggctgaactgtggggaagtgtggtgatttcagtgctcttttgggggttcgccaatcaggtatatcatcaactcataaatacaaatttcaattctattattcgcttgaagattatggtttaaaataatagatactgagtttgtagtttgtaatcaggtatctgaatttttgcttcaattcttgatgatgttatgattgagtaatatttgtctaagagattcctgtttggttggtaatggatgcttgaagattaaatcatatctaacaaagttgtactttggggtttagttgttatgtcaaaccagtcattttttttttgaatgcatatacagatagcgttataattttcctttgacttcggttcttgaagctatatatttatattagagtgatgtgattggctttgttaccatctccttgaaaggaaatttgcccactttctcaattgttgataattgttattcttctatatcacaatctatggtgtgcatctgattgtttgtgttttgacatttgttacatgcctacttttgcagataacgaccgttgatgaagcaaaaagattctatcctttgtttggacttggggccaatattgctcttattttctcaggccgaacagtgaagtatttctctaatatgagagcatctcttggtcctggtgtcgatggctgggctctttctcttaaagcaatgatgagtatcgttgttgggatggggttcacaatctgtttcttgtactggtgggtgaatgcttatgttcctctgccaactcgtagcaggaagaagaaggtaaacttcctcagtattcatgaaaagttgactttttctttatgaatgtatttacgaagtacattgtaaccggctatgactttgagcgattttgattcatttgtagttgttttatgattgtaaataaattgtttacatgtttccttctgcaggagaagccaaagatgggaacaatggagagtttgaagtttttggtgtcttcaaaatacattagagatctcgccactgtagttgttgcatatggtattagtatcaaccttgttgaggttacatggaaatcaaaactcaaagcacaggtaaaatttgatactaacttgtatttacctttcaattttagttggctagtttatttatttactcacctctttcacactggtatgttttgttttgtagttcccaagcccgaatgcatactcatctttcatgggagacttttcatctgcaactggagtagcaaccttcataatgatgttagcaagtcaatttatctttgagaaatatggatggggagttgcagcggctatcacaccaacagtcctgctcttgactggagtcggtttcttctctttgatattatttggcgcgccactcacaccagctcttgccggtcttgggatgactcctcttcttgcagctgtttacgttggtgcactgcaaaatatcttcagcaaaagtgccaagtacagtttattcgatccttgcaaagaaatggcatacattcctttagatgaggacaccaaggtttgaacacaaaaatcaaactctattgattttatcttaacaactcaaatggtgtgtgaactaagaaagactattattactcactgcttaattttggtgcttataggtgaaagggaaggcagccattgatgttgtgtgcaatccattggggaagtctggtggggcattgatccagcaatttatgattctaacctttggttcacttgcaagttccactccttacttaggaggaattctccttgtcattgttcttgcttggctcggggctgcaaggtccttagacacccagttcacagctctgcgccgggaggaagagcttgaaaaggagatggagagagcagcggccgttaagatcccaattgtgtctcaagaagccgatgggaatggttctttgagcagtggttcagcattgaatccaactgcaggcgattccagcactagctcatctgagaccccaactccccgaaacatttaaaataatgtctcttctgtttaatcatcaaaaaaaaaggaagatgaataagtggagttgataatgaaggcaaccagtgttgagagtgttcatttctctagtggttggttagtaggattttacatctttgttctataagaatgctcagtgacttgctttttataagctccagttttccaatagatgaagttggtcacagtttctttagtttaaatttttacatattttgtagtgaagcatattggatttaattaactttgtttaattaaattttttaataaaattattgcaaatgaatgaaacccaaccatttatgctagagtcatgtctattctattcagctattgcttttgggctcaagtgctctgttattttgctgtattgggcttcaggccccaacaggatttggtacgaacatgataaggccacctgtgggcccattatagccataagcctagctaagtaatcccataccctactttgggctactgtatgggccttctccatttagtcgttttaagggccgagagacaatgggccacgagtgcggttcaaaatttttaacttacataatggtaactaaaaaatggtccccaaatgaaaatttcacgtgccatctgctactctaaaatgaaaaagttggctggacccaggagatatcttcctggcattttctcttattttcttcaaaatttgtgtgtgttgttgtgggttgtggctcttttttggcaggaaaaaaaaaatccttatttgggatccaaaggagcctcaaaagggaacaattgatgattagggacagcttcgcttcgaaacagaaagatattagaatatgtgtctttccgtaacactataatttgaaaagcatgtttttgttttgttttagtttacgtgtatcaattggttaaatatttactctaagtaacagatatattgtagtttttctaaacatcctcaaattttcagataattaagaaaaggattttttttttattatttattgaaaattagagtttaattataccagttaagtaagctcatttagtcattttatgggacacaaaattatcaagtctaaaaataaatgagaaattataatccaaaaatgaattagagaatttgttacattgatgcacataattatcaatacactaaataaaataaatttccttcaacaatttgataaatatctccaagtggccattccgaaaaggattccagcaagttcttgtatgctatgcgtattaattataggtccatacaatactttgtttaagtcttagttttgctagagtaaattattaagatttttttaataaaatattctcaataaatataatgtacattatcatcatttttttaaaaaactatccaagtacagagaaaaaaaaaagcacaatacactattcttttgaaggcattataaaaatgaccctataaatatattaattacataagaaatgtatgcaaataatgcattttagaagagtattattataagaaattaatatggagaagaaaaaatattggccatgctgatgaaggaaaccgttggtagagagtagagagtgtaggcttgttttgtagtttgaagtcattttcaatcttgggtggtgttataattaaattttgttcttcatgcctacgacagagaatcttgtcataccaaaggaatattttcattaataacatttgtcttcctcactcgtctctccctcttatctcttctttctcttcttcttattttatttagtatatctcttagatatctcttctcttcaatatagatgtaaatgtaatttaacatgttacttaatttctgttgtataaaaagatgtgtgacgagtaattatttttactacaaatgattaaacatcgcttaatttgttcacttatatatgtgtccagaaaaatacacaaacaaataatagtactactgtactagctagctatatatgtgacataacacatttaattcttacatgacatattatatataaccgttacaatatatgcaccacatataatttttacagtaaattttgattaaagggaccacaatattcacttttttatacatagggtaaataatattttgtaccatatattttattaactttatattttttatataataatatgaactcaatttttatatatatattttttataatataactaataacatatcgtaagtttgataacaaaaaaactattacaattttggtcgtaacacgatccaattcaatttattatattaacttttattttattttgataaagtttgagctctaataatttattgcgtatcattttagagcacttataataactaatataaaataattaaaaatataaaaagaatattactataaagtactcataatacttaatttcacgataaattgtcagcttataattgattagaaatttttataatatttattaaagtaaaacaataagactcaatattgagttgcacaagagtattcgacttatgtactttaaaatgagcatttttattaagcattaataatgtctaatacttttagatatgttgctttagaattgactagtaatatttttttaaaaaaattattatattaaattatattagactcaatatttagacaataaattttaatatttcttttttaaaataaaaaaaaaatttagaacatataatatttttagtttaattctttaaatcataaaaaataacactaaatattatagatttacatattttaatattataaataatatgaaaaacgttaaccaattataacaactcacttcctatttttaattttacagaaaggagagtgtctaataattatatatttatattatgcactaaattaattagtttagatattactatatatataagagtagtgaaaccccgcaagtgaaaagaccaccatttctcatttcataaaataaataaataaataaatgaatcaaaacatagtttctggtggaagcttattcaatgacgataatgccctcaatttaccgggaaaacaatcgcccttcgccgccgactgttggttcgacgacgcatgtatcttagacatggattacttcgtcaaaaccctttccggaattaaggccaaaggcgtacgccccgacttaatcggctcaatcattacacactacgcctccaaatggctcccagacctcctcaccggtaccggagaatccctccccgaaattaataacgccgccgccgaaagcgtaaccgtttcttggatgaagaaaagattcttcgtcgaaaccctcgtcggagttcttccaccggaaaaagacgccatcccgtgtaatttcctactccggcttctccgaacggctaacatggttggagtggagccgacctatcaagccgagctggagaggaga

SEQ ID NO: 14846 - DNA, 4841 bp, Cannabis sativa
attgtaattttctcaataaaatttcctccaaaagaaacaaatttcacataatttaataccaaaatggtatttctataaacaaaaatataaaatggtatttttgagaaaaagaaataaaaaaaatcaaacctaacaatgtaagagcgaccttacctgagtttcccgctccaacaacgacgagggttttgggggtttttcttccaaaccaacaacaatggcttccaacgacaccttcaccaccacacgcttgttcccttctcactctaacgctttacaatccctaatttctgcgtttcaatcttcaaaggtacatattttttttttttttggttgcttgattgattgattcaaactcttcaattttccgattctatttcttctgtgcgaatttcagggtttcaatccgccatttttgaaaaaattgtactgtcttcttgttcatttttccttaaacgaaccaattcgaggttctgatactgagctagatggtagcgggtttaatcaattggctgaaattttgttcacggaacttgattctaggttcgaagtgttttttagtgatctgtgtgatgtgaatcgatcagataattctaggtttcgtgttgatgaactcacacttgtcttgagatgttgtcttgtgattttgactttgcttgattcagatggattgcttgagaaagcccaagttttactttctgtacttggtagattgatttgtttggttacaaatgggggaaatgagaagaagaaaacttcttttacttttgagaagtttgtttctcgtgaatgttcttacagtgattctgcttgttcaacttctgtttctgaagattttgctgcttctttatcgattttggaaccttctgatccatggcgtccatttttatcccaagtgcttgaggtaatgtctgaaagaccaaaccttctacatgtgattagattagagatcaaccattctatctttacaactgttctttgaattatgtttgaatcaaggaagttttttgaattatgttagagattttgcccttgaattattattattttgtaaaaattttaccttgaaccttagaaataattacaaatttgatacttcggttgcatttcgatcatttttgcaaacgactttctgatgtaagatctgattgactgtaatttgagaattcaggtaaaaaataattgtaatgatagtactctaactataaaatctgagacgttatatttggttaattttagagttattgtttgaatggtaagatcattatacttggttccagctagcttgattagttaagtaggtcttcatactgtaattataccacatcaataaattatattaaaatatgatccaaatgcaaccaaagaggataatttggtaaaaatcctatttattcaatctcaaatattcagtcattggcatgtggtttgctccattcgaggtcgaaggttattgcttagattattggtctccaaatattgtagggtcagaccttaccgttgtttattacatctgtcaatgttgtttcctttgcctcatcttgtgttagctattttaatgtctatgcttgctatgctttgtttgttcttgacactattgggagatatgagttacccttgagttatcatgcagcaggaaactatagatcagtctgttttaaatttgattgcattgtttgtatcacattcttcatttctttccataccttatttgcaattaggataagaagaagctctatcatccatgcagaacttaatttggtcacatattctttaggtatttgcagatgaacttttgctacatagacttttgagagaatatcttatgcgtgttgattctgcatctagctcaagcagggtgctttttaggtcccattttgttcatggttatagtggaagtgtattggaggtgatttctgttcattttatcttatcactttcagatgaacaagcatttgagactttccccaaaagattatgtggcagatggggcaaagactttagacatcctgagctaagcctgactgcagccatatcactacttaatccaatcgtactttcggggcgaaaaatattccaggcacatgtgattttattggtttctgaagcaattgctttagaaagttcttcagagagttttagacctaatcttaaacttatgacctgttacctaacagcatttgaaatgtctgtcatcttgtacactggatatatgaccaatctgcttatggatggtcatccaatcggttataaaggttcttatgcagattctcctatgtttggcagaagctttcaatcttcttttgaatgttatattcaagagtccacaagcacgaaaatagatgatcttggtgttaaattagattcttcatggaactcacatgtttgcaatatgttctgtaaagaaacttctgagcttatggctgaggccatttcatacataaacaatggtgaacaggttgttgatgaatcttgtaaagatgatattttgtcaatttccagtgctataataattggatcgttttcagacatttcgggtgatgcagtattatttgaaaagaaggaaacaagtccacaagatgtgtatcttctggctgctatactaaagttaatgagtaattcgatgtcagcagttatttggtgtttaaggcatgattctaattcgggtagtttgaaaaccttagcaaatgcctcatcatgcaaggaatatgatttcattgtggatgttattggctgttttcaacatttcaatgcatctttaccaaatcagaagaaaatgtttaacttgatgaaagctggcctcgtcacgcataagagtagcaagtggatacttatgcattttcagggcttgttatcattatgttttgctagtggtattgatttcttagtgaagaattgtgtatcgatgattatgacactgatgaacctctatgcttttgaagatggtagtttagatgctttgagaatattgctcgttcatggcgcagaaaccatttcatctgaagcacctcctgacaaagttagtaaggtactatcacatttttttttttgtgtcgccatttttctcttcttgcttcaatgcgtgtgtgtgtgttttaaaccaaatttcttacatcaacataaatgttgcaaggttccacagattcctcgattaagtagaaagattgtttcaaatattcagaagacaaaatcaacatacttgaggtatatgtttctgttaatacatatcttctattttcttggaaaatttatgtgatgtaaaaacatttcatattgtttcataaaaatgcataagcaactcaaatttggattcttatcttttgttcagtgaacctttttacatttatgcctttacctgtagcttatgtagttatttggggagaaaataaatcaccagtgggatgtagtgtatgcctttaccttgtgtattgagttgttgaaaaagctattttttagataattttttaacatattcctctttttcatagtgacatttttgaatgtttattttcaccatttactcaaaacaatataggtgttggtttaggattaatctcatctgattgattgtttgtgaagtttactatttttaagatagctaatctttaaaactaaaccgttcttatgtctttttcatatctagcagtacagaatcttcttcattttcccatttaatatcagaagatgagaaagccgaagctacacagaatacctccatccgaaagtccaggacagagtcgaatgttggtaccgaggaggaaacagagcagtcctgcactggaaaaatcttcttacaatgtgtggtagaaaaccccagaaacacacacgagtgtgatgatttgttagacttcatcgaatgtaaggagggcaaggattatccccactggttgaagaatcgatcgaaatatcgaaagtggaaaacagataaaatggcagttctaaggtggaagaaaaagaaaaaaacttggaaattcatggcaggaggaggtaaagcttagttcgaaactcagtaatgttattcttgagactaggattccctcctaaccctatattatttggggattgggaaactatagcaattactctgtaggtaccaaagaaggactcgaacctcagacatcgtgggagtaaaactacatgccttaccatttgtgctacccaactcgggtagacgaactgaactcctagctaagaagcagttgtgtatgtatataattgacatagcttcatgctgataaattccagttacaaatcaatgtatggggagatctaacttgaccatgccgaagcattacagaccgatcctgtaggcggaccgaccgtcggtcggtcggttacgtgggctcattttctttgtccttgtagataatcaagaaacaacttttagttatggtaatttgggttgtaaatggaattaaaggttaaaagaataaagatcacaaagtgaggagaaaacaatggattaatgttcattaaaaggcacacaacagttgtttatagctttatcaaattcacatatacgtgaaaaaagaaagttgtgcattaatcaaaagagtacataagatttggggacaagtatctgtctaaattttaaccctttaaggactagtaatagattttgctagtgggtgggctacaccgtttgcagtgcaaatacgtgaagattttaaaaaatcatactgaaagtttttttttttgaaagaaaatagttcgtgcatagataaaaagttagacttcgcggtcattacacaaaatgtttactgagatagaagatacaaataatgtagttaggttagcaatatatatgaaatgagatcccctcaaatattacaagatattatata

SEQ ID NO: 14847 - DNA, 19131 bp, Cannabis sativa
  modified_base (13251)..(13252): a, c, t, g, unknown or other
acgataacacgcctatgctagttagggtgttacaatggtgttccagaaagtttgagtaggtttgtgatagatttgaggaagaaaagatcaagttttaaaattctacagcaaaacagtttactgtttcacgattacttgtttggggtgatttttgggtaccctaatattcatgtttttttagatatttagggtattgccatgctatttatcgatagagacactttagattatgagttgaagtccccgaatgtgttttagcgaaacacttacaagatttatgttaatgtgacttagtgccttcgatcgtcgagtagtttttccactcaagttaactggcacacctgataacgtgattgaggtaagattagtataatagatacacatatgcaaatgtttagcatgcatgttttagtttctattagattaacatatcagggtatcggtattgtataccaagggttttagaaatcgatttactatatgtgaaagctaaagaaattgatcaaagataaacaaaatgacaatgaggattttaacgtggttggggtgttaacaagtcttagtccacgagtcaatattattaatttaaagctagaaagccttaaggtttacaagagtatatgaacactatattttgcttgtgcaattgaggattgagtttttaacccgtttgcatgaagggttctctgtatatttatagtaagggttcttcttcgttaatcttttctcaatgatgtggtaattacaagtaacatattgacttgggcttatctaatgaagcccaaccatgaggcgcttggtgtatgcttatgtggatgccacatcatgttgatatttgcctaaaataatgtcctatcttcatggagaaaaacctatacattaaatgcttgattgctaattactatcttcacatattaaggatgatacgatcttcagacaagatccttgggaactaatttacgatatcttaggatcttgtaagtaatgagctaggatgcttttgtgcttgacttccagatacactatgttcacttctctcggatgcactgtctaatatcttctggatgtaggccatgttggatggatcactcacctggacgagttgtctacttatccagaaggactgactacttatgggttcggcccaatatttcatttgggaccactattgggcctagaatgtatacattgtaattattcacaaaattccatatttaccaatttagaaatacagatagcatttagccccaagctttcagaactcaaggggttatgaaagcttgctcgtttccattcagatggacaagtggaagctaagggtgggacctttaggaatttcatattgatactgtgtgttattaacaagtctccattttttgaaatagtacaacatgtggtattgcgttatcaaaacatggagataactttcactgagaaggtgcatgtggcgaggtctgatgaaatagcaattggttgtgttaatcctagtcgttgatttggaatcacgcggatcacaatttgtatgtataaatatggggcgaataggtttgtttatcacttctacccaaatttcaaattaagctcgaacctgcaaggagaaggcgaggataaataaaacagctttggagcgttacatcgatcattgtatttatcttcttcttcagatttgcaagcaaagaatctaggagtgccacccccaattctgattgttgattcttctccatcatcgaggatactgtatatcaatgctgagattgaaaaacttatcagccaagttcatgcccttcaaccaagggttgcttgtcttgatcgaccatccatatttgagatttctttaatccctcctttgacatcagtgtttgatctctaaggcctctatttccttcaaattcttcatcattacctagttcttaacaaagtatgtttattcatttctcattttttgaatattggttaatgtttgaaactggtgttctgttattgaagattgcatgttttttgtatgctgtcaataaataaaatttaggccttggagtagtactgattctcttgtagaatatggagcttttgcacattgtgtttgtaatactgagtagattctgagtgtgaaaaataggccctttctgatttctagtaaaaatagccaaattttagcagtaagattggctaaatttgttgcccctgtttgggacacttatggttccagatgatatttgattttcctttcaattggccttctatgttttcgatctgatcgtccagaattgatactctttgagtgttttttatccaggataaagggtccgttggggacctctccaagtagttataggggaggactctctttgtccctgctatcttctttagtatgggtatcttactgcttggtgattttctttcttaatcttttctactctatcatggcggagtaagaccaacatgaggaaattaaagttgtagaggaggaagttgcagcccatagggtagtataaaatgcttcccactaagagattgaccagtaccaaaacaagttccagaattacagcaacctctagacgtatgagccgaattgtggcctcgaaagtgttctaagcttattctggaataggctctccatccgaggagaatcaccctacaaatacacggatggtggttttatcatctggagctgggcccacatggaaattggagtgcatcttctactcaagatatacttcgcatatttctgcgtggtagtagggatagcccccttccaattcattccacaagtatataaacttcttgcgggatggtacgtgctttacaaagtgaagaaaatagacgttcctaccctgaaataactcctctattgttattaagtcaaacctcatcctatgccaaagaataagagtaagacaggcttctaccgtcttgagaggtattctaggtccttgatttgtcaagtcaactcggtgcaacatagtaattattttaataaatattggttcttcaccacgggtttcccgttgaatagggttccaatcctttctttgaatcttagtattgcaagtaagtgaaatcaaatctctctacttcaattctttattcatattccacttttaggttttaattaggacgtttctatcctttttttctagatacatcactcgtccagcaaagactcctttcatggaggttagacaaattctataccaaattttttcatctgaggacttggaggtggaaaagcttatcactacgaccaaccataggcaagttggtttgctggctcctcatcagagcattgatgcctttcatgccaaagactctactaatgatctactttaggtagccctctagggcttaaaggagtgattgtgaagattattgctgatgaagcgcagaaggccattagaaaagactaataatggctggaaaactaggttcgacttcattcagaacctctaagtaaaaaacaggaacttgaagtctgattcaaggtggttgcaccaaattaaggtactccaggagcgagtacgtctagaagaggtaattcttccttttcatttaatccatgccttacgtttggaagacataaatcaattttatctagaggggggggggcttcgacccttacttcttggagttagaccaccattggtatcccgtaattcgttacatcaataggataaatgagatagtcagaagcacatatcactttgttccgcctacatagactattagagtagatatgtttcttaaaatgaagtaccatggattcttataatatggtagcttttttggcagggaagatatttcctagtttccttgaggaagtcccaagtataatattgttagtggtctgaaccaaaacttgagcttcttattttattgttgtatgtattttttatttaatacttccacaaaactaagctttcatgtttttttttgtagaaaatcctcaaactctacagatggtctcctccataacttcttaggtagcatctccaataggtctgtagaggcacgggaaatgaccaagacttccaaatgaaaggaaagatcgagacagtcttcccagaccgaaaccaaggaatcagcaccttggccaaaggcttggagggtgtttctcgagttcccatcccagaatctatttcgagatctcagacttcgacatttgtagtggaaacttctatccatgaatccattcccagatctcagccatcgaaggttgttatggaagccaagctttagggagcagttgcgacaagaacactcctagtgatgcctttgcagcaacataccatgatgaggaaggagaagaggatgatgctgaaggggatgtctttaggaaccgcaaaaggtcaggttctgctcttggaagtcaaggtaaatagagcaagatgttggccaaggaggccctccaacagctaatggtacactggaagccaaagatagatgtaggtggttggaagggagtggagcatcaaagaacagagaagggtcacaagacattggaacctaaggacagaactttggacccccagtttcaaaacatccaatcaacttcttattctactcccgagatgcaaagagagaagatgattcttcctctgcttcaagcctttattgtgtcctttcctcttcgcccactaaagttttctaaagtggagtgtgtccaattagaagcatcaaaccaattgttctagaaggcttaggtagctgaggtcaggaaacgtactcactgtcattgcgactaggtgaagcactgagtgatgaatcttagttgttaggcttaaagcatctttttcggtcatggaccatcaagttattgctaagagaatcaaaaataaggttggtagtgacctggtgccctttgaagctaaccttctagaccgaatcgcttcaacatactatagacttgcgcagagaggtgggctacaatggctagtgaaaattcagcctttattgctgattgtattaaacatcaaaaagctagagtaagtgtatttaactttgcttaataatcactttttttttctattttaatatttgtgtttctattttaatcatttttcattctttcaggtgaacatgttaattgagaggtgctccatggtggtatccatgatgtctcttgcattcgagactcttaagcgggagctagccatgtataacaagaagaagaatgaagcccgagccgtattgaatgaagccaaagctctggccaatgatttggtaaatcatctagtccaagaaaaggtcgaggcgtccctcaacaatgtcgtgataagtaacaaggaagaggccaggatggagcgtagatctaagtctagaaaaggtgccaaggataaaatacaaggagaaatacacaacatctcaatctcgagttgatgcattcgagtctcaagagaaaggtgccaaggataaaattcaagagttggagaagaagtttaacatcgcttcgaaggaagtagatcgactgggggaagtaattgatgagaacatcatcaaaattcacaatctagaaaagattgttgaacatcgatcttaagatagtagtgctgaaattgaagccaacataaattgatggattgttctagatggattgacttaatgaatttattaactttaaatatgttaagataaatgcttactttctgtttcttgaggctttggtttcaggtgatattttatactccaatacttattaataattcatattttgtaattttagtgagatacttaatacatggtacccccaagtgatttgagagtctagactcttggtcacttgatacaatacaacaaaaaattacatgacttaatatttacttgaaaactccttctattttttattaaattatttcctgctctgaggcgtgaatggaataaataagaaaaataaaatgcaaaaaaataaaaatgatccatacaccccccaattcactaattgtatcggcgcaggtgatctgcgttccatgcttttggaatcttagatccatcaagtcttttaatttggtacgttttgtcacgtaccttgtgttgtatttcatatggccttccccagttaggtccaaggaaccccactcccagctcatgagatgctggaaactctcttcttaatacaaggtcaccaacttcaaagttctagcttttaacttttgagttgaagtgtccggtaatttttcctttgtacattttgagttggacttgtgaatgctcctggagttcttcaatcaaattcacaacttcctgaagtaatggatgattctgggtgggataataagtctctcttctattaaaaggtatagtattttctgatgggattactgctttacatccgtaggccaatgaatatggactgtgtcttgttgaatttctctcctttgttcggtatgcccaaagaactctaggaagttcttctgggcggtggctttgcatgcctgaagcttgttcttcaacatagttttcaaaattttgttgacggtttccacttgtttgtttgcttgtggttaggctatagatgaaaaactttcataattctgtacttgacacaaaaattagtgaatcaatcactatcaaattgattccattttcaaacacaatcttgtgttgcataccataatggaagagtatgtttttgatgaaaaagtccaaagcctttttagaagtgactgttttcataggttccatttcaaccactttgttgaagtagtcaacaacaaaaatggtgaatttgattcctcattttccagttggaagagaccctactaaataaattcttcagacagtaaaaggctacgaactattcgttagggtttctctgttggtggagttcatggaaccttggaataatgttgacactactcacaattttggatataatcaatgcaatccttcttaatggttttccagaagtatccttgtctgatgatcttcttggaaaaacttggttctgatgtataatgtccatagaatatttcgtgtatcttgttaatcacatggcttattttggtttcaaatacgcacctttgatatggtatagatgaccctctcaggtacaactttccatctaggagcacatatctcagtgcttgatactgaaccttccaagcggctgctcgatcatctaaaagctctgtggatgctaagaacttatgtatgggatccatctaaaaagttaaatgatcaatgactgttagtcctagtatttctatgcttggagcagctagatgggtgattggaactagtctatacttttttattttttgatttgttgctagttttgctaacatatctgcgaaggaattttgggccctgggaacttgcttcatgatatatcttttaaagctttggagcaactcttgagattttgacacgtaactagccatttttcaccctttatttggtattctctagatatctgatttaccactagttgcgagccactataagttcaatgttcttggctctaacatcttttgctaagtataagtttgcaattattgcttcatgttctacttcatttttggaggcaggaaattcgaactagagggcatttataagttgatggtttgtggagagattagaatgatttcagcttaagaacctttctcatttgatgctccgtccacacataccttctagacttctagctccagaagaagttcttctagattgtcattgattcctttccatttcacaatgaattctactaaagctaaacccttaattaatttttttgttgataatgaatgtcaaactagttgagctctattcctcactttaatgatggttctagtttttgtaattcttgacggagagggtgatttgttactacctttattgcatgggcctaaaagtactgtcttagtttctgtgaggtgatatctaagtagtaggaaagtttttcaatcataggatatctggacttcgtgaccaaaaatctcttactcacgtaatacaccgaaagttgtacccttccttcttcttgcactaaggtggtgactaaggcatggttggacacaacccagtacaagtataatggttctccctaaactggtttggataatagtggagctttggttaaatgttctttcaatttttggaaggcatattcacattcaattttccactttaacttatttcttgcacatagaacaaaaaagaatggaatacacttgttagatgactttgagaccaatctgctgagtgctacgattcttccagtacttttgaacgtccttttgttttctgggggaaggcatacctaggagggcttgaatattctccaaattttcctcgattcctttggagctgatgctgaaacccataaattttccataagaaattctgaaggtacaatgtttaggattcagtttcattccatacttttggatgatggaaaaagcttcttcctgatcattagtgtcctcttcgaaagtctttgatttgaccagcatgtcatctacataaactttcatctttttccccaaaacatctttgaacattttacgcaccagttgatatgtggctctagaattcttcaacctaaagggcatcaccatgtaacagtatatacctttgtccgcctaagaacttgtatgttcttgctctgacacatgcatctttatttggttgtagcttgagtatgcatccatgaaactaaaaagcttatatccagacatggcattcacaatctaattgatctagagaagtgggaaacagtcttttaggcaggctttattgaagtctgtgacatcaatatacatcctccaagttctattaggcttaggtaccaacattggattggcaaacagaagggatacactacttcccagaggaactctatggccgtcaatttatcaactcctattttcactgcttccgctcagattggatctagtggtcttctcttctgacgtattggatctgcctttttcatcaacattttaagcattgaagatcacatggggactgatcccattcatgttaggatggttccccgccagtacatcactatactttttcatcgtggatacaatattttctttaatggctggagataaatttcttcctactttgataagtgtggtaggattttctttgttgattcacacttcttctacctcatccatgggctcaataattctttttaccctgactctagggtctaacgggtgccctaggatcctcttggttctcttcttggaccatgaagactgtcttggcagagacattatagaattttctcatgcttttctgatcacccttcactattctaatgctttcattatcgcttgggaacttcatacacaaatggcagatggatgttacaactctaaaatctactaaggctagctctcctagcatgacattacaggtagtggggcaatccactattacaaatgtgcaatatttaaaggaagatattatattgcttctagatactcttccatttagtgtgactggaagctgaatttttccccttagcaacaaaaaatctccattaaagccttgtagttgaattagataaggcatcaaattagtttccactaaatcaattgtaaggaaggtaattttaaaaagaatgttgtcaaatcttctattatccactagaattcttgatactcttttatttgtgatttgggcctcaatcactaacggatcattatgggaaaagtacacatgcttacaatcatcctttatgaaagtaattggaagaatcatcattcgctagcgctgagcaggtgtttgcacgagattacacgtctcctcttgatccaactcactaagatatctcttctgagcatttcgtctacttttgaaaaagtgtggacctccagatatggttgccataaggctatctaatgctagtggagaaattccaggtggatattgatttttgtgttccagagcaacaaaaggtttcgaaacttgggtgttaggtaccccttgagcggtctatgcacctggagcttgtattttcagagcttgagggtaacctactacctgagtaggacttatgactccttgttgtccaagaatagaaagttgtttgtttgctactccttatccgggatatatgattggtgtctaaaccaaattggatagagaccatttctagctagtccttcaatttcatctttcatgtagtcacattcattcgtggtatgcccaatatcaccgtgattttcacatttcttattatgatccctcttatgtcttccaactttggacattggtgaaggctttttgtaatcaaccataatacaagtacctttgtaagcattttctcgagtatcaactaggctagtatactgaaagttaccttgattcatgacttttccccttcttcagagctttgtttcaacttggagccttagtacttctcttgcttcagtaaagatttatgttcgattctagaacttcaatttttttactcatctatgtaggagtggtactttatccggtttgtaccactccaaagtcagataaacttgtatgtgcagctacttatctaaaggcaccaagtctatacactgttggagttatgagtgtacttcttggagggacaatagatggagtagacagttggcgagtttgagtcgttccactaacattggtggatggtgctggaagaactctgtaagcatggacatattcttcttccaagtttatgaaaccttgggcactagctaagaaatcaaacagtgtgttgaacctctttctttgtaactttcgccacaggaaagatctggtggatatccctgaggttaaggccaccagtttcatatcataattgaccttagtttttatggcaacgtccatcattctctgaatgtacttcttaagaatttctccctgctgctatttgatgttctttagtgagctaaattccatatcgtaatccttcacagttataaattgctttttcaacatcacttgcagatccttccaagtgcaaatagatttgggagataatcttttctactagttttccacggatttttatcaaagttgaagaaaaccaaagacccttggtatcgccgcttgctttggccacttgcatcaacttgatgtatttagataagtgggccctggggtccatcctacctcacagaaatccatttgtggcattctgaagtgttcaggcaatgatgtttctattattctcctcacacttggttccaaatcttcttcttcaaaattagatacgacttcattttgtcttcgtgcaagtcgctccgtgaacatggtgaattcactaacttattcttccagttgtttagttgtggtgtcttaagattgtttccatgaggccttactttcttgcccctggatttttgcctctaggatttagtcacactcggaggttatgtatggtcatgctttcatcagaaaactgatgaatttcttctacatcatcatcattcttgtcaacagtactactagctagggtaatcattgtctctctaaatagtaggcctttgtacctaagcactaggcctatctttctgcaaagctctgcctctcaaatcaacatgatttccttgccctagagcattggctatgtaaagacctcttagttttaatttggaaattagcagataattaggaattaattataaaaatagaaaaaaaaaatcacgaactacacctgtctctttctctctctcgagctccgtagaaaaccagctagggttttgtgtttttttgctaaattcaaggagttttcggaaagtttagagtgtgtcccactcaaggtaattcctagcactcttccttttgattttcttaggcttaaagtaaagggattttgcttgaattgtgggttagggttctattttcggttcttgctgcttgagtttgtattctgaggttttaattatgttagttgaggttctttaaagtggttttgagggctattgtgaggtttgagcaagctttgagtttaagaattcaagctttgctttttaatgccaatttttgattctggttatgttgtggtattttattgccttgaatatgttctttagagtgtaaatagtaggtctagatggtttggtagagtttgggtttgatttgagggtgtagtgaattttcatgtgattcctgcactgaaccaatcgaccggttcagggggacctataggaacctgtcaaccggctggtctccaagaaaccccacataatcagacttttggttggggaaccggtcttctagttgaggtatttttgggaaccctagttcgtccttgttttgtgatatttagggtattgccatgttattcaccgatagggaaacttttagtttgaagtttaagtctctgaaaagtgatttagcacgtcactcaccagttttacgaataatgtgattttaggggcctgtaattcgtcgagcagctgttccacttaggttggtcggcacacttgctttcagaaacaaggtaagattagtataatggttgcatatatgtatacatgtttagcgtacatgttagttgccgtcagaataggcaaacctattgccatcagattagcatattaggcatcggtgaggtgtacatagagttgcaccgagatgccaacaaatatatcctaggctatcagatagtatgagttatctgctaccacatcagtatgactagagtactgagtataggctggattcgaagttagtcacactttttcgagaacgttcctgactcagttaggattatggttaggtatatggacgcctgattatatccgaattattgctatgttattatttatgcttttcttactgagtctgctgactcacagatattatttgcatgtgggggtaagggcgcaaggccaaggttgagcagctgtgagagcgtatagatggagattgtatatgtcagggcgattaggcctagagcgtacggtcttgggactgtatggctcatttttgtatagtcgctaggcgacaaacttttgtaatagacactgtaaaacttttataaatatttttgtaaacaggatctcggtttaattcaagtatgttattttggcatttataattaattaaataaagttttaattaatcacaattctcgataaactcattgattaacaacgagttgtacaattaagttaaaaatcacgttaacacgcctaagctagtagggtgttacaattttatatcagagccaccaggttgtcttctaaagatcgacatgacatgtacaatcatcattagcaatcagctcatctcacagttcagtaagcctttattgctttnntagtttattttaatagtatgttttaagaaaagtctgataggaagcatgttagtagcctaatagctgaataggtgctttttttaaatttccaaaataagtggtaattagtaagttattcttgatcgcaatttgactagactagctcttggttacgtaggctgttctaatataatgcacggcacgcgaaacaccaagagttagggtaactcagtcagatctagtggtggtcacagagcttagattcccctgaatgttcgtggtcgaggtagagcccaagagatagggcacgcggtttgagtgatgttaacccaccgcaggctgcccaggaataggaaaataggtttgtagaaatgtaagccagaatcaatgagcaagaggaagtgatcagacgcctgaggcagtagggtgctcctgcaatacttgctctagaaatgcaagtagctcctacccctactgtgtaggcatgactagttgatgcagtgaaccgaatagaaccactatacgaaaggttccgcaagcaggcacctccagtcattctgggaggtcccgatgtgattaaagtcgagcagtggctgacgattattacaaggatcttaaattttatgggtgttactggtaatgacagagtggcttgtgccacattccagttccaggaggatgccctggtttggtgggacatggtgcccctgacttgtgatgttgccactatgacctgggaaaacttccaagaattatttaatgcaaagtactataatgaagtggtcagaagtgaaaaaaataaggaatttacccagttgacccagaaggaaaaatgagtgttactgaatacacaactcagtttgatcgattggctaggttggccttgggaattatgccaaccaatttcagtaacaaataaaaataccttgatggattaagcccggagataagacatgatcttatgattaatactaacgataataccacatatgctgacatggtggggaaggcactgcgagctgagggcgcaattgggtgtactcaggttgttggtggagcccctactcctcatatgtctggttatggtaggggtggttgtggccttaccactgatcagaaacaaaaggcaccatttgcgcctagtgactcaagtcagaacaagaggttccgagggaaccagggtcgaggcaaccgtaagggtggttttaaaacctgatacacttacttggagtaccctagttgtaaaaagcatcatctgggtgagtgtagagggcaagggtgtttccagtgtgggtagccggggcattataaaagagattggccatagcctaagaaagaggaactaaagacagttgcttaacctgctctagtaagggtgtttgctttaactcatggagatgtagacgctagcccctcagttgtaacaggtcagctctcggtcaacaactcttatttctctgtactttttgactctagggccactctctctcatgtggcagccagaattattagtaaattggatagaccgcatcatagattcgataaggcgtttggaaccctactacctagcagagaattagttatctccaaaaggtggcttaggtcgatgccgatcagaattgaggatagggagttgagtgctgacttaatagaaatgggtttagtggatttcaatattatacttggagtggatttcttatccaagtactcaactagtattgactgtaaacggaagatggtgatcttccaacttgagggtgaggaccgtttgtttttgtgggatcggtttagggatcccgggttccaatgatttcagtattaacagctagagaattattacaagacggatgtatagggtttctatccatggtattggataccatacgacctgagatagtttagctagaggaaatcagggtggttcaggaatatttagatgtttttcttgatgaactttcgggtttaccaccatagagaaaaattgatttcatcatcgttctagcacctgaagcagaaccaatttctaaggcaccttatagaatggctccattagaacttaaagaattgaaattcaacttcagggattgcttaacctagggtttacacggcctagtgtgtcaccctagggagctcctatactatttgttaagaagaaagacagatccttacgcatgtgtattgactaccaggaattaaataaactaactatcaagaataagtatcctttacctaggatcaatgatcttttcgatcaacttcaaaggaagacggtcttcttaaagattgatctctgatcgggctatcattagttgagagtccgagaggaggacattccaaagacggctttctacactaggtatgggcactatgaatttctggttatgtcttttggactaaccaacgctcttgtagcttttatggatccgatgaatagagttttcaaggatttcctcgatatctgtgttatagtttttaccaatgacatccttgtgtacaatcaatcagaagaggagcatgaaaaacatcttcggatggttctacagcggttacgagaacacaagctatattccaaactcaagaagtgtgagttttggctatctcaggtgtcttttcttggacacattgtcagtaaagatgggaccaaggttgatccggggaagattgaatccattagggattagccgagactgaaaacggttacagaagttagaattttcctgggtctggttggttattattgtcggtttgtagagggattctctaagatttcaatacctttaaccgaaatcactaaaaagaatcagcaatttttgtggacagacaagtgttaagcaagctttcaggaggtgaaacaaagattgattatagctccggtattatccctaccttctgataaggaaaagtttgtagtctactacgatgcatcagcatagggtttggggtgtgtattgatacatgttgaccgagtcatcgcttatgcctctcgacaattgaaagaatataagcagcgatacctaactcatgatttaggtcttgccgtggtagtcttctctttgaagatttgacggcattatctctatggagagaaatgtgagatttttaccgatcataagagcctcaaatacttctttactcagaaagatttgaatatgagatagaggcattggttggagttggttaaggattgtgactatgaaatcctttacatcatggaaaggccaacgtagtggctgatgccctaattaggaagggtcccaggcaggtaactagtatgattaagatttcaccccagttagcaaaagacatggtcagatccagcatcgagtttgttgtaggtaaacttcataatttgacgttgcaatttgatctgttagaacgaattaaagctgctcagttagctgatccagaattagtgaagatcttagaagaggttttagttggttaagccaaagatttcatggtcccaaatagtgggatgctattttttaaaaccagggtttgtgttccaagtactgtaaaacttaaagatgagattcttgaggaaactcataccactccatattcattgcatcctgacacgatcaagatgtaccaagatcttaaatcgtactactggtggtgtgggatgaagaaagacgtggtagaatgtgtgtcccgatgcttaacttgtcagcaaatcaaggctggacatcagagaccggcagctttattgcaaccactcacacttccatagtggaagtgggaggatgtcacatggattttgtggctgggttgcctagaaccaggggaatgtacgattctatttgggttgtggtagatcgatttacgaagtctgcacattttctaccagtaaaaacaacctttacagtggatcaatatgctgatttgtatgtgaaagaaatagtgaggttacatggcgttccgaagtccaatatatcagatagagattcgaagtttactttaaagttctggcagagtctttagcgggatatggataccaaattgaaattcagtacaacattccattctaagactgatggagagtctgaaacaacaattcagatactggaagacatgttacgagcctatgtaatggatttcgagggctcttggagtaagtacctgccactaatagaatttttgtacaataacagctaccaaagaacaatagggatggctccttatgagttgttttatggaaggaagtgtagatatcccatccactgggacgaaacgggagaaaagaaatacctaggttcgaaatcagtgcaacagactaatgaagccatagaaaatattaaggccataatgcttgcctctcagagtaggcaaaagagttatgcagatctgaagcgtagaaatgtagactttccggtaggagatcatatattcctatgggtgtcttcgatgaaggggatcaaacatttcaagaaaagaagcaagttatgccctatgtttacaggacctttcgagattctcgagaaggttggactagtggcttatcgtctagctttgcccccagctcttttagcagttcataatgtatttcatgtttccatgttacgaaagtacgtttcagatcatgctcatgtattgagttatgagaatcttgagctacaaccagatctatcatacgaagaacaacaactttagatcttagacagaaaagagaaggttcttgggaacaagaccatagctttggtcaaggtactctagagaaacaataaggtggaggaagccacttgtgagttagagtccaacatgaagcagagttgttcatgttagattttgaggacgaaatccttttaacgggggaataattgtaaagactgcttagttttaatttagaaattagcagataattaggaattaattattaaaatagaaaaaaaaaaaaccaagaactacacctatctctttgtctctcttgagctccttagaaaaccagctatggttttgtgtttttctacttaattcaaggagtttcaagcaagtttagagtgtgtccaactcaaggtaattcctagcactcttccttttgattttcttaagctttaactaaagggattttgcttgaattgtgtattagggttctgtttttggttcttgctgcttgagattgtattctaaggtttaaattatgttagttgagttgctttgaagtggttttgagggttgttgtgaggtttgagcaagctttgaatttaagaactcaagctttgctctttaatggaaatttttgattctggttatgttgtggtgttttattgccttgaatatgttctttagggtgtaaatagcaggtcttgaaggtttggtagggtttgggtttgatttgagggtgtagggaattttgtgtgattctttcactgaaccggtcgacctgttcagggggacttgtaggagccggtcgattggttggtccctaggaaaccccacaaaaccggacttttagttggggaactggtcttccggttggggcatttttgagaaccctaatttttcccgtttttgtgatatttagggtattgccatgttattcatcgatagagaaacttttagtttcaagtttaagtccccgaaaagttatttaacgtgtcactgaccaattttacgaataatgagatttaggggcctgtaattcgtcgagcagctgttccacccaggttggccggcacacctgaattcaaaaacgaggtaatggttgcatatatgtatacatgtttagcatacatgttagttgcctttagaataggcaaatctattgccatcaaattagcatattaaggtatcggtgaggggtacatagagtttcatcgagatgccaacagatatatgctagggtatcagatagtatgagttatctgctaccacatcagtacgactagagtactgagtat

SEQ ID NO: 14848 - DNA, 3625 bp, Cannabis sativa
aactaaccttgtctgatcatatttctatacacaaacaaagcaagttttaaatcaaaatttgttaaacaatgaactttcattgaagatcatccatccaaattagctcctcatccactctgagtgcacaaactgctaatttatgtacggtcattggacatggtaagcatatatgagagagcttaatgggtagtactgagttttttcagtttcaaatcaaaattagtggcaaacccagaaaaattaaggacatgttaagcatacatatcagagagcttaatgggtattattactgagtttttccccttcaactatgggagtaaagttacaaatataccataaaacataaatatataagtgggtttaaacataaatacatacaccattagaaagatgaatactttgttggattggaagaagaagaagaagaagaacttaccatcttattctttagttgtttctttcaattttccattcccaaaaccataatacctaaacaagaaaatcataacaccagtaagagaagattgaagtgggtgatgagaaatatctaagaataaaagagaagagaaccatgggaatcattagatatacttttatgattatgatttgaaacaaaaaatcaaatcttgaattccaagaaaaaaaagaatcatacctaaatcgaagtaagataagagatatctaatataaaattattattttttaatattatctaaatactctttttaattacttaatatatatttgtttaatggaattcttgtcgtttcatagaaattatgttattttattttgtctcacatgactaggcttatattctttgagtttttgagatggttaaaattttttttttaaaaattattgagatggttagatttatcttttttttattaacagaaatctaatatggacaaaagttcaatgagcgtgattttgtaccagttaaagtttaggagaaataatttggtaaatatcaaaatttggaggacacgatttagtaaatgaacaatcaccattacgttagtaaaattaaacggaattggatagaaatctttgaatgtaacagcctcaatagtttaaggagaatttttaacaacctaaaaaatttagagaataaaatcctaattaatctttttttaacaaaataaataaataattcaaaattatggcttgacaagaaaatcattaatatattacatagtgtaaaatgaaaaatgaaaaaaattattgaaattctactaatatatcaagtaataagaatttacggtataaaatatgcactaaaatactactgaataacgctacaatattttaaaagaaacaattgcaaactatgataatagttaaagaaatgatgtagacaaacaaagtgagtgcaacaagaggtttagtaagcgaaacagtaatggcgacgaagaaggctgtgatggtaaaccacactccgagttgctcaagcactagggctgttttcggaaacttggaggcaatgtatttactgataaaaatcgaagtgaatgagaataaaatggctagagagaccaaaaccaagtttggagacaacttggattgaagttgggattgtagagttgctatttgcaaggccgatgcaaagcaaaaccccataatagtctctggccacgccctctcaatgggcctcggtcgccttagttgttgattggcttcagcttcgggttcgactttggtttcatcttcgacttcatttgacttttggagaataatatggctaagcttgcccccaaatgttgctactaattttttagtgttgattataaacttactcatgtttttttaaaatatatatgtataactaatttcttctaataggagtaaaacaaagaaaaaactatgaattactaccatgcatataatacatctagtgttacattttatttataatagttttaatttaaaggtttcaaagacaaaagctggtgactcctccacaatcacaatccaacaataattaattaattaaaaaaataaagaaatatgcaaatgcacttgaaacttttcagatttgtgcattgttcagttttctttcaaatatatatattaagttacgtgtaatacacgtataattaatttttttaattagatttaattagatgatgttaagtgtaatatatgtatgtttaatttttttaattaaatttattatatatttttaaaaaaaaagtattttttttggaagcttaggctgagtggaacctaagcgcatgccaaccttactattgatttatactgagtgttgcttttctaagaaagtaaataatttaatttttatttattgttatcactttatttaagtttatatgctaattataattctagttacttttttttttattataattctagttatttattgctcaaggttggcatgctattctatttttttacttttcaaagtttagctttgttggcatattgtcattttatgtggcacgctagttattttttactttagagaataaagaacacaaataaacaaagtgtacatagttttaaaatttgtttattttaaggataaattatattaaagcttaatgactttgatctatatcaagttacaaggtcaatcttatattattaaataattttataataattgaaattgaatagtaattaatctagtacatattaaacgtaactattaagttactaatcacacctatagttatttaataattaattactccgaatactcaattttaattaatattgatgctctatttagaatacttattttgtatttaagtttttaaatttaacttaaatattgatgctctatttagaatacttaaaaatttaaatattttcccactaattactctcctatctaattatcaaattaagtgaggatagtcataataaaatattaatttgccaaaaaaaaaaagaataaaaatattaaagcatgtttgatattgttttctattttttgttttcaaaaaattatttttaaaaataagagcaaaaaatagtttttgaaatttttaaaacacaagtcacatttggttagtgttttttaaaaacaatgttgactaaaagtgaattggtttttaaaacagaaaacaatattttgttgttttcaaaattcttattttttgtaactttgttttctgaaaaactgatttcaaaaaacaaagccaaacaagtcaaattgttttcaaaaataattttctgtttttaaaaataaaaaacagttttttaattatgatgttaaacatgcacttatattgtcactagttttccatgtccatttttcaacaacacaaaagcaaaattttcataagacttattttacaaagctaaattattgttattaatttaattaattaataataaataattaagattaattcattgtttggttatagtgtaaagatgatgtaaaagtaaaattatttttggtagtggtgtgcataaatttaatctaatgataatcgatcggtattgtcagatattagatattcaattgtgattgaattggattggatgttatttttgaatattcattgatcggatcagatgttggatggggtatcaaaaaatctaatacattcaacatccaatcaaactaattagtatttttatttggttt

SEQ ID NO: 14849 - DNA, 4587 bp, Cannabis sativa
taaaatatagtgtaattactacactatgtaattaccaccctagtaattaccctatctagtaattacacagttacttccaaacgcaccctaaaagacacaatatttttattttttttattttgagcattggtattgagtcttattgcttaacaatttctaaacatttggttacctgattgttggtaagttgctcctatattcttcagtctaaaggacataattaggtaacaatacactctcttgtcttttcggaagctagtacattatcggtcagctacatgcttcttaatctggtgataaccagagtaaacatccatgaagcaaaataatttataggcggatgtggcatcaaccgtttggtcaatttggagaagagggaggtaatctttaggataggctttgttcaagtctgtaaaatcaatgcacacttgtcatgtgctgttaggctttggtgctagtaccacattagctaaccactccgagtaatagacatcctagatgaagatatttgaaaacatcttgtctatttaaagcttttgatataattggatcaagggaacgtcttttctgctgcacatctggcatattcttgtcaacgtttagaacatgggtaattacgtttggactgatgtcagtcatgtccctgtgagtccacgcaaagacatttgtcgactctttgatggtttccactatttcacttatttcgttgggaccaatgcctttcccaacgtggatcactttttttagatcatgctcgcaaatttagatttcttacacttcctctgtaggttcaagtgtggtttcgactcttattcagggatccagctcatcctgtaacccccattgggtttcttttttcagtttgtcggaccattaagtcagcttgtttggtggccacactataacactttcttgcctctccttggtttcctcaaacagtccccactcctgtggagtgggtgggaaatttaaggcacaagtgcctaattgaggttataactttgaaatccaccaaagtcggacgtcccattatagcgttataagttgttggacaatccgccacaacgaaggtacaatatttgaatgtgctctaaggagtgtcaggacacaaagtcattgggagccttatttttcccatgggaataagggaattcccattgaatctcatgagctgagaaccactcggagacgagtcttggtccgtgaggccggtggcaagaaaagcttctttgaacagaatattcactgaactcctcttgtctaccaagattcgagcaactatcttatttgcaatgggaggcttaatcaccaacgggtcatgatgtggaaaatgcaccgtttgggcatcttcttcagtgaacattataggttggtccatgaggcgaggtctttgtgtcggcaattggcctacttcccatacctcttcatcatgatccaggggttcggcatagcattttaactcattacgggtcgaactccctatatgagggcctacggagatcatagccactctcccggtggcctaggaaattgttcgagaagagctccttagttcagtgggagtgctcccgaaggaacctacacatatggagtctgcactactcctctgggtggtgcttgggcttcgacttgtcattctctcatgtgtggcaaatggtttcttatccactcgtacaaatggcctagatgtatcaatcaactctcgattttgtcttgtaaattttttcgttcattggttgcatgtccaatatcattatgatactcgcatcttttgttgggatctttccaagaactgtctcaaaatataggaggcgacctctgataatgaacattctatctagtagccaaatacacacgttcttgtgtgtctaccaaatcagtatactgagtatactgaggaatgtatctagagcctctctttagctttttgttctcactctgggtacttcctttagattaccttttgctttaggacactttaagagttgcagctgcacttgtcgcaagtgaagcaaattgaataggatgctgcatgcatgctctgggaatgggaccaccacctggcaatccgtagtcagattgagctggtgccacaacaagattttacgagtactcaggcgtacactaggcatcccacttatttaaggagcgacaagaagcgtggttctatggaattgcactctgggagcatacctggggcctccaatagggtaatatcctcccaaagcttttatttgggcctctttaaagttgatgtacttttgagctgttttctgaaaatactgaaggctagccacaccttcttgttgtagttcattccagaaggtagttcccgtctagataccaacttgtaacgatgctaattgttgttcatcatctactttctttgtttaggaagcctcctctttgaacctcttgatgaaattcttcaaagtttccaaaggtagttgtttaatgttactcaaggcactaacttcgagatttatctttctggctgcaacgaactgtcttctaaaattaatctacaacttattccaacaatccttgtattcgggatctaacttcttgaactattcttctgtaaatcctctcaatgttagtggaaaacataagcatttagcgtcgttgctaaccctcataactctgttaaatctatacaagtaatcactttgatccatgtcacctgtatataaagtcattttagacattttgaagttttttgagagtttagcctcaaggacatttctggcacaaggctcccagtcttcataatcaaactacgagtcatctcccttttgtctctgagagacccttgctatgtccttctggaggatagcaagttgtgccaaaatcccttcgtttaggatactcccagagactagaacaactttcttttttttggtcaagacgcactttgaggaatcgtgtttggcattgagcttttgtcgcaagtcgaccagggggtctttctaggcgaagcccttcttttcctctggttcttggtgcacggacacactcctctaagcttcacggtcctgggggccagttttccccttgggaaacctacccctgtagacatttcccttttgggagatcaaaatgaattttcagtgtatcccatgccgttttgttctttttcatgtatggtcgtagggttcccctttgggggaggtctttctcgagggtaactgatgggactaggttccctatccttatgcttttagcctatcgcaggctgagaagctctttcccctgtcttctcttgtacatacgagactgcaattggatttatatgaatgcttacatttttcatttcctttttatgacaatcaatatttcttgcattctcttattttgttttgccaattcagcctcatggttagcagatttttgccttaactcaactaattttgtatggttgtcttcatcatactcttttgtactcctcttggtatgtacactctttatcactggtctctcatttccttcagcatccacccaagaagccgcttcttcttatggaccttttgggtcgttaggttattgtggatgtgaagtttttcttgttaacaccattataccacgaggctttttacgacttcctcttatggtaagcttcctacaactctcaatgaaagcttcaaaatattgaccgagattttcaacaattgttaattaaagttgtttgaagtaattaatgagtattaaaaaagagaattttttatgtggttagggcattaatgagccttagtccacgagccactattattaatgagcgccttttcttagagagagttctgaaaaatcccctattctatacatcattggggtatttatatgctcataatggtggtaaaaggctaccattgtcgtgattgtatgagtcatgcttcgcacgatttctcaaatttgatcataggacattgttgtctactttttatgatttgcttaggcttcttataggtgtttggtaagatctgacttatctcttgcttgtgatttgatagctcattatgcagccatcaattaatgtatggggcattgtaaaatcagtgaattatgagttacacacttgagcacgtctttagatacgtatatagtgacttaacctcgagcagtgtgctatactccgtctgtccttccatatcttctttaagtcgaattcactcacggagaggaaaagacaagaaccacccgtcatctaagtaaaccctctcggagatgatcaatcctttgtaattcttgcagaataacaaactccagaagtgattaaagatgacacgtctcataatgtgggtcccattgccacatgacttgctcttgaactcacctatttttggaaaaattttaggcaacacatctcacctttttaagacttgttttttcctgtttgaatgataatcttccctcaagaaaaaaaggaattgagatgtattggtaattattttcttttttgttagttgatatattgataaatttgtgttatgtaaataaaattttggatgattctacaatgcacccccttaaaagggatgtactggtgcacccttaacttgtttcggcatctaaaaaaattttttagtctaa

SEQ ID NO: 14850 - DNA, 1240 bp, Cannabis sativa
  modified_base (1041)..(1052): a, c, t, g, unknown or other
attatattcgcacaagaacgacgtcaccatagaatgaatttgcttagtgcactctaatataacctatttttttggttagtttagtttgttttgtttttttttttttttttttttttaggatagctatttatttatttattttgaggttaattttgactaatttgtcatgaattatctcaaccctataacatgtgtataaaagaaaatgtgtgtacatatattccggatcatatcatgtcatgtcatgaacttgaaagagatacattaaagaaggtagttgagtcgcgtaaaagacataatagctgacgtgttagacgaatttattttcaattattggtcatttaccaatttccacctgaaacatatatgaattatctaacttttgagttaagcaaaaaacaaattatctaacttttgaattacgtatgagatacagtccaaaatttgatccgcgcgaatttatttatgtatacataaataaggaaattaatttagtttgttttcccataatctccaatttttttcatgaacacaaaacaaacagataaaaatatatataactttcgttgaaataaaataaataatacacttaattaattgatatgttgtttttaatctagaaataatttagcatcttcttttgttttgtattttgtttagtctcaaaaaaaaaaaaaaaaaaaaagaaaatatatctgctcggatagaaagttggtgttgcaaacttttaatgctatgcacactttccttcttcctaaaagcatgtgtgatgatcttgacaagttagttcataagctctagttgattggaagtactgatcaaattagtttttgaccttggcgaattgggattctatttgcgttcagtttgaaaaaggtgtggactcaatttgaaacatttcaaacatatcaacatgtctttaatttgttagtaaattggggtggatgttggccattacaagtgacactttttagtcacaacataatttacaacataatttttttgtaactaaatgtgaattttagtcacaacaaaatgttnnnnnnnnnnnnaacatagtatttagttacaagtaaatactaaaacataattttttttaccctttttaccctacaccaacaagaatatttaatatcagtatcaaggtcaaaatcgacctttctttgtctaacttaatcttagacaaaaacggcaacgttttaatcaacacgacaccaactctagtgtcgtttgaagcttt

SEQ ID NO: 14851 - DNA, 3242 bp, Cannabis sativa
atattctacctttctttggtattggtaggtgtaggttactgtttttgtccacagatgagaactaaaactaactccggttcgatgggagttcagctcgatttcggcgcgctaaagtgcgccggtgaggcattaacggctttgctagtttcagctttgctcagaagccagctattggctctggtaagccactctctccactttgttccctacgtgttttttcttatgaagtttccaactttttcgttcctttggcctttatcgtttttctcttttttttttttttttcttcttcttttcacataaacttttgccaattcgatctatttatttttttcaacgaacaatcatatttttaagaaaaaagaagatttattattattatttagtgcatatattatttgggggtttctatttcgggttagatcgttttcttatcaatcaaaataaattattgctatcgtgcgcttttgggaggtgacggttaaggcgttaggctacggtggttcttctgtctacctactaaatggcgccggacgagggcgcttttccgcagttaatgtactcttttgttttattattatttggtagggttaattacacatgactagtggaattcttaatcaaaacattaataattaaaaaaaaaaaaaaaagagttcggacgtagaaatataaattaaatatggtttagggcgtctgtttcagttccaggttagttaggttagtacaaatggtacgtggggcctggccttctattttggagatttaaaattgcacgtggggtctatactttattgcttattcactgtaattgtcgtttttcgatcctaattaggtctcatgtcaaaggtcaaagttgaggatgatctattgattatcgtttgatacatagaaagataatattccattgagttgggtattcttgacacgtggcgttaccatggtttttttattcaatttacaaaaattacattttattttgtttgttctacatttgttaattagagactgaagacatttggttattaggtttcaaaaaatttgtgtttgaatgacccacaaacgtttcttatgatagatcactcaaatagaaattctcatagaaatttgtcttggtataattttttccacctagctgacctctcatagaaattctctatatagtagcttagtttggctgtcatcacatatcaaactacaaaatatatatttagtaaagatgatagttcaacggatggagagcttaagaattctgttgacggagaggataactattttttatgaaaaaatatgtctagtatccaaatcctgaattattctgttggaaaaatcaaattatttacagaaataaggttatttttttggatagtcttacttggatcacagtgtcttcttggaattttttttaggtagtggttgttgttgatttttatgtctttccttttcgtaagaaatactttggaatcttcttatgacaataatagaactaccgtttacatttttccgtataatatatatgtacacgcataatcaccaattttctctcccttcaatgaaatatattaataatcttttagggaatattttttttttctatgaaacagaaatgttctctttcctttttcctttatttataagcatattctactaccaccgaggtcatgtcatcttatctctttgggagaataaagagaattccatattcttcttcttactagtgttacactatttggaaaaatatataacaagaacataaaaaaatgttctttcacacaaataattatggtattagaataatgatgctcctaaagtgcaacagggaacagcattatagataccaaatggttttttcaatgtaacctaatcatattcttgcatgttgtcctttttttttcttgttattccttgatttcatcgtcattgactgatcacatggcaattattattatgttatgagtattatctacagtcatcgacaaataaatgaaatagattgaattttggttctctttcacatatgattcttttattttttgcaaatttatttcaatacccggtttcaggatttgtatgggttgtcatcaccaaataacaaagcttttatccaagatgttgacgcccaatgcaacagcgaagcagcggacgctgagggggatggcgacaatgaacaagatggagatgaagacgatggtgatggtgatggtggattcggagaaggtgaagaggaattgtcatcagaagatggaggtgattttggcaaaaactccaacagcaacaacaagagtaactcaaaaaaggagacggaaggcgaaacaggtggtggtggtgcagaagagaatggcgatgaagaagacgatgatgaagaagacggtgaggaccaagatgaggatgaggaggatgaggaggaagacgaggacgaagatgacgatggtggagatgaggatgaggaagatgtagtggaagaagaggaaaatgaggaagaggaagaagaggatgaagatgaggaagcacttcagccacccaagaaaaggaagaagtgaaagaaagctagtagagcagctagccagagagagagagaagccccagtgttttagattattatatgtgacttgtctaatttaattaatggtcttatttagctcatgggggctttttctaggatgctgtttaattgatgactattttcatttacataattcgagaaccttaatattactgttaagcagcgccattcaaaaatttgaggaaatgttacgttctcgatttagctacttttaacccggccactctttttattattattatttttttgaagaatttctgtttttacttcagatcgattccttactcgaatctattttattttattatttatttattatttattgtaggaggaatttagataatatcgaataaaatattataattaaaatacaaacgagaatatgtgattactttacccagaatggcgagtattcaaactatggaggggtgtgcataaatcgatccaatccaatgagaaccgatcaatccaattacaactgatcgccaaacattggatatctaattgtgattggatcggattggatgtcatttttaaatatccaatgggatcagatcgaatggtggatggagtgtccaaaaatccaatacatccaacatccaattaaagtaattagtatttttatttagttttgatgagtaattagattttacagtgttatacgtaaaatctatatgta

SEQ ID NO: 14852 - DNA, 5234 bp, Cannabis sativa
cacaattataaacttatgaaagttaaatttaaactataaaagaattgttttatgatatgtcatttttctagtttgaacaaatttactattgtctagttatagaattttaaaagatcataatttaaaaaaaaaaaaaaaaaacgtataattttattagaaataaagagtattagctaaatttaaaatgttatttttcaagaaaaattaatgtatagccattttatttaaaagtaaaaagaaatactaatgagcatcattgcttagcactcttttaaaaattatattattattgaatgaattaatatcagactttacacaatttaacataataactattataaaatataaaaaatgctaaaaaataataatagtgtctagcaccttctaaatgtaatattactagtgtaattaaatataatgtcttataaacacaactaaagactaatagaatgctcataaaatatggctaattcacattgtaataaattaattaatttttttgataacataaattaattaaattgatgcgttaacggttaaacaatgaataatctatcttaaagtgtaataaattaattgattaaggaatttaaatttttttcctaaaacccctttctctcttctgattctatggcctatcccatcctctccactctccactctctcttaaacccattctcactctctctctctctctctgcagttcagtctctctatctctctctcactgtcatggccttcgccttcttatcaagtcccaaccttcactctcctcacttccactttctctctctaaaacgccacaaaacactttccaaaccgttaatctctctccctgctctctctctcccactcacactccggcttaccgggccaccgtctgcaattggaccggacggaaaattctaccctgacccatcagacgacgacccacctgaagctccggaagattccggccatggagtttccaagttccagcaaattgaacgacaggcctcccgtgcccggaagctccaagaggaagactttaagaagcaccaatctactttcctcgccgcaattgccgacgtcgaggactctccggacaatcccgggtctgcttacaaggatgatgcaggggacgatttgtttggcgaaatcgataaagccattgccatgaagcgcaaggagtatgtgaagcaagggcttttggcgcctaatccgaagaaggagttggagggtattgatgagttggagccggatgaagtagttgatttggaggagattgatgagcttcaaggactcagggtcgtttctgaggatacggattcagagtcagagagctttgaagatgacagcgaggaacttggtacccgagatccagctgtaagttcttcttttgatttggattttgatagttatggtaaaacaaaggctagaatagttgaacccaagttcaaaataagcttagctgagcttttggatgagagtaaggttgtacctatatctgtttacggtgatttagaggttgagattaccggaattcaacatgattctcggttggtttgctcaggtgacttgtttgtttgctgtgttgggagaaaaactgatggtcatttgtatttgagtgaggctgataagagaggagcagtagctgtggtggccagtaaggagatagatatagaggataccttggcctgtaaggcattggtgattgtggaagatactagtgcggttcttgctgctttggcagcctctttttataggtatccgtctaagaatatggcggttattggggtaactgggactaatgggaaaacgacttctacatatttgataaaaagcatgtatgaagcaatggggttgaggactggaatgttgactactgtgggatattacgttcatggggacaacaagctagaggctccaaatacgactcctgatgctgttttgattcaaaacttgatggcaaagatgctacataatggttctgaagctgttgtcatggaagcttcttctcatggattagctttaggaaggtgcgatgaagttgatttcgatatagctgttttcactaacttgacaagagaccatatggattttcatggaactgaagaggagtatagggatgctaaggctttgttattttcgagaatggtggacccagaacggcataggaaaattgttaacattgatgatccgaattcttctttcttcatttcaaaagggaatcctgatgtccctgttgtaacctttgcaatggagaataaaaatgcggatgtccattctcttaagtttgaactctctctctttgagacacaggttttagtaagcactcctcatggtatattggagatatcgtcaggtttgcttggaaggcataacatttacaacattttggctgctgtagctgttggaattgcagttggggcacctttggaggacattgttagaggaattgaagaggttgatgcggttccaggaaggtgtgagttaatagatgaggaacaggcatttggggtgattgtggactatgctcacacacctgatgccttgtctagattactggattctgtgagggagcttggagcaaagagggttattactggtatgcttctttggcttcttgtatttagttttgagcatttttgcgctagacatttacatagtggcttccttttcgaagctacaattactgttttattattacttggtggcttaaacagcaaactatttcatggaatagaaatctttctaaccttcaacttttcttgtttcatatccagttgtgggttgcggtggggagagggatagaggcaaaagacccattatgacaaagatagcaactgataagagtgatattacaattcttacgtcggacaacccaaggaacgaggacccatgtaagcacagcatttgtccaaaatttatcatcaaaaactgtcatttaatttggcacttaacaataaattatatctgtatagatcatcatgtgggagattcccctgaataatatttttgtgaatctgcatgaattcatgtgtgccagttcttaggatgagtggcttgcacctcattggtagaaattaaaagctaagatcatatattgacattcgtgcactacatattaatcaaacagtggatatcttggatgatatgttggctggagtaggattgacaatgcaagactatttgaaacaaggagagaacgattactaccctcctcttccaaatggtcacagacttttccttcatgatatcagaagagttgcagtacgctgtgctgttgctatgggcgaggaaggtgatgtagttgtaagtccttgaagtcccaaactcattttatgcttaaacatcttctggcaatgctttctagttcaccacaacgatttctcttcttgacttggattttgctggctatacataaactacaggtggttgctggaaaaggtcatgagacatatcagatagaaggcgataaaactgagttctttgatgaccgagaggaatgcagagaggcattgcagtatgttgatgagcttcaccaggctggaattgatactagtgaatttccatggcggtaaaactatttgtaatttagtacagctgtttagtataggagcagataggagatgtattcacacctttttcctgttcattataatgcagattaccagagagccattaaaatcttccaaaaggggtctcatgttcattctaaagcagattaccagagagccattgaaatcttccaaatggggtatagaagattggagctaccctgacaaagaaatactgatgccttaaggcgattgcatcatcagcatggaagaatggcgttctttcataattttgggaaattgtctgaactatgcatgtgatttcaacagtttgtttcatgcatagaaatttttgtaatttttgtcagtcatttttgtaatttttgtcagtcaaatagtgttgtaatttttgtcagtcaaatagggtaaatttagttttttttttaagcccttttctgtatacttgaggaagaatgcaggttggcccatcttttttgccttcaaaatcaaaggcatttgcgttgtgaaaaaagctgaagcagcattggaaggtacaattttgtaagcaggcatgtttagatttaggatttaataactatataaaagatcttaatcatatccacttatgatttaatgtaaatatttatatactacaaaggaactgaaatacaaatgcataataacacaggatatcaaaaatgatcatttctcccaccaaggtcagaaattacacccaacaatggtacaaagtcaaggcacgcacccttcgtgcatgagtacgaagtagcaaacttagaaatgatggttaaaatttgatataattaagaaaaaaaaaagattgataaaaaagattaggaaaaagaagcttcaaataatattttatagtactcgcagagaacatttttgtttttctaagacctcacaaaattatcagcaaaatccaagttccaacaaacaagaaaaccaattggcagtgggtgatgttgcaacaatcaaaaaacagtgggaattagccaatgatttacagagtccagcagaatcaagtacaacaatctggaaagaaaattaagcccttttctgtatacttgaggaagaatgcaggttggccctcttttaagtatggttctatcgagctttcatgctcttctacaaaatttaatgtcatgatatgatattaaagaaaaaagtcatcacaaagaactttaatcactgattgtgcagatatcttgtgaatatatctttttctgctcactgttaaatattactccacaaatcagacgctaactaaattcagttcacctctgtcaaataatggaatctagttcaaggtctgctgccttaaattctaggcatcacattcttcccaaaatctggaatcctcaatggttctggctacttgtaatgcgacaaaactaaaagctctggtaatacgaacagtccagttatatatgcatagacgataatgataaaccctgcaaggaagagcacgaatgcggaagtgcattctttgctgagactagagattcaacaatatcttctatttggcatcttggcatgaaaacttcaccggctaaatcattttttatctgatcttccattgtcctgcaaaagtttctcctatcagccatgataatattggaagactagaagagcaaataactacgatcatgatatgggaatcaataaaatagaata

SEQ ID NO: 14853 - DNA, 3078 bp, Cannabis sativa
  modified_base (1999)..(1999): a, c, t, g, unknown or other
agtaaataaatagattataaattgaaaagtgagtaaaacccccctttaaaccaataccaatgccaaaaatctcataacacaaaaatggaatgtctttaactttagtgaaaaaaaaaacactgtaatatatgctcataatggtcaaaacaactgtaactaaagaaagaagaaatgaaaaaagctgtgtatactaaaaaccaagaagaaaaaaacgatcctaacaatgaaaacacaaacaaggaaaaatcaaattacatgttcaaaatgaaaagataaatcctagtcaatatacagacacagacacactactgccacaaaagacaatcgaacagaaacccattttcgaaagaacacataatgtcggcttaaaccgaaaagaaacgaagaaaaaaacgaaatttcgattacccattaggaagattttcaacgaaagtgagcaacattttgagcttcgaaccaccttcggaggctaacccagcgtgcatctcaaccgccatagcatcaaccacttgctttaatcttccaacggttgtatcacagctctcttctaactctctcaacacacccaaaactttcttccactttctcttactcttaactctccgacccacaaccaccgccgccaccgcacacgccgccgcagcaacggttaaagccaaacccaccactactttccccatcgactcctctctcagaagaaaaagaagaagaagtctccgccgcctgcgattaatcacaccatcaaacgacgccgtttcgaccaccctcctcgtactctcgccgaacgccgccgtttcaccatacacgacgtcccccctcgtcttatcctctctctctctctttctctctttcttcgtgtatggtgagaaagagaaagtgtagtaaggaacgacacagtagttggccggcgttggattttccggcaggtctttctcgccgttaaagtgttgtccttttttatttttgtgtggagagagaaaggtctttgggcattggaaagcgaaatggtgggtacttatataccacttgaaatgaccaaaatacccctttctttgtttttgggtctaatttttatttttagggtattttttataaattgcaaactgctattacactctctaagttttaggctcaaaattatatgttggagtatttttttaatttcatttattgtagttatagtgctatttatataaattttaattttttttttaatattttataatactaaaaaaactttaaacatattttctagactgtaaactatttgaagtttttcaaaattttacaagagtaatattctaagtataacgaagaccgttataaaaaaaatttagaaaaaaaatattccgacatgtgtttttagatgccgaggttgactaaaaagttacaatagttacttccaaacacactcttgatataattatgtatattatagttatttaagatattgtgtaaaattttaaaaaatttagaagagaagtattataatttcacttttttagtcaatttccatgctcaaaatcacatactgaaatattttttttcacaacgatatttgttatagtatcatcttgtaaattttttaaaaaaattcatatatttacagtattgtaaatacaattcttgatattttagtttaccgtgtgtgatcaaaaaactttaaacttatttttgacattataaatattcgattttttaaaaaaaaatttacatgaatgatgttcaaactataacaaatacattcatgaatttttttaaaaaaaattatttcggtgtgtgttttcaagcacatagattaatttagaagttgtaatatgagattgagtgtaacatttctcatttaaaataatttaaaaatattaaaaaaaaaggaatttttttatttctacacttcaaaataatttttatttttttgcatttttatggaattctatataaaaacctattgcgaccactttgaaaaacccaaaccgtaaattaaaaaaaaaaaaagatnaaaaaacagtatatgagataattctccaacaaaaatattcaaattgtctattttcacacacttataaaataatttttttatatttttattttctttttcagtgaagtgatattattttactatctttttgggataacatgtgagcttcaattatttgtaacaagaagagttaatgaggtcgaattattttaaaaaataaatttatttacattctttaaatttttgtagaggatattaccgttttgatgtattagccttaagaaaaagttgagctttactttttatgggaaaggtgtagactttacaaatggtatttatatttttattattaataattctttttttttttttttttctttttgactcattgattaagacattccaattagaggagtttcatttgtggaattttgcaagagataacatattactaaaagtagaaagttttgtacaaaattactatttagtttcttattattaaacatttgatttgacttatcttctcactcatacttacttacttaacatgattttatgggttttgcttgttgaaactttgtatgtgtgttgaaattttttaaccaacataacaagtaaagttcattgtcataagaactaaaaattggtacttttcttatgtttttggcttcttgaattggaatttttccacatatgtctaagttttgtgtccaaatcaaaactactttgacttttagttatattttttaaaaaattaaacattatcacaaagtagagttacatatattaaaatacattatggtgcttttgtttgtgttgagaatgagattgtgtaaaatgattactttccaatgaaaatatcttaaaactattatattttcattcttaatattaattattaagataaagcatacaaattttagaccactcggttacaataactgaaacacaataatatttataaatttataattagtgcacgatatttgaaagactttgataaatgagatttagattagtgagtacgattatttatatttacacatgttttatatgcatggggtgattaagtttataaaagaaaaataagagtaatttgc

SEQ ID NO: 14854 - DNA, 6966 bp, Cannabis sativa
gtaaaataatttccaacagacttgttgtctaatctttttaaagagcaaatcaaattacttattcaaaaatattattcttaatgctgggttaggagaggatcagtggcattagtataaggagctttcgagtacatatagcataaagagtgcttacaagtatcttcaatctttgaatgggaggtgggatgagcaaaataattctaatttttggcggtccctttggaatcttataatcctaccaaagttcattatgtgttatggcgagcttgctctagtattttgttcacatccacgtagcttcgagagaaacatgtggacattccattgatgtgtcaagtgtgtcgtggaagttcgaagtctattattcatgtcatggttaaatggtatgcttcactttgttggcaacactttcatgctttaattttagggacaacatatcctaattttttcagctgattttgtatgttctaactattttctcgaaggccaaagctagacaagtgacattgatttgttgggtgttgtggaatgctcgtaataggttgatttagcaaagaaaaagctttgttgttaattgagttatgtcatctgctattgcttatcttaatgaacggaaagatgctcaaaaaattgaaattaatgtaggagagtctacttctatcgttagtagcgaccattaaatattacctattgaaaacatgattaagatcaatgtggatccttctattgttagtgggaatgatagctttgggattggttagttagcaagtgaccatggaggaactgttactaaagctgattcaaagttgttgcctgattgtgtacaaccgactatagcagaagttgtgggagtcaaagagattcttagctggatcaaaatcaaaaaaattttgaagttgttattgaaactgattgtccaacagttgctcatgcaatccgccatacactccaaatgaattcaaggtttgggttatcaatttatgattgtaagcgtttactttttttttaaacaaggttactactatctttgttaaacgatttgtgaacaaggtagtcaattacttggctcgtattgcttgttctttttcaagttgtcggttcagtgggggtttgtcccgattaatcttcatattattttgttaacagatttgtaaatttaataatacaataaatttttagtaaaaaaaaattatttattttgttaaagtaattgcatgtcaacaaaattttctaaaaaaatatattcatattgtcaagaaatatggggtttcatctcaaagctaacggctcattacttttacatttaatctatataaaataaagttctccaatacatattacatgtggatagttttggataatatattaacatataagatagacctacaacaacactttaagcaacactccacttgaaactcatggccaccaaccaacctccatcatccatgtccattcttaacgaaatttggatacgagatctaactaagaatccaatccagatgcttacctttctatctgatttttttgggggttagctcaaaaatcgaactagaaaaagctattgttatataacatgattatgattttagcctgatggctttaattaatttggggtataaaaatttcacttttaatagtatattcattctcaattaaggtgtatagttgaagtagtcactcctcactagcaataaacagcattaataagaagttccttatacgaaactgaaagcatcaatgctctaaatagtggtgataaaatgaggaatattataccataaagaagtgtttgaagttgcagccaagccttgctacctttattttcgttttagtgctcataccactaaggataacccaacaagaaaagttgattcaaaaattcaaacttgaatttggcaagaattttcttttgttagtgctccaatccaatttcccttttagaatgccgaaagcaatacacagaaatctagaaagtaaatccatcacattcaccgcatttggcaaaagatggaagtggggattaatgttagataattaggaattgagcatggaaattcagaaataataaaacatgatttatagattgttttttattattactattattataattactataatttatagattgatgataacttgatgaacagttaaaaaaattacaataagtataaaaccccactcaatttaaatgcggagtttgtctcttaacaatcagcatctctggttttaataatgaaagattatcaaatggatgttgacaaccaaaattactagcaatactaagaccagttattcttaagaaccttaataatatgagcagaaaccttttatcctgccctaattttctattatctaggaacttttttcttcttttcttcaacctaaatattatcaatatcaataagaaattaaaaaatgacaaaaaatcaacagttaaggtaatggaattcgatctcgggtcaagccaccaactgctcctgctccatgtacatctgctccacccaagctgggagcatctctgaagctccactgtcaaaatggcattgttgttggtcctcaaagctgctcatttgcatagactttgaggttggggcatcaaccaccaaggattgaacccaagacacatctggctcatccacagttgctgctgccattgaggatgcagccatgcctgcaccataattgccaccgctgcttcggaatccaaaagaagcagattttctcaacttgtttagctcttcaccctgcattccccagtctaattttccatcaggggaaccccaatctgaaagattggatggcatcatgctcgaactagctggagaagaaagcccagagtgacgattaacagcactgcgttcaatgaagctctggctccgctttgcgaaagcagcagcccgtgaattcatcactgctgctgctccactagatgcgccaaccccatacattggagaagtcctcccgggagatgatgagaggctaactgagtagtttgaaggcatctgctggttcatgttttgacgcatatgcatccctgttggggactgcagatgggatgatgtggtgtccactgagagaccctgtaactgaggcaaaattgaagagtcaaaagatccaaatatgtcatcaaggttagttggcttcactcctccaaccctactcaactcgtcagttcgatcgccttgagtggcaaaaggtgaagctggtgataaaccattgttccagtttgagggagatgagagacaagatatctcatccatcatctgctgctgcctgcggcgatgactttccatgccgattatatcaacatctaaatccatatctctagcactcatagcagatttcaaccggctacctgggagatgcaaggtcggaggtgcaatgttagattggttttgccacatgttcccactcataggagatgacgctcctgagggagtcatgggaggagttgaaggaggtatcaaaactgatggggaaccaagagcaagggggctaatagatcccatgtcaagagaagaaccagcaaacgatcttggagaaggcacagcagaaccagttgaagcatacaaaggtcggagttcttcatgcttatgagcaaagaaacagacccttctttggcaaccagtctcgtccttgcagagacgagtacggtactgagccgggtgaagccagcactcaaaaataccatgagcatactcacaagcatcaccctgcctgcacgaccctttcctgaactcgggacaagggacacaactataatggtatttccttggatcacgccgacgggcgttctcaccagggtggacaaaagggcactctgtccagtcatgtgagtaagctcttgaacaaggcttgatcttgaaagtatacatcctaaaatcatctgtactataaatcccgttcttgatgtcaggaagagagaggtcgacaggatactctttcttctctagaccatcttttgagctcctaaggctgaaaaactcttggcgctcttgatcctccaattcatcaacaacttgatcaggaaaacctgaagtttcctccacacccttgaggatcacttccaaagctttcttcctcaaatcaaaggccaagctactacgaaccggcacaagcaagtcaccgggacgatttccattagcatcaagcgaattagcatcagcagaagcagcaagcaagagcttggcaacctcagctgaacaagcagcggcaccagcagccgcacaatggagagctgtggccttatctgaaccacaagccctgttgacatcaacacaacctgtctcaagtataaacttcagaactcttttgcttccaaacatggcagcgatcataagaggtgtcctctcttcaaacgccatcttttttgacccgattctcctcccataccataaacttgcttcatcaatatcacgggcttcatcttcaaccgcacttttgaaaccatcaagatcatccgaggctgataattcaagcaaaacagaaaagttatacctgagcccttcttgtttctctgattcaccttccatgaccaaaccagcgttagcaggtttcctcttagacccactgcacatggaaagctttccgaggagaagaccctaaaaaagcaacaatacagtgagatttcaacacagtaatctcaaaacatgactcggaataaggaaagagaaaagatcgtaaaatatgagtatcacaaaaagtgttaatagtaaaatcattagtctaagaaagcttttctggttaactttatgcaatcattttaagggggcaaaaaaacagtcgttaacaatccaaaccatgtatgtatttgttcttaaaacaattgcccaaattcaacaataattaaacaaaaattagttcatatcccaaaaaaagaaacaaaaacaaaaccccataacaccatctactctcctccatttcctaaccataacaaacaaaacgttctcctacatatacaaatagtagtttacagttcattcaaaagtttaatctttcaagaaataaaaacaaacccagaaaaagaaaactacagataaaacttgattccaacaaaaacttcataaaactcccatctttttcctcacagattctcggaaaacaaacaaaacccatttcaaggaagaaaaaaaaaaaaccaagcataccttagaagcacagagatgtgaggttgctaagaactgaagatggtttggaagaaacgaaagaaaaacccgaaagacgaagaccaagctaatgtaaaaggcagacttttctttccctctcttttatggttttcggagtcaaaaagacgagcctatgaagcaacgactctggctcctccgtcagcccaactttttttattattattattttttttatttttaaaatagtagttttagaataaaattttaaaacaattttttttattgaaactcaaatgcaaatgcaaatgaaaatgaagcgaaatgcaactcaaatgaaacgaattctttttgaaaactcaagagtgagcgggtcccgcaagtctccttaatatctaaacctcttcgagtataaaatcaacacgtgttataatcttatagaaacggattcaccaaagagtcgaatgaagagattccggattgtcacgctttacgcgtttttggcctttggcttgctcacgtggacgaaccactaccgtcaacgtgtcaccaaaaaactcagataaacttcttatcataaaaaaaacctcagataaatatgctttttaatgttttttatcttgttatcgacaccgcctgtgacggaaccataaaacgacagacataaggaatcataaaataatataattttttttttttttttaaatatgggaaaatgtagtagattttacttttatatggcataaataaataatgtaaaaaaatgtgagattaaaaataattaaagtttaaaatatatataaaaaaataataaataaatttaattaaacttgtaataataagtttcgcttgaaaagtcaccagcaccagaaaagtcaccgaaaaagttattgtcattggaaaagtcattgtcaccgaaaaattcgtcagaaaagttaccagaagtagatgtctcagatataaataatagtagtttcaattctataacataatgaataaaaataaatgactcaaactggttataattaaaatataaccggtttcatgaataaaaataaataactcaaaataactcaaactagttataattaaaatagaattggttctataacagtgctataataaaatcaaataacacgaaataagtcaaaacggttataactaaaatagaaccgattatataacataatgaatacaaacaagtaacacacaataactcaaaccgattacaattaaaaaacaaacaggaaattcgtttctgaaacactgaaatataaattaaaaacaaaactagttccataacaaaatacatcataacacataatacttcataaaaccggttataatttttttaaaaaaaaaatggggaccaattccttaaaatattgaggcataaatatgaaaagaaccggttccataacaaaataaataaacacaaataataacacacaatagctcaaatataatataatgaaatcagttatatttatcaattagttaaaaatttgaaacaaaaaaatttgctctgtaaaacaactaagataaaaactcgcacacaaaaaccaattaaataaaataacttaaacaaaaccattcattcaacatgctccaatccaccattacactcatatcatatctaccccaaaaatactcattcactatgttacataaccgattctattttagttctaattggtttgagttatttcgtgttatttattttaagagaaatataagtaaatggccatatttctaactctatagatagttgatgtccattttttaaaataataaagcaaatgtcctttttttactttttaatacctaaaataccatt

SEQ ID NO: 14855 - DNA, 8929 bp, Cannabis sativa
tgtataaaatcagaaacattaagtatttatttatgccgcaatttaccaaaaaaaaaaataacaaaaattaaacttaattactcaaatatttaatatccgaagttattggtgtaggactactaaagtaaacaaagaaaccaaacaaccaagcaactaaggaaagcaaagcaaccaccaagaaaatttatttatttttaaaaaaattcatttccaaattcaaagccatatacccattttctaaatttgactgatctttccgatgggattaacggctcaaaaccccaacggagaagccgaggctgttcttctccttccgacgtcggagattttgaccaaaaccggtaaagtacccgaagacaaattccatttcgcatacataatctacttcattctgggtcttggttatctcttcccatggaacgctttcatcacagccgtcgattacttctccttcatctacccagatatcagcgtcgaccgtataatcgccgtcgtttacatgatggtcggccttgtttccctcatcttaatcatcttatactcccttaaatccgacgtttatttccgtattaacttgggtttgggtctcttcatcgtttcactgctcgtcgtacccattaccgacgccgtttacatcaagggtcgggtcgggttgtacggtgggttttacgttacggtggctgctgttgtacttgcgtccatttctgatgctttggttcaaggtgggaccattgggtccgccggtgagatgccggagaggtatatgcaagctgttgtagctggaactgctggctcaggtaaagttctcttgttgactttgatcaatgggttactttactttcttatttctttcaaaatctaatctttttatggctctaatttggaatctgaacttttttgacataattttgtattatgggtttgattttattgtgtcaattatgttagcaaaactttgtcttttaccattttctgcagatgagttgaatgtggtgtgcttattaatttagtttaaggctttgtttagacttttgatttcaagaggaaggaaagaattttttcttcttttgttgaatcaataatttattctatttttagagaatttgaaacttgagcatgctataatttgatgaaaatattagagaaagtctcatattgaatagttgttattgcattgaatagtttcaagggattaacaagtgaaatagttcgaaagagaagagtaggtagtgtgaatagtttaggggaaattttttttgtcttttcttctatctatggcactgtttcatcaaatagaatttgacttaagtaggattgcatttgcccaaattattcaagttattattattgtctttgcaggagttcttgtgtcttttctaaggatttttacaaaagctgtattcccacaagatgctgttggtcttaggaaaagtgcaaacctttactttgctgtgtcggtagttgtaatggtgatctgcattgttctatacaatgtggcacttaggcttccagttatgaagtattacagagagttgaagattcaagctatgaatgaggaggaagaggagaaaggtcctttgaccggagctgtatggagatcaactttgtgggaaattgtttgtagaatcaaatggtatggattagggattatccttatctacattgtgacattggctatatttccaggttacataactgaagatgttcattctgctcttctcaaggattggtactcaatcgttctcattactggctacaatatctttgacttggttggtaagtgtttgaccccattgtatctccttcagaatacaaaggtagctgttggtggaactgttgtgagattgctgtttttcccactcttctatggttgcattcatggtccaaagtttttaaggactgaggttccagtgacaatattaacttgccttttgggtcttaccaatggctacttgaccagtgtgttgatgattttggctcccaaggtggttccattacaacattcagaaactgcaggtattgtgagtgtattgttcttggtttttggtatggctgctggttcagttgtgtcttggttttgggttatctgaagttgtgaacaaaatttgtacaatatttattgttggatccctcgtttaagaataggacaaatgaccactttctttctggtatcctccattctttaaaagctgtgtaaatcccactctttgttattatgctgttgttgatagtaaatgctgttgttgatagtaaatttagttgtttcgtgttaattaatcaattgaaacttgggatgtggtgttctggttccagaaccgatttccccaaatattattatttcttgggacacaatgcacaaacagagaaacttaacatggtcattatttcttgtaaataatgttttgagccacctcaaaacacatctattcactataattttattagtactgaaagatgctacatctgcaaattaatctatatttgtagcaaattcacaagtattccagttcaatttgtgtgataaatttgctgtgaaaggaaaacacaaaccacaaacaaacctgtaacttgttcaatttgtagattgacactattccaatgacaagtactatctgaaaatacaaatttggaacagagagagagagactcttcataactaataaatgggacacaagagtacaaaaatgggtttcatttgcttatggtgaagacaaccttaaaaccaataaagctgaagaatatggtttaagactttacagcaatttatcagaatcagatcacatctaaggacatggaaacatatgtgaattagggcaaaagtactacaattagtcattctacagcaacatagaaggaaccgaaagagatagcttagaattagaaacaaacacattatgttcttgattttgaagatgacaagcctgtctccaccttcttaatttcaaagatgagcatcctccacatcttaagaacgaacatttccgcttcctcgtctaaaatcgattgaagaagctgcagcatgcggtctgcttccacatgatcctgagtgctggacacgatgtaatctaccaaagtggtttcttcctctcccagaaactccgttatctttttagagatccacggtctcattctctcgtgcaaagcgtgctgtgaaagcataaggtttcaagtatgattaagcaaagtgtaattatcaattaggaaacttgactacctataatcaatggagcattttattagcataactagttcaaccagactaacttgaaataaaagcatagaaagaatgattaccttctcataaatggcccaatttatttcatatgaaaataactcctccttggtcctcgggatcatatcaatcaattgttttgcatctagaagcttcttattgtctgacgattttatcttatcaataccatgttctcgatctgcatcatgagtcttctccttggtctcatttttactgcgaacaacatcctcatcgttccgctctcgtgtgcgtttacttctttccttttcattgtcagatttctcttccttgggaccaacatttgatattcgcttagcaaattcagcagctgcaaccaaatgtgattgagttgttccagaaacactcggttgagtagcttctagttcctccgttgaatagtcaatgggaaccaagggcctcatcttcttatccttatgtgcatcatcatcgtcatcctccttaaacacagaaggcactgtagtacgttttccagacccaactaaaccaaagcccaatttctttgtggtgacattgccattttgttgcatatctattgcagcagcaggaggagccatggttgattcatcactggtactaccgttatgtaaatttgtttcccctgtaacacaagcaaaattcattcaaacaagaaagagaagaaaacagaagctggagaaaacacaagtgaaaataaataaatattaaagtgtgtagaagataacacaccaatacagttttcacgactggactcagcttcagaatcctcttccatggctttatcattcaattcagtgttggattcttccaccaacataggctcttcggatccattggttgaattgtcaagtgaactcttcaaagcatctttctgttcctgttgcagcttttcctcctcagccctcctcttggcctctgcgatttcttcttcctcttttagtctgtcagccaagtcctcttccttttctttaagcctcttctttctcttgtcctccactgcacttcttcgccacctttttcttgaatcatcatcctcatcttcttcttcatacataatttctttcctccttttacgttccctttctttctctttttccttctcatactgacgctgtttctctttctccctttctctgtattcccactctttaagatattcttcatacaggcgctcagcttcctcaatcttcctcctttgctccctctcttttcgtatacgttctcgctctgtttctcgttcgtatctttcaacctctcgctctttatcccttctctgatcacgatctcggtctctctctctgcttcttctatcattcctcctattcttatcaggtgagctaacagcaaccctgtcattctcactaacttgtttgttgtcactagtgagctcatcatcattcttgtcatcggcagcatctgcaagaccagaaaaaatgaccaaacagcatcaggataaatccccaaggaatgctcaaattaaaatagaaaatgttaacagcatcttgaaaaaatataaaaaaaaaaaattaccaactaggaaaattaaaacattaccatttttatcaggttcagattccccatccctcgattttgcgggcagctctgagtttgcattcccaatgacatcaacaggtgctagagcaggaggtggagggagaggtttgtttttcatcctctcttctaccatgcttttcagcttggttgaagctacccggtcggcttccttgtcctcatcagtaacaatcccaaaggtggcactgtcattctcttttttcaccgaatcattgtcctcctttggctcctctgcagccggagttggaaggtcaattttcttctcatcactcactgcagcttcaccctctttagcagttgccaccaaagcatcgatttcttttaccttcttagaaacttcagttttcttttcaacataacgtgtgagataatcttttgttgcttgattaacatttaactgtcaggtgattaaaagtgagaaaggattacaaactaaatatcatcaagtaatcctgaaaaagctacaacatgattttctctagtccttaaaaaaaacacactccctcaaggtaaacacatcattttgccagagtaacatgaaaggtgttctaccattttgaacttttaccacactccttgctctgccttttgaaacattagagtcataagcaaggcattcacttgaaaacaattggaaattttgaatcgaaaaattgttgtacacgaagctcttaattacatggaaccattttatttttatatatttatttatatatatatatatatatataaatactaagtgactttgactttatgataacaccaatcaactaatattttttaatctacaaggcgtgcgacaagaaatagcaaaagacattaaaaaaaaataaaccagacataccacaagttcttgcccatcaatattaaatttactcagcaagcgcaatgcacgtagaacaccttcagcaccctcaaactcacaaaacccaaagcctctgggagtcccatttgtgggcacttgaccacgtttccaactcttgacagctccacaaaccttttaacacatatgagaccattaaaaatcataaaagacatcactcctagtacagttcatacaaaattaaaacaatgtaaaataacttattgctagtatggaaaaaaaaacatcaaatgcaagtacactgcaaatatttaagtacctgaaggagagccagtataaaatcattttcaactgtgggtgctatcttgccaacgtatacagtggtttgtggtttctcagcaggagtaagattaggaacaataactggcctaacaacagggggaatgattgggcgaattcctggaataggtgggcgagatagtacccccataccgattgctccaggcggtcgaaatgaaggtcgaaccattgtttgataaggagaagggaaccgaggaagccctacataaataaaaacaaatatctagacaaatatatcagagaaaattcacatactatagatattgtgacagcaatatattttgataagaaaacgcacattgacatattaaaggaaatataggttaagtaaaataactaattgttgttaccacacattaaaagcaaatagagatggcagcataggcatggaaactatcaccagctgaacagaaaacctgaagaaaaaatttcaaaaaaatagcaagttttgtaaagcatagatacaggaatgaccttaccttatgcatccacttgcaaaatagcaaccttgaaaaatatttcaaccacaccagttgcaaaaacaaataccaaagtacagtaacacagtacctccaacaagttctcatacatacaaaagcagttgtaaaacaacaaataatttgtgtgtaattataatttccactcatcctaactctgaagaaaaatcaatgcagaagagtcacaaagcaagagaaaatgaaacgcaaaaacacatcattaagtattcatcatgcaccaacacatattgtaatcaaataataaaagaaaaagaagttgagaaatagcctttatttggaagagttttgataccttagaagttagaacacaatgccaatgagcactcagttccaaacatggtgtgcttctggcacttgataaatccattaaaggaaaagtatccttaaactaccagaaagcatcctactaattgagcatgccccgatcatcatcaaccaattggtgggacaaatgagagcaatataatttgctaaacctttgtatatagtttttgtaataagatccaaatgccattatctttgtattgtagtaataataagtgtttcatttaaattcttattctaaagacaaacaaaagaacaaagcaaatatgtgcataccaaaaaaggagttgtagaggggggatctctaagcaatatgaatgaagcatgccttccaacctttctcaccgtattcaatcaagacactgtaggagaaaacatcctgtcatcgataccctttatctaactgacacacattggttttaacaaactccgagctctgttctaacataatcttccccaacattatgttattcttaaatttgttcaacggttgaaagtgtagttagttcaacattaatgttatttcttcacaattttcctatctactcgttcaaaaatttctaattgtttttattaattcaatcaaattataaatcctgtagacaccaaaactagctatcacccgttacaactatcaagtttctgaaacaacttgaatcagagtaaacaccaaaactgggaaatgagaattatctcatataagatataaaaattcacaagtaataacttttaaaggaatttagaacattcaaacattataaaagccaatcaaccaaaggagaatgtatgtagaaacgaataacccaccaggcatggctgcgtatccatttggcatcggcgcgtacggaggtctcaaagcagggttaagagtctgaccaggggcgagctgatacggctgcatcaatggctgctgcataggaatcgtcatagcaccaggaccaccggttgccgcgccaggagccatcgccgtcaccgaaccaacaccggggggttgaacaactggattttgataattcgggttcggtacaggagtgaactgaggaaccggacggaatgacggcgctgacggtggaacggtagagataccagagaccgacggaactgcatacgagatagacggaggaggaggaagaggaggaactatggttggatttaaattaacggttgctgcgacgggaatggaaggcgaaggcgtttgcagcggcggcggtggtagttgtgggggttgagtggagaccacttcttgattgggttgggtagcggtggtagtggtggtggggttttcgttaggcggatttgattgttgggttgccggagaagaagaaggttccgccatggatagaagctgtttgtgtaaaagagatcggagaattgaaaagggaactctttttgattaaattgtgaatctttgagtttctgtatttccctttctattatgccctagagagagaaacaggagagagaaacatatatggtggtatatagtctaaccttacccaaccaggcccagtcctaggcccaaaaaagcgctcttttcggcccatttaaaaaattaacaaaactacacataaaataaaaatagttataaactagttcttttcttttagtaaaataaaaatatgaaaggagtccttttcaaccttttccttttaagatagagtccttttcaactttacacatataatataataggaaatctgtacccatatatatatatttaagatatctagtaaaattttaaaaaatttagaaaaatttaacatgccgaaaattaaattcaaatagtgtattacacgcgtgactattttattttatatgtgtgtaaaataaattattctgaatttctcacaattttataggatgtcttaaataattataacgtatataaatataaaaaaaaatatactaaaaaattcttctaaatgctaaaacaaataaagattgcatcaattcaatatgcattgtagaatcacatataaaatcaactcatatatatatgtctatactagtaaacatcccgcgcttcgcggcggatatataaaatattttaaattatatttaaaaataaattatgtattttaa

SEQ ID NO: 14856 - DNA, 5228 bp, Cannabis sativa
  modified_base (143)..(146): a, c, t, g, unknown or other
aaattataaataagttaaaacaataataaaaattaaatataatgctatattataattttataattaaaactattaaaacaggataaattaaaattatatattaatttatttatagagtgtaatataaaaatttgagtatttannnntaaatatttaaattctaatgatattaataattttttacatgaatatttgtaaaatattgtttaaaagttatataaatataactaaagctttcaaatacacatataattttgtaattgtaaaaaatatataaaaaaaaaagtaaatacgaatttaagctcgaatatgaaaataagttggcttgtttaataaatacggaccgacacgagcaaagcacgacatgaaaatactgggcctatgagccgtgcctggcttaccctttaaaaatgttagcacaacacgacccatatttttctgtggcatgcacgatacgacccattttttaaaaagcacgaagaaatatgggatgagccagcacaacagcaatttagctaaaactaaaaagcatcattagtactattcacaataaaattaaatgaaagttgaaatatacatatatattttaatacagatagttataagtttaatcaacacaatttcaaatttaaagatgatgaaatttgagatattgtacttttgcaaataacttgttactgtaaagagtaaattttctttgtcaattattgctaaatatgtaaatttcccaaactaaatattctagcccattaagcaatagtgcagtatactactactccctctcaaatcctaaacatgattaattattaaaatggaaatgctgaacagaactattgacttttttattttgatccttttcctcttattggggaaaattatactatgaatgcactacagtcattccaccaatgtcaatataaagcaaatcttatttatgatcaggtcatccatgaccatgagtgagcatgaatgaatacatacaaagtatttggtctttaaaaaggtatgtttcaaaagatgattaataagacagcagaaaaatgcatgctctccaaagaaaatattttccatagtgcagcactgtttttgcatacaagattacattcacagatactttgccctttctaagatggtgcttttcatagtcaacaaggataacatcagaaaattaaacagtgtgattgcttgtttaattttggttggttctgaaaacagcttattctaattcttcaaatataaaggggaaatgcactgaacttgaaatcatttgtcaaattaggctgttttaactttgaattaagaaaaccagattatccactttaactggtttatataattttctagacaagtttgcttgtaaaaggttctaaagttgctccaccaaaccatagtaataatacgtatacaaaaagttgaaaattcaatcacattagacacaaatgaaaaagctcatgaaaatgaagaataaagctccttttccgactgatacaggcacaaaaaatatatcccttgcttcaagtatatgtgtacatcaatacatggaccactcccatgcaatgcaatatgagtcatgactgtccaaagcatcataatcttccagaagtaagaaaaaaaattaaaaaaaaaaataaaaaaatcttgagaggtgattctttatattttttcattgctaaaaaatatatatgaaaaattacacggcagagctccatctcatacaatcagtatatcttcttttatcagccatcctcactcccaacaaggggaacccttgtaaagaaaaccctcttttatgatcttctttaaggtgtgaatggaattttctaattcaagaataagcttaaagaaatataaatgagaactaaacaaatcgctatatagtacactatcttacattaatggcaggacttcccatccccctctttgtttctatgtgtgtaatgtacaaaatgaaagctatatctcagattttttctgagagctttctggtgagaggacttgaaaagcctgaatgctgatctcagaaagtaaaggtttttccatctctaaccttgtgattcaaggtctcttctccaaaaacctcttcaatcatattgcaggttggcaagaagtcaaccttatttctagagcttgtcatgtatcccaattcccaatctccagaatcacaaggctccaaaacatatccattgctactaaagctcttcaagcaccgattgccattttcagacatgtggttccttagtgatgtgactcctgtatcagaggttgtacacgaatcgtcttgaacttctctattttgtttctcatctaaagcaattttattctgatgctgattaaaattgtccagcttctcagggcatatttctgaactttgatcaacacccccattattagaatcagaattaatattatcatcagaagtgtcttcagctatatgctcactgcactgcaagttatcttcttgactccaagtgccatgtccatatactggagactcaacaaccgagtcatcatcgtcctcagacatatcaatttcattgtcaccaaaatcatcactcccctgccactcgtcattatcactgtcaacattttttggatcatatctattctgctcagctctcttacgaagcataaagacattgaaatagtaactgacaatctccttcttagtccgggagggaaagacaaaagacagcctgtcccagaaatttttgcccaaagaagctgggttggagaagacaacttgatggaatgcatgttcatcctcttcactccaagtttgagctacttgttctcccatgtcatgaaaacctagctccgaaaatacctccagcccaagagatcttacaagttctcctctagcttctgtaatgtgttttctagcacagctgagagaaccctcatcttcacaataacaatcggttctcccactcccaatttttggatcagtatatacaggtgaagcaaaatcaggcattggaatgatgcacttaccaattaatcttttttcatcctcagattcaggttttaaaactccctctgaaagataggaagaacctgagatcttactggtgccctgttgaccccatggtggaacttcagcttgatggtttgatccaatcggaaccgacttccgagaagggtgattcaaaagtaaagaatagatgtcctcacagtgagctatggtccttatgggacgctcgggaataaaatattctgggaaaaaagaaaagcggaagtgtgcttctggcatagattcttcttcactggcagcaggccatgatgatgagatggaaccaggtgcacttgtttcaatgttctcacaatcttttggaacatcagtaacaatgtcaccagaaaactttccatcacctttgttatcagcatttgtgaatccatcctctaacaattacatattacaactctgtgagtttagaaaacttgaaaaggaaaccatgtaattaggttgttttagcatttaaaaccacagcttgtcataactacaattttcagagtccaagtcaaaatttgtaatcatcttatgctacaatcactctatcagatacaagtaaagacgccccataaaccaacaaaaaaacatgaataaagccaacttgtacacaaaagaaaaaaaaaattgaacaaaggagaattggacaactgactcgtaggggtacatttgttcttgccctacctgagcatttacacgtggcagcatacatattgatttcactgagcaaacaattattcatagacaaaatgctctcacaacaaaacaaggcttaaaaaaacagctactttccatttttacttgtattgttaaagtcgcaacatgctcacctaaagtttttggcatcatttcggatgcactctcagaaaaaacagattctgagaatgagaagagttgtttgctgtcttcaatctgtcttgggtgcttaaaagaaatcttgaagatttcttcttcatcataaggtcgcttctgtaccatatctactgatctgcatggaagaataaaaataagtcactaagttcaaaagagaaaactaaaaaaaaaaaaaaaggaatagtatctagatacaaggtagtacaatgagcattgataaacataagttaaaaacagaaaaggaaaaacttctactgaagctgaaatatagaatgcattaactggcatttagaataactgagttatatatatatgcattctctcagtcatcatatgagctaacaattgagaaaagtgtttcacccatgtatatatatctctactacttaacacaaaaacattactgtaaaatacaactttgttgcatcttacttcactgagcaatgaatcactaacaaaaagtaaatgaataattcaacccatcaacaacaatagaaatttataccaatgtcctatctaatgtcaattcatagctacaaacattagtgatactaagttgaattttatctcttagaaaaacagtttacatatatttaagatgtatgaatatatgaagagcagttaatgccactagtaaaagaaagaagagacttcagataacattttatatttacacataaaccaaaaaaaatgttgctactttctcaaaaaaaaaaaaagagtttcttctaaatgtaatcatttttgctaaaatcttctaaatgtaatcttaaatagcatcattgttaataaaatgatagttgttgtcagatatattttattataagagatgattggtcactatatataaacattttctttaatagagggcatttatgtcaaatgacttatctcgttgacttaaataaataaataaataaaattgccaattaattttttatttttatttttattatttacgaataattacaataaacaggcttgtattttataaaattaacaaaaagagatctaatctatacctcaaaagaaatctccgtcggataacgttagatcggaagattggaggtaaaatttgatggcaataacgaacaaaaccgtgaaatttccaggaatacagtctttctcccaacccaacttaaataaaaaaaagccccaaatttctgaaaaccctaaccctagatttaaaattccgagaaaatcataaataatacaaccccggtcatgtacaaaatcagcgatttccgattacaattacacgaaagcctatgaatagatcaagaaaaaaacagacaaataatccagacacagaagcccacaagaaaaacaaaatcggaacgaaatcgaa

SEQ ID NO: 14857 - DNA, 3755 bp, Cannabis sativa
  modified_base (44)..(48): a, c, t, g, unknown or other
  modified_base (1656)..(1666): a, c, t, g, unknown or other
  modified_base (3371)..(3377): a, c, t, g, unknown or other
  modified_base (3423)..(3424): a, c, t, g, unknown or other
  modified_base (3501)..(3507): a, c, t, g, unknown or other
  modified_base (3534)..(3534): a, c, t, g, unknown or other
ttgatactcgggatcccgatccatatgattattaatatattaannnnnaaaattagatttcggatttattattataaaatacgggcgttacaatacacatgttaaaagatactagtagtagtggtattgaggtaaagagttatattttttgatattattaacattatttgttatctaagctctctcaaaatatttctttatcatgttacagttttaatgttacggcttataaattagttaaatatacattttttactaaaatatgagatcttttttattgtaagaaactcctcctcctctcatatgtataactctaatccaatccaattttgatacttgaaaaactagaaaccattcgcaaggggagacgtcacactggtaccttagagcatttctaatggaatataaaaaagatgatcatttcagtacacaacaaaaattactattttaatagtatttttaaaaaatgtgctaaatttgtcaaatgctaaaaattgtatcaaatttaggacaatatataatattttgtcaaatttagatcacaataaattttattttttatttactgtaatatcactgattattgtgatttattgacttttacaagattttactctttttatttactatattactattatttaaataataaaaaaaatattatttgtatgttctcaatatgatattaaatgaccatcaataataattaatcttttttatttattttacatcttgtgcattaatacacaattataaatagtggttcaaatatatcacaaaattacttttttttttaccaaaattaacgagctaattaatacattccaacttaattataaggtttggtggttgatgatcacctagggtgatccgcacctttccttttcttctctctctctctcctattgtatctatataaaataaagagaattgttaaaagatactattcgtgcctaacaccttcctcgataacattactactattaataaatatcgaattccatataacttaattgtgatcatgacgcacatgagattgggggctatctctcggttgtgtagtcatgaattagatcatggaaccactccataagggctagcggagaagggttgaagccatcatgaattgaagagtttcttacataccacttttgccaagaaagaaccataaatagagggtaatcatacttgtaatccttttaaattcgagacaaaaaggtgatggatcagcttccacaccatttttgagttgttttcaaagaccagcacactttaaaaatttaatgatagaagggcaacaccaaattgcatgagcaacatttttggattttctcgaattgcatctattacatcttttatcgaccttcaaacccttaaaggagagagtaacattagtgggaagccaattatgacaaaatttccaaaggaaggacttgattttagattcattttctaaagatcgagccactagtgctcagtcttagacatattggatgctatgcttttgtttcagctttctcatacatgaccaatttgtaaccgctcttaacgttatattcactgttctcacatcgttcccatcacaccaattctctaacaatatatcatttacttataatacctttggccacaaattttttagtcacaacataggannnnnnnnnnntaattagtcacaatttttttaattttagtcacaagttttatattgactaaaagtaaaatttgttatagtgtgtgttttgtaaaagtttactctctgttttattaaatgataaaataaattttatactttttaaaatagtacaaatagaaacttgagctcaattttcaacttcttttaatataactaatttgtgatttttctaaacttactaataaggagaaaattattatgcaatgataaataattaatttttaagttgtttgataatttcttagtgaacgaacaacaatatgatatacatatagtatgtttaccaataagtaatcggaattaatgataagttaagtattctattatatttatttacttagattattaaaattagaaagtaaaaaacttgattaaataaatgatgaaagaaagggaatactttccctactaattttgtaaaaaatgtcattaagggtaatggattttatttatttttcaatcttaaatatataatgatatttttgtctttttaaaatatatcatacaaaataactactattatatattttaactcaaaaaggtaatttagtcaatttaatcatttcgattacgtttcttaaaacaagataaatcactattattctattttaaaaaaaaaaaaattaagtaaataatatattacaaatattaatttcgattatttttttttattccgtgatatttctccattaatttattttgatcctgaatattgtatagtaaacctactataaatattgaaagctatgcaattatataataatttaatattaatgtgatgagtttgaacttatattggtgataatttggttgaaaatatgattataccattaccacgtgtacaattatcagaccaaaactttgacccttcttcactttctccacacacggttttgtaaaattaatttctaatggtgtaatttggtggtcttcattaatccataaatacatattttaatatacatatgaataagaatatgtaaccatattataattaaatttacaaaaatatattggtaaaagtaatatttcttgtagtactcgtaccaatatattataagtaaaataatatgaattaaattgaataaacactactaatcttaaacgatcagataagaagtcatgtccagtaaattctgtaggagttgtctctctcatacattttagttgaagaaaaataggtttttaattaactttttaaagtcaataattatatatagcacttgaaaaaccctaaacataaattgagtgatttaatttataatggaactaaaataggtctgtccttaattagctgagatccaagttttttttggtgttatcttttagtatacatttggcctattacgtacatttagaaatggagatataatatattaccaaattcaattttgcatatatctatttataaatattatggtattgattagactatatttaatattgttagttctatttaaattcgatttatatattaaatgttagattttattattcaattcaattcaattgatgttagtcatccaattgatctaatatttattggatactggatagaattgattctcactacaaaaaaatttactttaagccacaaccaaatttgggactaattataaattatgattcttatgttgtgactaaaaggtccgtgactaaaaatattagtcacaannnnnnnaatgtgttgtgactaaatgtatttttaatcacaatatttgttgtgnntaaaactaaattagtgacaatttataattaaatactatgttttagtcacaagtgacattttgttgtgactaaaaatnnnnnnnagtcacaaaaaattatgttgtgactanaaagttgtcactaaaagtagcaattttttgtagtgtctattcattaaatgtatttcatgtatatatttattggtttaattctagtttatctaatattttagatttagtattttttagatcagattggatccatccaatatttaagatccaatattcattagattgtattagattcatccaatttaaaataaaagataaaatttaatattaatttttatata

SEQ ID NO: 14858 - DNA, 5211 bp, Cannabis sativa
gcagtcccataccaacacagtctccgaatcatcccacttgaccttcccaaggcggtgtgggattgtacaccttacccggtatttccccttacgaatcacgggactactgactgtcacacttctaaccttaagcacgatgttactgtgactgttccctccattgagaaatcttttcaaccagtttttagcaagcctattcccctatctgtgattgttttacccacaatgaactctggctcatctgaggtcccctcttcatctgcaaggccttcagtttctcttataagattgtcttttgttagttggcaagtgaaactatttactaaggttaaaaacctggctcattcctatgttattaataacgccagagaaggtttgaacaaggggtggtaagtgtcctcactgcaatgtctgaggtccttaaatctttggagtttgtgccgtcctcaaatgctgctcaatttgagtctagttcttctaaagagcttccacaacatgtccccatgtccgcagagttagctttatttcctatgactcctgtctagggggaggttggttctgttcctgctactactgcaaatgttgctcctgtctagatggagtttggttctgttcttgttactgcagcaaatgtagcttctgcctagggggagtccctatctgatgttgctgattctctagaagatggtcactaatcatgctcaccgagggggagatttagtgttagtttttagtattatccttgcagctattgtcacaacgctctctaagtgtaattttttatgaattgttgtgtctttttgtgctgcctgtctgctgtctattttttctggtttgaaactctgttgtctggtttcagttgctatcagttattgtcttttgtgcgtttttcttagtgtttttctattttggttctttttatctttttcttgtctccttgtttgtttcgttgagcataatttgcaaatggggagattgtaagatccagttatcctgtttagcaaattatgtattattggtcatctatctggtggctagtcttatctgatttgtattatattttgagtttgtttttgtttactcttaacaggtcagcattagttggatgagaacgatggacaaatgtccttagtttctaagttgttaagtttgttttaatagagtggttagtatataaacagtgattaccgatttttctaactaactcttctcgttcgattggtttggttaattctgctctgctagggaagatgttttgtttatttttcttggtttatttacagatcattgctggttcgatcttcgggagctaaaggagaatcaatgatctattttgtctaaagggagtttagatcaagttgctaaagggaattcagctgtaaggaagtaaggggatcttggcttcaaaagtctaaggggacttagactgtttaatttgattgtgatcaaatttgtagggtaatccttgcatgaattgattttagattactattgggaaattgtaatcaagactggatgttgtgaagcgattaattcatagtgaaggttattaccctggttcaagggaacccaagcaatagtcgcatggaatgagtttccagggtcggatgaaacttgtaaatctgtgtgttttctaatgtgtttcatgcaattttagataagaatcatactattaaaatcaactaaaaagaaatcgacattcttaggttttacaagaatagctatggtgtggtggttgggtctactgattggatattaaattgtttctctggttatctgcagatgccgtttaatgaaaattcatatttctcttaaaaaaaaacttatttcaaaaggaaaaaaataatttattgttgttagtaaaatagtaaaatcagcgtatttttttttttgaaaaaaaaaataagaaaaataaaaagaaaacttatctagatatttctatgtctattttactactttccatatttaatttaaaaggtaattctacaattagacttatcaggaaataatacttattttttcttctaatatcatatttttagaatctacaaaaaattctcttaaattctttccataagaaatttctcacaccaaaaaaaaaaaatccttgtagaatttcattctcaatatggactctaatattgtccacacaatttcctatatatacatacacatagtacttaccaactatccacagaaaatatacttggaaaagacaacatttacaaacaaaatccaagatatttattttatgatggctagaagaaaaatacgacttgcatggattgaaaacaagacagcaagaaaagcgagtttcaggaaaaggcgagcagggctattgaagaagatgaaagaactcataaccctatgtggaattagtgctttcatcatcatcaacaatcctgacgagttgggtcctccaataatttggccatcaatggaggaggcccgtgagctctaccagcgatttagaagtgtacctgatgtagagaggtgcaagaagatgatgaaccaagaggattatctacgagagcgctctgggaaaatggaggaacagattcggaagtaccacaagcaaaaccaggagaacttaacctcacacatcttagcccaaatattcggtcaaggcaagcccctgactgagctcatgtcgaatgaactcgatagtgtcatttgtgtgttggaaaattatttaaaggaggttaagatgaggatccattattataatctgatggttggtaatcaatcacctggaagctcctctaatgtccctcctccactcattcctgaccaatctaaaggaaaggaagtatcttgggagtcttgtttctctgggatcctagttaataataatattaacaatgttcttctgatgaataacgtggagaagcaagtgtcagatcatcgtcaatattttgttggtggtactagtcacggttctacctttttcagtattgctgctaataatgttgtttatcctaattattatggtttagggagaaattgcagtacaactggatttcacattcaaccatatatgatgaataatcaaaatttatttggccatgctatctctaatgaccaaaaggatttggttaatttttctcagcaagtgaattttgaaggaagtagcattacatcgtctcaaccagatactcatttagggcaaattaatcttgaatctggtagagttaattatgaacatgtggaaatggaagttcaatctggtcaaggtgacattattatggctgagaatcacaacaatggagataatactggtaatgttactagtgttaatattgttgatggaaagaaaccttagtttggggccctattggaaagaatatgctagatttctcttatgaataaattgttattcctattttaaaaggttgtatttaatttcaatccattatatgggaaatatcattgtaataagatatctttttcaatagaaaatgagataataatattcatattggtggatacaattaatagcaaaatgacatttcaatagatttacgggacgtttgataatacttttattttttaattttttaattacaaaaataaaagtaaaatttgtttttaaaaaataaaaatgtgttctataactattttttgttttttaattttaaaaacagaaaataaaaagtgtgttctgtaacttttattttcatttttattttttattttatttaagtcagatctagattcgggtctgaggccggggtcgtggtccatgtctggcattggggtcgaagccgcattccggatcccaaggtcaagattagagtcaaagtctaaaatattaattaagaaaaaaaaactgtttaaaaaaaattgaaagtgtttttttttttaaatttttaaaattttgattctcaattaaaaaattaaaaagcaaaaacagctttacaaaatatatttttactttttaattaaaaaatagaaaattaattaaaaatgtattattattattattattttttttttataaattgtgatttgcgaatgattattggtcataaacgcttacgagttaatatagtaatttgttgcaaagaataaaaaataaggtgatgctactaattataatacttattaattataatttgtagttaattagttctaaaagatattttactaaatatatctcttatatgtgcgtgaaaattcaaagaaaatgtatattcttaaatcttaattctatgattggtatgttggaataggtgttagtatacaattcaattcaaaagtgtttgtaaatggttgttgacgaaggattattagtaatagtaaaccaacgattagttaatatattagttgggaaaaaataaaaataatttctattgacataaaagatgtgtgatgctacaagttatatttgattagaattataattgatctttcatatactaattaaagatatcttagcaaatatttatactatttatatatagataaccttaattttaaattttacttcatctattttgtcatattgtgtgattaagttattttatctttagtggagagagactcaacactaataacaaattttttttttttttttgggataatatgaggtagtgttctaaaaaatcattcaatctaattacaactgatcgattcaatcccagctgattaaatataatcggatatccaattataattagatcggatcagatgtaaattttaaaaattcaattggatcggatcggttgttagatgggacatccgatccaatggataaccgatcaaaccgatccaattatcatccaattatatttatatatttttaaaatacatttataatttaatatattttatttaaaaaatatatatcaattgatataatatacatttaacacgtgagattaatgaaaaaaaactttaaatctaaaatattaattctcatcttcctaaacgctaataaaattgtcaatgcgtattgaataaattttattttttagtaattttatttattatgatatgagatgagatcatgtcatgaaaattaaattaggttggactaaattaatatttactatgtatgttggattattaagttttaaattatgtatttttttatatatatttttctttttattgaaatcaacttaaatggtagctaaaatagattggatggatccaatccaatctaataaaaaaaattttacagtcaatgtatctaatggttggaaccga

SEQ ID NO: 14859 - DNA, 6356 bp, Cannabis sativa
  modified_base (372)..(378): a, c, t, g, unknown or other
aagaaggccaagccatctactcattactttaaccaacaaggggtccgagtacttaggcgggaaaacaaaatgacaaactagccacctcaagcgggctggctggccaccatatatttcaaagaatagtaatattattagagtgattttcgatgtaaatacttaaatttaactctcaaatacgaataaatataaaggggcgtttggtatgaggtattcaaaataatttgattataggaaatattatgaaggataatataattgtaggaaaatgtgtaaactgtgtttggctgtgtagggtaatatataatcatattcacgttaattaaattacactgtatgattgagtataagaatcttatatattattttaannnnnnnaaataaaaatattttttattatatatatttaatgttaattatatataaaaataaaataattatttattaaacaaatatatttattaattagtaaatattaaattttattgtatttattattaattaaaatagacatttctatatattttgttactatgttatttatttttgttcgttatgttatttatgtacactaatgaatatatatgtatacatgttattgctagtaatataaaaataactcagttaaaaaaataatctcacaaactaaatatatatggtaatattttattgataataaataataatattattggtatttaaatttatttattaatttaaaaatattattcaaattaatataatagaaagtaataattcaatcctattttttttaaggtatcaatattaccttccggtagttatattactaaaggaataacattccaagactaaatcctcaaaacaaacaagataatatttcacactaccattcacatgttagcattaaaccattccaaacacaccctaagttactcgtattgttatagacgactaaataggtaagtattgtccgcatttattctaaatccaggtgactttttaaatgatatgattattaaatattgcaattatggtatacatgggcaccagtgtgacctgccccaaaatataattgaagagagatggattggagacctaggcaggacctacaaaagaatagaaagaaatttctcttgaaatttataattacattaattgttgatttttaggccttacattttggttgagcacaagattcagaggggatcttgattcaaccccagttgctgataattaatataatcaattccatttaatcgtatacaacataagatctgttctggcaactcttcagctttgttcccctgtcatgtcagtcaaatattagaaatttagaacacagtgcctgtgaaattcaattaaaagttactgtcataggattagattgaaacacttgcctgaatagtgaggccaacatccaaaacgcagctcttaagtctgtctaagaaagcttcaaatcctttcctagaaatgtaactgaatctatgcatatccaaatcaatctccatgtaattttccccctgcccatgacaccatattcactgtcaattatagacagctgagtagatcttacgtagtaagtaaaaacaacttcagttttaggacaacaacacgggaccctgctctttttcttatatcagaacaagggaccctgcttgtttaaccaatttatgaaactagtttacacttacaaagtaaaactcatgttgaggacgcgacaacacaggcttttcattgtaagcctgcatgagcttcctttctgcaccgcccagatgaagttcttccacgtttgcaacacgtcctaatatctttagcctctccctaaagggtacgagagaatctaccgtaaaaccttttaccttttcaacttcatcatcgattaacctctgtttttgagaaaagcatcattttaaagagccaataatagcataaactgaaaagaaaacgtacgcagtactttcacatccaaaacataaattatatacgaaatgtagtgttcaaaaggctccatcttaccctgaagttctcttggaaaagaggtggaagttccttagagtaggtttcagaaagtttaaagtacagaacaaaactcattccttcaccatcagtttcaccctggaaaagtgcagctggatacaatggtatctgcagaccaagaagaaaaaataactgataaagcaaatcaagaagctagagaagaaccttaatagtacgaggttcaaaatatgacaaacaatgagtattagaaacatgtgtttgcatacagtataacggtttgaactgccattcttatttcttgattttggatttcatacaatatttaagttgtttccaactatatgaattgttaacggtaacctttaccattacctagctcactaaattgttctaaatcagataatgaaaagatgttaattcagaaaatataagatcatcccagaatcagggacttgccataagacgtagattccacacacactcaaacagttgagagagatacatacctgtacatttacaacaaggatagaagggagatcccctgcagaattaatagcagggagcttcacaaatctagcaatatgatctatcttccgctggcacaagaatacatccactccaaatggataataagcagcatagttggaagcaaattctttctttttgtcactgaaaataagttatctcgaaagtaagcgtgataagaaaaccattcaaacctcaacagtacagaaatattattatgtaagaacagcctgttgattagataacagagatagccacatcaattttttctttttttaaaatagaagtttcccttttcagaaacctctccaaatataggcgtacgccactaattgcggtgagaaagaatagtttgctttgtgttcaccgtgcggctgcgtatatagaaaggatgtatgaattgttaaaaatgaatgtaataacaatttcacactgccctccttaagtcttaccgaaagtaattcactgcccgcactttaaatgtacttggctcgatgggggaccaactgtctaggattttcttttctatgggacaaaaaggtacttgagaaccggcaattggtcgttgcagaaacatctttgatgacactgaattacaaataaagaggaataagctaatgaaaataaacttgttaaactgaaatgaaaaacagagggaaaaataaattttataatgatctacacaataaaactcttggactctcaaatttgaagtatcctattttcacacaattcacatttacagggttcaacgagcaatctatatttcatgaatatgaccatcaaatacttctatcaatacactaattaaattgctcagctaaaaggctgatgaatacctcgtgaatggtaatggaaatataagctctaagagaagcaaaagaatactctttcatgccagaaaatataattgctaaactaagactacctgtttttttaaaagaaaaatgacaataatacatcaaatgttgaatggtataatacttacgtaaagcagaaatagcatggccttctttccatttaaaaggaagcttcaggggtgccttcttccttgcactcggtggactagaacttaatgatcttcttttatcaactgaaggtactgtagacgcaagacaaggcaaacagttacttggaagaattccgcagttatccaatattccttctcccttgcaagaattttcatccacagatgatgaaatttcatctaggaacacaggatgatttgcttcatttgttgacggtccatcacatttaggttgggagtcaatatcatctgaactcataacctgaaaactagagttctgggcaccttcagtgacagagttgcccgaatttcctgacactgacacaccttcatattcattaagagagagcacatctgcacatgtcgaaactgttaacaatacatatagaacaaattatattaaaccggatacatggaaacgtattagtaattgaccgaaacataataataaaaaagaaaaatcataccatcttgaacactttggtaatcttcatcacaatcagaatcaaatacgggaattgagtcaaaccatgcttcatcgatgcttcctgctgatactaccacattgcaaaaaccattagtaaaaggccttaaaagaagttcacttgctcattctcatctattacttagttgagaataatttttttgtcaaagcttgatcagtgtatcagaaagaaaggaaagtaattaggatcaccaagataatatggagatatataatacgaaggtaccaacaatatacagaaaaaactccctcactgcaatttactttgatcaaacaaccaataacagtccaattatcgtaagagaaatttcattttttacatagtctccttccattgggaaaactgtacatatttcatgattaaccacctcaaaaacttcaaatccaattagaataattataattattaattatttttttttttaaaaaaaaaagaagaagaagaagaaaaaagaaaccgataaaaatcgaccaaaacgtcaaacagagtcttatttccgataataattaaaatccgaaaaggagaaaactccaacactagaacccaccaaaatccaaaaatcaaattcagttaattaatcctccaacatttttgaagaaatatatatttagaatgaaaggaaaaaatgtaccttggaaagttgggttggtgaaggtggagatggaatcaagttgagcagacctatctgctctgtcggatgaggcctcagacaagcgagacgagactcttcccttcagacctcttctccttctccgacgaccgttggccttcttagaggaccttaatctccctccaacacacccatgaggcgttgaaacacacgctcccatttccttctctccctctctctcaggatatcagaggctgatcacccctgtcacaacatctccactataattctagagagagaaagccgtgttctcaggaggagagagatccaacagcagagagttttaaggtaatattgattttgattctgatattgtttatctctgtaatttgtcttttgtatttgcctctctcagaagcgaagttttttttttttttcctttttctctttcaattatttggttggaaaaagcttttaattaatcaatattgatattttgttaatttaatatatatttttttttttggaggaaagttaatttaatatttggttaccaattttatattatttatttcgacaaaatatagttatataatttaaaacaatattttatttatttctatgtttttttttgtatggttatttatttctatgttaactaatatttggtttactcattgtttcaaaaatacatataatttggtttactaaaattaaaagaaaaaaaaaaaggagaagaagaaactttgcatggtgaaagcaagcaagtaattgcaccctcaaaaaaagaaagaaagcaaagtaattgtgggaagaggaccagcagcaggcagcaaaggagagcccaaccaaatcaggccgaatgcaatgccacgtggcatcgtttggtgtacgccaacgtgtgggcaggcagtcaggctggactgggcttccacgactcctgaaaatatttggtgatgttacttaattggactattctttcttctttttttatttttggaataataattggactacgggttcccttttcaaattttgtttggttttatagaatattatttatgttatgagtttttaataaaaaaaaaaaagagcttttgcctttttggtgatgtttgggggcagttgttgtgatggttagatggtggaattcagaattggcgtttagctgggtttttcttttattgaataataaaaaaaataaaagcagcactacggtacgtgtgtatgcatgtatgtactatttatttccctgtagaccttcctgcctttgtaaaatttccatgtctgtccaaattttgtcattaaaaaaaatggtattatatatttgtcgtcattattttttaaaactcgttactttcaacgaggcgggctaattttcggaagaaacaatatttagagtgctcaggccaacggacactccatgttgtatatatagagtggtttcttctccaaagaggtatcatattgtacactaatttaagattaatgtaatagtgcacggtatatggtagatacggcttatatatttatttaattaatatttattttattagatgttgttagaaaattatttatcaagaaggataaatctttattttttttttgaaacaaggataaatctttattaatcacaagtaattacaaacaaaactaagctgaaaacaaactcagcagctaaagaaatactcttatttacaatggtgcc

SEQ ID NO: 14860 - DNA, 4192 bp, Cannabis sativa
ggcgagctgcttcgggggtgcttcaaacttgttttcaactccaaaagcgtcatgttcttgtcaatgtcgactgccctttgtgcaactctagtactgaaactattcatcatgcgttggtggaatgctcgttttcaaaggctacttggtatcgcagcatagtggacgtcggggttggggcagcaacgttcagcagctggttgttgggaattttcaccagggggccgaagttgaaatggaggaagcggcgatggtgagttgggctatttggcgtgtgcagaatgactttatttggcagaagaagagttggcttgcttcaaatattgtaacatcagatagaaccatgcttgatcaatacaaatttgctcaggaaaggaatggcctttcgttgtctcctttgaatgatggggggcggaactgtgagtgttggattgtacctgtgttaaacaagattaaagttaatgttgatggggctttatttgaacaagaagggcggtttggagtgggctgtgtgtagctcgagatcatcatagaaccatggtagaagctttcaagaagggaaaggttgggtatgtccaacctgaaattgctaagatcataggcatcaaagaaagtttgagttggattgcgactcatccctgggacaatgtagtgttagaaacagatagtttggtgtgtgtccaaacagtccaaagtaaagtctttatgtcctcacagttttgtcttattgttcaagatgttaggaatttacttttggtttgatcttttgttgagttatgttttattaaacgatctgcaaacaagttggctcattgcttggcaagagactcttgtttctctactggttgtgtgcttcagttggaggattgttcctctatagtgtgttctattaacgaatttattaattaataaatctgctgattaattaaaaaaaaatacttactctatctataaaaacagtatataacaactattctattgttaggacattatcataatgataaaatacttttatgcttcgccttactttattttacccaataccactaaattaacattcattggtgaacataaaatcacacaattaactctatgccaatacgtataacatataaacatatacacgcgtcacttaacataatgaagagagtttcatttgtaagtgcaattttaattcttgtataatttatatatcattatatatatatatatagataaatatatttgattaatgtaagtgtaagttactttatccaaattgtaagttactttatccaaacatgttaattcatataccgcgtgtgtttgaacattatatatatagtaacctagctaatgctcccactagctagctatataaataaatgaaagcgatatcgtttggtgtaagtctaatctttgattgattattaaccctaatgtaagtttttctgacaaagaaatatgctaaatgcatgcatctgatcacaaaagttattccttttcttcttctctttattaattatctactcatatggtatatatatatttatatataaatgatcttatgtagtggtaaaatgtatattgtctatctagatttggtaattacaaattgagcaaaatatataattttttttttttttcaaaatacaaatgaaaactttactgtatgtgtggtacagttttctcagtagaaaaacaataacgaaaattaaagcaggggtggcaggataaggtcaaaccacaccgatcagcacgtgatttttgatgccaaattccacggctctttaaatgagatcaaatgtatgtaacgttgttgctcagaaaatttatggtaatgtttgaacagaaatttgactaatataactactatactaccacttcaatattcatgcggacagggtgtatatttatatgtatatttttaaataattatatatagatcgaatgcagccatgcatatatatatttacttcaagaaaagttatgtatagataaatatgtatatgtagctttcgtaataaaattgattgatatataaagttcaaaatgagttgcccctcaccactagattttatcaatatctaatctttggtagacaagtgatttaacatggatgatttgagagtttagacgatttgacttaacaaaatcttgaccagtgactaattatccctagctagctactgatgatatactaatatttaatctttaaggttgatcttgaccaccgttcttggacacattacaagtatggctgctgcatacaaatgcaatcgatcaacattattttacaataagacaaaaacctctatccatctctagggtagaaagttttttctcaatatatttatatttttaaattaatcagtaacagtaaccatacctgctcacaaaaaaaaatgtaccattactctttcaaattactacacttaaaaaatgtccaatctaaaataaacgtaatcaggcttaatgaattaaaataagtaaaatattgtaaatgtttactgttttataagccatactatgattatgattactcattcatgttaggtatatttggaattttcaacacgtaaattgtttgttataaaaattgttacgggtcctacattaattttaaataatgtgtataaatttaatacgatttatgaaattaaaagctatactatattcattatgaattaattttcaaatagaatttcatatttattataatatatatttatatatatttcgtgtctttttattttttttttaagaacttttttatttttatacttttaagcagtattttttttttactttcttataacaatctacatagaaacttatttagcaactaacggagcaaccctaattgcaactaaaatccaaacagcaactcacatagaaactatcgaagcaaccactgaagcaacccaaaccgtaaatttaaaaaataaacttaaaaaatatatataaagtaattcttttttttaaatcatatttccatgtttttgcttaatctcattaaaaaaaaatagaataattacaaaggattgtaaaaatgattgcgtgctaccagctgtactactgaagagttgtaattctacttttttggaagaaatccaagtgttgccccgatttttttttccaaaatacgtggcaactgctatgtatgacacgtggacaaaaaagacacctcactcggagattagttaaaagtcacatagaagagacaataagtgtgtggttaggggagttagctcccggacaagtacaaaaggcacaccttcttctctgggagttgagatgtagtaagacacctccaggacgagaagagcccattcaaacagttacctcgcatttaatgcagcatggggaaaatgtttggaaacgcctataagaggacatgtcagacatcgtaagccttgttcagggcgattacacgataatcaaagggggctagtgacggttccattatgaagaatcacatcaatcaaggaaggatgaagactaatctcacctaacttctgtgatgcctactatatagtgatgcatgccctatttagtatcttttgggaacttgtgcttatccataactagcactcaaagacaagttacccctttttagctattctcactaacctctataaatacccctgagaaaattgagaagggggatcggaaaaaggagagagaaaaacacctcaaaaacattctctgtaaaagaaatactctcattgataacagagactcgtggactgcgtctcattaatggctaaaccacgtaaaaatcaccgacattaactatccccaaagctcttatcattatctcatataattggttgcagaaaaaatcggtcaatattttggtactttcattgagaggtaggagcataaactgaaacattctggagctacaaagatagttattaaattgttagtgtttgaaaaacgacattcaagaatcaaagctacaatggtggaaacttagaacaacacacgccaaccttgtcccccccccccaggatactcgggacccagaagaggctgctttacaagtaaatgggggctctgaggaacgagccgagttaaacgacaaggaatacgaagagaatcttgaagggtacgatgcttatgacaaaggtagctacactgagttgctggtcctaaggcaaaaagcagatgatcacgaggccgaaccggtcgcccaaaaagaacagaatag

SEQ ID NO: 14861 - DNA, 8098 bp, Cannabis sativa
gttaccaccaagttgccccacaataaacttcagtaactaaatgtagattttctattatcaattgatccagcccagtttgcatctgtcagtacttttactttttggtcatcaattttcttgaaaaataaccctttgcttggtgtttgcttcaaatatctcaaaactcgatatacaacattgaggtgaccttggtgtgggtcatgcatatactgacttgctagacttatagcgaaagcaatgtctagtctagcgtgtgagagacaaatgagctttccaactaattggtggtatcttcttttctcaactggttctcctttgagcatttgatctttgtttccaagttcgattggagttttgctggcctcactaatctagcattccagtttcttttagaagatcaagagtatactcagaaatgcctttcttactcctaaaaatttccatgcccagaaaataacccaacattccaagatccttgatattcatatccctcaaacacactctggcctcttctaatatccttagaacattccatagcaaactacccactcactgatcgatacaaataggaggccatctttctcccaacctagaatcccatttatatttgttgtttctcaacgtacacagaaagttccgagatttatacttgcgttagttcttatcataccatttctcaactaaagatttgtctttttggcaggtagttactcatttaaattctgcagtttcacattcactcggcagcttagatttcattggttctatgcattcagaaagtattaagcaaaaatgtttagttgccaaatctgtaaatgaggacgcagttggtaaagaagcaccttcaatctgtagcagcattttgtttttggttgaggggatcctcaagattaagtctgtggatgtatttgttcaaaagaccaggataaattatgatgtggaaagttctaagaaaagctttaatgccttaagtagtggtacttttgctgatcttgatctgcctgattacggaattttaataactattcagcaaacaagtgttgatttatcttgtgaagaagagagattggaaattttaactggttttggggaaattcaatctctgatattcaaatatcagaaacagagagaatatactgatctatctgaatttagagatctattgctgcaatctcataattgcttatatgaaatatcagtgccaaattgtacattttctgtgtcattgtttctcttgcaaaatgcctcatcttctaggactatgcacagcaaactatcaggctctagttataaatcatatatggataagtcatcattcgttattgattcagaaaggtcaagcagtcaaaattcaaaccacatgaagaagttaagatttgcatcaaatattccagcaccggatccaagtcactggttatttgtaaatctggcactcggtattgtttatgtgggaagtttctcactgaaaaaagctttgtttaaagcacacgatttgaataagcttttgtcatcactttatgttgggggtgaagttcagacaatatcttgggggattcaggtgatatgtttactaacattacacacctatatgatatgtatattatatttttggttgctcataattgaccattggataacttcattttttttatttttatttttggctggggaggtgggagcagcagtgcgtagtgctgtatagatgataatggatttcaaattggagttatatgtgttgctattgtgcagggtggtactctgttccttgaaacaactgctttggagacattcattagttgtgctaccgcaaatctttatgctattgcaaaaataatgtctaatgttcagttagcatataaagggattggaaaagcacaatgcaatgtggatatgcccagagtggatgatgactatgttactgagaatgtcgaagggactcttcaaacacctttagaagctgaagggaaccaaatgcaagggttaactgtaaatgtctctcgactttctactattgttgtaatcaaagatgagaaaggtgtgttgatgtagatacctattagataattagtattttattaatatggatttgttagaaatattacttgattttatattatttggcccaattagagattttttatcttttcagttcttactataagtttcctagctgatttaggattatttgctagataagcatcaattattagttggattgtttatggttttcatgaaatctatctcattttctattttattttagctaaattgttatctttttatttactgctccatcttctttgtttttgatttacatgccatgttcttcccctccaactatactcatgtgctgcaccgctaggtctacattgtatttgaatcgtttgttacatgttgcaggtggtgttcgagaacttgttcttgaatttgatgtccatctaaaatttgaattgacaaatatggaaagaaaattcatgtttgaccttaagtcatcaatcctttctcaagtcctccggcaaagtggtgaaaatgaatttcataaacctaaaatttattcggagactttcaatagaacgtctactcactttgaatatggagattctgcttcagaacttcagcgtagggatttgatgcatcaacttaatgatccgagttgctcaagaaattctgattcaccagaggaactttctgctgagaattttgtacccaaggactccaattcaagttctcagaaatatatcttgaaacaattaggtgctttcttttcggttcaaaagcctgtgaatggtgctatttgctcacatcagtcatgggtaggccgtggttctatttcagattttaatatcatcatctctctgtcagaaatagaggtgagcttttgatataaaaattagtcaacacaaaacttttcctactgctgattatgcttgtgtaatgtaataaaaggatgttctcatgtaattacttctggtttactacataatggcaagtgttagcagtctaacatatttttatacatcagatgattttaaatattgtttcatccttctctggagtattcagcaagactaccaccagtgacttcaataaaaagcaaaggtccattaaccacgaggacgaattggacaatatagaagcaatgattcctgaaggtatttttatttttattgtgatttttttaataaaattttattctccagatttcttttgggtaaattttggagacttgagttatcaattactctgtctatgtaggatcaattgttgctattcaagatgtccaccaacatatgtactttgcagttgagggtgaagagaataagtataacttagttggcacacctcattattctttagttggagaaagagctcttttcagggtatggattgtattttttttttccatataaactggcaggtagaattttgaattatttgatatagattagcataagtattcctataaataaaaaatagaacacaactaccagagctatacagttgttacaacctaattctcacttgattatttgactaattcttgtaatagaaatcaaaatatgtacagcatacacagctagttttttacaaattttggtcattatttgatagattcacaaatataatcttgattattataccaagatttctagcaccccgctcaagctggtttgaaaatatctttgataaccagctttgatacagcctttcaaacaacttctgtaggcctttagtagaattttatggcatacgagttaattcattatttaccagtttctccttgatgaagacatgcaacaattattatttacaatgatttaattacttttagccactaatactcacatgttaaaatatatatatatatatataaaatacaaattcaagatattgtatataagttagaacattaagagtaattgaatgatagagaaaacatacctaattgatccattgatatatacttatttggatgtacaacactaacctactaatacttcctcctttgatctctattctgaagcagattatcatagtatacaattgtgatgagatacgtattagagttagggaggagacctatttagaaaactttacttagatatatactttaataatctgcttcaggaaaaagatctaggggggaaagcttattaggttagtgttatacaaccaatcgacattatctcaatgtattagttagatatgttatctctattgttcaattacttagtgttctatatcataggcaatagtttgaatatgtattctctgtagtatcacggtgaggccacatcctcctttttaattatgtggttaaaattaactacaagttgtgtgcacaaaaaaagaagtatacaagttttttaggccgagcatcactccaaaataatatacaacatacatatcaaatatttcccaaattttggtccttatttaatcttattcaccaagataattgcatttgtatttgacaattcaccaagatatcttggttattatgcatatgtatatttattcgcactacttgtgactggggtcatttgcttatttgatgaatttattgtatgatgaaatgtacctaaattaaagatatgctatttgtttttcatgttattggttattttttttttttgcataggtcaagtactactatcaaaggagatggggatcatcaattttgtggttctcctttctatcactacatgcaaacaatgattcaggagaaccattccgattgaactatcgtcaagggtcaggttttgttgatatctctggcatcgatgatagtgggggtgcactttggaaaatacttccttgtgagcctcaaaattatgatagtgatattgattgggacccttacaatcagttggttaaaaggacttcttacttagtgaacaagaagaatgattgtgccatagcatttgttgatggtgttccagagttcgttaggaagcctggaagtccttttaagttcaaagttctcctggaaccttctgcagctcaagatgtaggaaagattgatagccatcttctggaggattctagaactagtcttcaagataatgcatctaagttcaaagggacaacttccggtcataaaataaagcttccttccattaaaatagaattgattaacaaaatatctttaaccatcatccataaactttctgatagaagtggtgtgtttcctctcctacgtgcttccattgacactaccaagcttattgtacaagttacatctaccaagaccagggttataaccacactaatcccagcaatatatcactttgactcccaaagaaacttatggtgagtacttggactatacatattactaactacttctatttgtctttcatttaatcaaaatttactttccatttgatcaaattcgaataacttttcttatcttattttgagttgtaggaaagaaattctccatccagttgaaatattcctattctaccgttctagcttccaccccgagggttcagaagtaaatttgtgtggggtacctgttcatatgcattgcagaacaaaggaggtcagcaatttaaacaatgataatttaaattccatggtcatttgagggctgttgaccactttgactatttttaacaattttggtgtggagtattgcagttgaacatatccctttccgaactttcattggatgtactcctttttgtggttgggaagttaaatttagctggtccttatttgttgaaaagctccaggattctggccaacggttgcatggtttgttattctgttcttccttaaacaccaaatatatctaactgaattttcacatacatatacattctaagcatgttttccttccgggcatgtgtcctacagggaatgagtcattgttggagtggataccaacagttgaccttagtatatttgatcatgcacttttttcacttaacaaagcatattttgtcatttgaattgaatagaacacatgttggtattcttgaaagtaggttcaatgatgaccgaatggtattattgaattggaatcgtaatgtgatgtttgtgtgcatgaggatgagatgtggtcttgttctttctgttttcaataaaagatcaagaattcacgttgattcaatcatttgatcttttaaacttcctcctgacccatgatttgtgatgacacaggcatttgatggtattcagaaagttgatatgtttttttatacaatatgacattgagtgcattaaattactggtctgtttattcgtatatgtgtgtatatatatatttattgaatttccataattccatgtatggcattattatgataattctatattggtaggtaaagaacgaatcaggcataacccttctttgtcactttctcaatgagcggagtttgaaaatagccagaaatcaatccacttccgtatttttaaggtagttctttaaaaaaaaaatgaaaaaacgcttcatacttttattgggtttcagatccttcgcgtcaccctataatcacttttaaaagtgcctcacattcttttgttatgtacaaattataaagtaaacacatgattgagttaatcagctggttgatctttattcttacacagaaggtatgaagacttggagaatccatcccaagaggtagcatctatgtcaattcaacttgctgctttaggatctttcatgacttcctcagttccagtctctcttttgcaaagtcaaaagttcgcttggagaacaagtatagtctcctctcaaggtatatcctgaatctatttcccttaccagaaaaaagataaaaaaaaaactctttaatgtatccagccacacacacatggatgttgtctacacataaatatacttgtcaaaataagataaattttgtcttcccagttttgattaactgaagatgatatgaaaagaatcttggtgctgatgaatattgtaggaagtgaaatttgatggtgccaaggttgaaactttaagaatgtaatctgagagtgtcccccaaaagaaaatcaagtatctctaatttgtctaacgattctcaagaaaactcaacacccttaaatttaagaaaaatttccataatagactaaaaatttaaaaaaaattacaaaaatactttaacacgaattttttttcattcttatttacaaaaatacctctttagtataaataataaaccgttttttagttgttttatagtttatttataatcgtattatagttgtcatgaggttgtttttgaggttatttttggctgttttatagtttatttataattgatatatagttgttgtgaggttgatttctcgtttttttttttttttttttactttttgttgagcaaagcgtatttttataattttaaaactctacaagcgtatttatgtaataaaaaattttagcctgtaaaattgtaaataaaacataaaagaagagtaaaaattcccctaaatttaacattcacataactgttaaaaaaatgcatgcgttcatgtactcaacaccctctatataattttgcatctacaagaattcatctcattggtttagtttcactagagaggaatcttaactctgaggttcctatattgaagaagctctagagtctcgtgaatgtaaggtcgtagttcttgaggaaatgaaagtactaaggaggaatgagtagggggatgttgtcgaccaactaaaaggaaaaatgtcggttgttattaggatgttttctatagtaacaattgaaatgggataagtcaagactttagctataggctgcagtcaaaccttcaaagtttattacatcgagctattattcctgtggcaaaaacaaaacaccatgagttatattatgtactgatttttcataaattaagggtaagtccagataaaacacaaatcactagccgaaagaatctgaagaaaaaaaacttggaactctacctttcagtccaaacccacgagggtgtacatttgtgttatttgctacattaagaatttcaatttatagttagggatcccttattgttacgactattcttttttctttgttgttgttgttgctgttgtcaaattgtatgaccattcaaaatcaaataagttgga

SEQ ID NO: 14862 - DNA, 3544 bp, Cannabis sativa
gaaaacagccattgtgatcaaatcagctgatttttcatgggaagagaatttaccaaagccaactttaagaaacataaatttagaggttagtcatggtgaaaaggttgctatatgtggagaggttggttcaggcaaatcaactcttttggcagctattcttggtgaagttccaaacactaaaggcaatgtaagttttctgtcttcaccattgaaacatatgcttcatccaacttaatcaatttctctaatccacatctcatatttacagattcaagtttatgggaagattgcttatgtttctcaaacagcatggatccaaacaggcacaatacaagacaatattctgtttggctcttctatggacagtcaaagataccgcgaaacacttgagagatgttcactaattaaggacttggaattacttccttatggtgatctaactgaaattggtgagaggggagtaaatcttagtggtggccagaaacaaagaatccaactcgctcgcgctctttatcagaatgccgaaatatatctcttagatgatccattcagtgctgttgatgcacatactgcttcaagcttgtttaatgtaatcacatacttctcaacacttccattttcattttgcttaaagttgaatgaatatctttctttgttgtttgtaggaatatgtcatggaagctctttcagacaagatagtcttacttgtgactcaccaagttgatttccttcctggatttgattctgtattggttagtctaattctagttccaataacattacttataattattgacattaaactcaggtcatttcttgtttttttctctctttgacagttaatgtctgatggagaaattttacaatcagctccttacaatgagttattatcaacaagccaagagtttcaagaccttgtaaatgcacacaaagagactgctggttctgaaaggctgtcacaagtaacaccttcagagaaacatttaacatcagtgaaggagattaaaaagagcttcacagagaaacaatacaaaacatctaatggagatcagttgattaagcttgaagaaagagaaacaggtgacacaggattcaagccttacaagcaatatctgagtcagaacaaaggatacatctacttctcactcgggtttgctggtcactttgttttcgtgatttgtcagatcttgcagaactcttggatggctgctaatgttgataatccaagaatcagcacgttgaagttaattacagtctacttgatcataggaattttctcaacatttattttgctattaagatcacttacaacagttatgctgggagttgaatcatcgaaatctcttttttcgcaactgctaaattccctttttcgatcaccaatgtccttttatgactccacacctttgggaaggattcttagtcgggtatgcatcgaaaacagcaactaatgtttcatatctaatacctttattttttctttcttttcatgaaactaatacttctatgatcttttgcttctattaataggtttcagctgacttaagtatagtcgatttagatgtcccatttagcttaatctttgctgttggggccaccatgaatgcagttgctaatcttggagtattagctgctatcacatggcaagtcttgtttgtctcattaccaaccgtttatcttacttatcgattacaggtaataaccatttaaactagaccattcaacatgttattatgcttgattttaacaagtgaactactcttaatgagcagagctattacttttccactgctaaagaattaatgcgaatcaatggtacaaccaagtccttggtagcaaaccacattgctgagtctgtggcaggatccataacaattagagcctttgaagaagaagaacgattcttttcgaagaacttacaactcgttgacataaatgctagcccattttttcacagttttgcagctaatgaatggttgattcaacgattagaaacactcagtgctactgttcttgcttctgcagcattatgcatggtccttcttccccctgatacttttagctcgggttagtactcaactactatgtttcaatctttttcccctttcacccactttagcaatcatttagttacaaacaaaatttcttgtgtcactgcagggtttattgggatggcactctcttatggcctctcactgaacatgtctcttgtattttctattcaaaaccaatgcactacagcaaattacatcatctcagtggagaggctaaaccagtacatgtacatacctagtgaagcacccgaagtgatcgaagaaaatcgtcccccagctaattggcctcatgttggtaaagtagagatacatgatttgcaggtataaataacatttcattaatgttatataaaaagtgctatcttttgcctataattatgacattgttgtgaaacaaaacagatcagatatagagccaactccccgcttgttcttcgcggtatcagttgcacatttgaaggaggacacaagattggcatagttggcagaacaggcagtggaaaaaccactttgattggtgccttatttcggctagtagagcctacaagagggaagattatagttgatggtattgacatctcaacaattggactacatgatttgagatcacgctttggtataatacctcaagatcctactctattcaatggaactgttagatacaatttggaccccttatcgcaacattctgaccccgaaatatgggaggtaatagttaaagtttgtggttttttgtctttgaaaatgtctttcttggccacttactttggtgttaataataagactgtgtttgttactgaatttcaaggttcttgggaagtgtcagcttagagaagctgttcaagagaaagaagatggtttggactctttaggtaatgacattgttttcatgcatataacttaaaattatttgcagtataaatacctaagtttagctcacagttgcaaacaaatatttaagtttaatttttcacggtaataatatctatatttctagaatttctgtaggtaccttacgtggtaatccctcattggttcacgttattaaaattttattttttaaaaatattattttaaatataccaataaaaaaatgacacgtggataataatttaatatttaactgtcaggtacttatggagttctaaaaatataagttaggtattattatcaccaaaaattaaacttagatatttatctgcaactgggagttacacttaagtatttatgtcgtaaattactcttttttttaacatttttaaggatttttttccttttttgtactgaatttgtttctttttttacaagtaatgagtgttgttgttgttggtatgctgttcagttatggatgaagggtcaaattggagtatgggacaaagacaactgttctgtttagggagagctttactgaggagaagtagagtattggttcttgatgaagcaactgcttccatagacaatgcaactgatatgattctacagaaaacaat

SEQ ID NO: 14863 - DNA, 9322 bp, Cannabis sativa
tatgaatgcacaacaatcttaccataaaaggaaaaattattttgtcaactaacttgtcaaaaaaggactttacatgaaatgtgtacaataagattatcaagatattagaatccacaaaatgcaagttcaatagtatttatagtgaatgcaagatgagagtaataactattacccattgagattggcgagacaataagtccatctcgggacaaatagagtatataataaaagttgttcaagacaagggaaccaagaacttatagctcattgacccacatacttgagaataagagcttgcaactaattgatccacatatttgtacgtggagagaataactatattcattcatctagctctttatatattgaagtagccaccttgctaataccatcattataaaagaagactgtgaggagcgtttgtatctatacttagtatttttcctacaaagacagtaaagaaggaccactcacacttaacgaagaacaaccagcatagtcagcataatagctcaaggataatgacaaaagggcggtttggtgattattaaatatattccctgtgcatgaaaatgaaacgcagggaatgttcacgtttcatgaacagttacaaatgattgaatccaaggaaataactgtcaccttatacacctataaataaggacagaatccggagtgaaaaggatggccaatatgagagagaaaaagtaagaaattattattgattagattattgtattatgtattctaattattattcctaataatatggactcgtggagtatgtaaattttaattacaaaaccacgtaaaaaaatctcgtgttcatttattattataattaattatgtggtgcatttattacaaaaaatggctaatatatttgattaacgaaaatctatgataacaattagtataaacatgattcatttaaacctcaaaactctacattaatgaatatgtaatcttattgaagttacatcactattcataaatttctacaagattagtaaaaattttcaaaatttattctcataatttcatttaagactgtacataattttttaagaaaaataaatcactccattcaaaaaataaaataaataaataaataaatcacacttcattaacacaaataaatttttaatttattttgtatgacttcattctaatatagttaatgtgattattaatacatattggattattttaaattattattccacattcataatttcttgcaagatttacaaataaagttaggaagctagttgatatgagtaaatcttatccacaaacaaaatgagttcccatatttggaaaatttatggaacaagcattatcgtaatgattttgttttaaaattatcaaagactttatactccaagtttccttaaaatatttagagacatatttaaaggactttactacattaatttataaatgatgtcgttcataaagatatgcatgttcaatctgacaataataaatgtgttattaataaaaattcatcttcattataacaccacacattatatacatcttatttccataaatagaataaattctagtaatggtggggcactcattactctagatttactaaatttatttaaaacctgttcggacttaagaaaaacagtctaacaagtcaaaaaggtgcacatggaaattttatcatattagaaatcatacaagtatacaacccaattaatatttatagacatggattcatatttacaaaaatttctttatcttctttattaatgattactcacgttaaatgtagccctacaaaagtgatgttatatgtattttaagacacatgaagagaaataatgtattttgcatattaagatagtgagatcaaatattgatagagaatactacattaaattttgtgaggatggataaactcccaatccatttacaaagtttcttaaaaattatgggattgttgcccaatacattatgactagtacactaaaataatggtgtgtgatagtactaagaaactaagtattattagacctagggtggagtctgcatagtaaatttcaaacttttctaaatctttgtcgattgacactcttcaacagtagtgtacatatcgaatcgtgttctaactaaagttgtttctcaaacatattttgagttgtgttaaggttggaaactaactttatgacatgcacacaattagaaatacccgtatacagttagagtataattgttaaaaaaaaatagaattggggctaagtaccataaatgagcatttcatcataaatgctataaggtctaaaagttgtatattttattattaatcccacaatactagaattataaaattaagaattgacttgaacagtgggaatgattgattcaagaacatatttttgagaaagatcattcttatttttaaacttccacctcaagtatgaaattgattgagattcataaccattaagtttaatagttacttgagaattcacatttaatcattgaaaattcacaagtcaatgataacattctaatagatcaagttatttagtagttgtttacgaattgctaagcaacatacatgttgaaccattttctcattaagagagtttgttggttcacttaagatgacttattagaacgaatcaatagtttctagtgattgcaatatgtacaataaaagtgcaactacaatattattttgagatacaaattaaatgtggaatgaaaagaattgaaattgtaatacaatatgtcatgaatgaagaaacgaataccataaaggacagtgaagtctatctttcgtaaagtttcctaatgaggtggagaacattaagtaaaggttttttaccaataaatactcattaggcaacatgtaaaaatatgaaggtataaaactcattgctaagaagtttattttgaggaaagaatcaataacaaatgagatttacattctcacttatctttgttgctcatttcaattcattaattaattccaatcaatgaactagagaagaaatgtatactgacaattataaagatttttctctaatattggtgaacatatgtaaacttaagaagtctatgtatagattaaaacaaacatctcacaaattatatttttattatgtcatctttttctttaggtttgaaaagataattataaaattaattatatacttgaaagtcagtgggagtaatatttattttatatatagataatatgttacttgcaagtgatgataatttttttttatataaggtgaaataatacacatcttaaattattattttgacataaagaatataaatgatatgtataatttaattaattagaaaataagcatatctctaattaaataaaattacgtattattcatcttatgttacttttatctttaaatatgataaatttagttcaaaccagcgtctgcaaaatgatctggattgagaataaattaaaaacatacatttgatttgaattttagatgcctaatgtatgtttaagagcctatataagacaacattacatttgtttcaagaatgttatgtagtatcaaaataacttaagtttagaacactttataatttcatacaaagagatgaagtatctttattgagatacattaaacattatattcatgtatactttattaagatgaattgaaattttaaaaatatagctaaccaattacgttacaacttcgctggttatattgattcacataaatcatcactttgattacgtccttacgattaccagtaatttatatcctgaaaattcttgattgttatttccatttttagaagtcagattcatttcatgttttgaggatacatcccgtatctattattgaatttcatattaggtgttatagttaatgattctatatccaagccactaagaaacttttacgacaaattcagctacagtttttatggctaagaactatcatagttttgggccgaagctagtatatcgacattgagtatttagccatagtgaagtataagtagtaattaagcacacaaaattgaattgagtgatcactatatccttaattaaaggcatgttgtaacataaattcaaggattgtaaagtaaatatgggattaagttacccctatgcatttttcagttgtacaattaaattattcaatgaaactctaatttcaacatatcctgatattcaggcaccttaatttcatttgagaaaattatgctcagaggaccagaataaacataagatttagggtttattcgcttagatatattgctacattaagtacatttttatgtattaaatatatcataatatatggaagataatactagccatataatgaggacctattaccatgatttatatgtttgttatttaaaaaggataatcattaagtttaagtgtaaattaatttaaatgctaacacagtgggagaatgttagaataattttatatatatggtaacaaattaaatatttaatttgatttgatttaaaaaatatgaatgattatttaataattaattaaaatattttatttatgtttagatttgattatcaaatattttagttactcgatttaatttcttgaattaattatcaaaatattctaacaattaattgtggtataaatattgtttctcaactataaagataaggtatcggtcctcaatttcactactcattatgtgaaaactataaattctatctaagagagtagagagagcttggaagctcgattatccactctaactatttttttattttttttttgtaaatttgaagctcgtatggaattgaagttcagaaaaatcaatggttggaagtattacattttctttcatcgtttacatatacgctcgatatctctatattattccgctttataaatttattgtatatattttattttatattttattttttatataataatgtaacaattaaaactatatattgggattttagcaatagataagttatggaaatgcaaatatattctattagatctcatgtcattgtgtaaacttctttctatattttaagttagtgaatgaggtcaaacacaattgttctttaaaagacaaataattgagctaaagaatgggggtatgaaatatgaagatgaggttagacccacttattgggacataaaggggagttccttaagcttgacacatggaaaagcaatattttacttgtcggtatagtgggaaacgtggctggaaaaagtggtatttgtgtctaagggtgtgaattttaataatatacatttttaataatcactgaattcactttttttttttattgaggataattttatgtttagtaatatttttagttttatataattattagtataattatgtattgagtcatttataatttgataataatttttaaaaaatattactaatcaattataaagtattacctctaaataatattaaatactatccaatctgtttttttattatacatttggtaataatgagcacatttttgttgtacagttttttatcgagaaagacaattattgttggggggatttgtggggttttggttttgccaatatgaagaatgacacatattttggccaattgtttgaagagaggacaaaactagtgggattgtttgtgtttggacatatattaaaaaatgaatcaattcttataagaataccttatctaaattgcatatgatttgtttaacaattatttaactccctctctatactctctttctctctttctcacatatggcttcatttgatcataaagtctctttccatggattatggacacaaaaatagcataaacttgttttgtggtactttaccttttctagaatatcataatcttgattgtgtgatgagataataggcatttaggggtcatccctttgtttatattaagtttttatttttcatttttggaggcctactgcttcttaattgtcccctaaagcttaagccctccatcatcattatccatttctcaacttcaattattagcccataactcaaatatgaaaatggtattctgaaagtcacaagggcctattagactccaccaacttttataatcaaaataacaatggaattagtcaaatatcagtgaccattgattaattaaatagcttgctccagcccttgttaaatgctcaagttgaaaccatttactttcaagcacataatttatagataaatttgaggagaatcatttgcagaaaaaccccaaatttctaattgcaaagaatttgaaaaatatgatacttataagacatcaacaggtatatatattttaagaccatttcctggagatggagatgcaaataagtggtgtaaaattaaaatatagtgcatttacaaaaaatgtgctctaatggtgtgccaaaaaataatgtaaatttggcacatagtaaattttgtaccaaatttggcacatagcaaattttatgtcaaatttggcacactatttgctatgatgtaaaatttacactacaataaatgactattttttttatttatattaatgccatttgtattattttattaatataattaactatagcattaaattatcaagcgtttatattattgttttacatcttacatattaaaataataattaaattgataataaagttattagttttatttcttttaacaaaaatattaattagatattaaatttgacattaaagttttgtaattgtgcattggagtacaatgctaaaattagatataaatttactacaaaactactttttgtactaaatatagcacaattttttcatctcccattgaaaatgttctaagttgtgtcctaaaatttggtattactcataaatcataaaaaggatgacacatggaattttcaaagccagtcataatggtatttgtagataacaatagactgactaataaattagctatcctcagttactttgttagttatcattaatatgcatattagttaacatcataaacctagttttgtattcatatgctgcaaaactaccaaggtacgtgccactgagtattttaaataatatctattggttgtgatcaatgtcactcttttcttaatgtcccaacaagttcacctaattcttgagttacttattaatcattctcaaactaataatgaagattctgagtaccatatgtatattcttaagaggaataacaaattttattttaactttctttgggtcaaagcatgagtgagtgaaacataattttattttaattttacatatccaaactggttgtctaacaataaactaggcccaagttggcccatatatagatggtgtcaagaatggacttaaattggagtattttgagacccaatgattagggaacttaacaaagggttatttataaaaatatgagaaaaagtagataagttttgatatatgtggtataaaaacttaattataaatatggtatttttttttttttaaaaaaaaaaactttaaaatatgagaaaaaattattttatatagagagaaatgctataaaaaatttaaatctgtgttttttttttcttttttttttaaaaaaaaaataatgaaacacaaaaataaaagtagatactttttttttattatagaaattaaagttaattttttttaactactgtttgtttttatttttttgttagaaactaattatttcattaaaagcagcagaaaaaaaaatcaatttcatcaacatcattctgaaagaaaaaaaactaacttaaatgatatagattttaaaaattaatttcatcaacattaaaaaaaactaataatttcattaaaagaataaaaaataataatttcatcaacaagataatgaaaaaaaaattataatctaaaaatgatactaactttaaaaatcaatttcaccaagaaactaatttcattaaaagaggcaaaataaaaacaatttcatcaacataatgaaaaatacacaatgcctaataaccaaacttttataaacgatactaaatttaaaaatcagtttcgaacatatgaatcttatatcaatacctaatgaccaaacttctaacttcattctctattttatcatttaattttttatttgcttgctcaaaaactaaagttgatttaagcatacaatttgcagcgaataaaataaagagaatcagaaactaaaatcaaaatgaaaaacagaaacaaagaaaattaaagagacaaaaatacaataaaaactataaatattttatataatattagctcttgagtattcttgataagtaaaatggttaaaaagttaaatatatttaatgttaattctatatttattattcaaaagttaaaaattataaatttatatttacaagtattaccgacagattaattcgctgctaataatagtgcgagtttaaattattagcggcgactgtgtcagtctgccactaataatagttattggcgaccaagtattactagcggattattaccgacggaccctgccggtattactttttagcgacaaaattagatattattactagcggagtggtccacctctaatgaccataattgttgtagtgaatagtgtaaaaatggtggagataggagggtttacagtggtggttacgagggtttaggtaatttctgggctggtgtggctgctgtgtgtatcgtggtgaagaagaagacgaagtgagattgcatgttgaaagggttagacatatacctctatggtgttggttatttgaaattagctgacgccatagtgtaaaaaattacaagtgtcaggtatatatatgacgtcgattaatttcaaataaccgacgccattgagggaatttctcactcttcacactcctgatactaaaactgcctctaaatgtaccacataaattatatacctatagtttttattaaaaattacctctaattaaatatcaattttaaactagacgggtatttttacaccctttagcttccattttcatgaaaagtgatgaaaaaacagcttttaaagtcttatattgtagtagtgtatcaagttcagggtccatttacaagtgattatttcactcccgttatatagatttttttctaggatatttaatatcccttaaccataggtgcaccttcccgtaactatagtcgggttaggtttaaaatacacaataataataaaataatcattcaaagaataaatatctctttacttattatttttgactatattttcggaatattttaagagcatgtgcctttcgtatttagcggacctggatcatcatgggcacacgaggggagccaaaagggtgttggaacttattttaccagg

SEQ ID NO: 14864 - DNA, 3757 bp, Cannabis sativa
tcacttgtggtttggatggttttgttgatgtcaaactcatttgtagcatgttttagtgctttagtaccaaatttcatcatgggaaactcattcattgcaggcttaatgggatctttctttctgttttcggggtactttatatcaaaagataggttgcctaactattggattttcatgcactatttgagtcttttcaagtacccttttgagtgtttcttgataaatgagtatggaaatgagagaaggagtaatgaaaggtgtttagattttgatgatggaaaaagttgcagtctttatggagatggattcttgagacaacaaggtttgaatgagtctcaaaaatggagtaatctagctgtgatgttgggtttcattgttggctatagagttctttgttttttgattttgtggtatagatgctatagaactagaaactagtaactagttactactattactacttatctaaatatgtataatctttcttttgtattattcatttttccacatgtaaaatgataattttatcatatacaatataataataataataataaattttcatttgagatgataataagttaaccaatgcttcattgatttatatttgacatctccaattactatgagtaatagagaaataaacttaggacttcatacttggctgaaaagctgcaacttcaagcaacctatctaggtatagcttttaggaatctatcatacacatcaaccgaaaaaaatacgattatctcgataagatattcctttcgctctttctctatggtgtttacagaatcaagctctttcggggttatgattcctgaataggttaatctttcgaactactactgaattcataagcaggcaagagacaacttaacaacgaattataaatatatatatataatttgatttattttatttttattttatatcaatataacatcaaaagaaaatttaagtaaatggaatagaaatgatatcgatattttcttcataaaagaaatgatatcaaggaacacaacaggaaaataaatcatagtatatatataggtgagttttacactgtacaactgtaaatgaacatttgaagaaagaaagaacaaaaaataaatagaaaacctcaaaagaccatttagccttagaggtaaagaaaattcttcttataaaagaatttacacaaaatatagatcaaaatatgttaaaagtataaaggaattgtttggttagcattttagtagaaagaggacttttctttttgcccaattttgatagtaaaaaactttcattcattagtgaaatgaacgaaaaaaaggtagagacttttaaaacaaggcagactgacgaccttaattgcttcggtcaagtatagaagtaaaagtcattgtagcaactgaagaagaacctgagtttgtagttcctatggaagacatgtcttttgagttgatgactttattcttttgacctttcatgtccatgaactcggatagcaacccgggtttagatatttcctttttgttcacttcaagttgcccggttagcatttcaacaacggtagacattagtggccggagttttggcatgtcttgagtgcataaaagagcaatctttagaaatttcttagcttcctcgagctcaagatcatcgttcaacgacgagtctaccaactcctcgagctccccgctctcgtacaatctccatgcctacaattgaaagatacatttttaacaacattatgtagtaactaaatggattaacaaaatttcgattgaaagatggtacgtccattttgggaatttttggaactagtattcaattagttcggacttgtttaatgttgaactgggatcaagacataccctttcgagaagatactgttctttggctggtaaccgcttgttcgtgttggatctcccactaacaatttcgagtagcaaaacaccgaaactgtatatgtctgctttccttgtaacctgacctcttatggcatattcgggtgctaagtaacctctacacacacaattcaaattgctaattaattggttttgaacattaagataaaaccttcagtttcaaaccaactacaagctaaatcatactacaccatgtaaccctcattcgaaaattgcttacataatcggttaaaatgtaccgaacccatgaccaaagatcgaaaaggaaaccccgatcgataattatcaactcctgcttgaaaaataaaagtatcacaccatgcaactgaaattatgtctttgcaacttaaaagggtctaaagaagaacaaactaagggtctgtttggtataccgtgttgtgttgtactgtattatttaatacaatactatctttaccataaagccaaccctaactggtatattttccaggattcaatccctactaaagttaatgtagagctgaaattcgagaacttacactgttccggccacacgagtactaatatgagtgagatttgctgggatgagctttgcaaggccaaagtctgatatctttgccctaagacccttgtcaagtaggacattgctagctttgatgtctctgtgaattatatgcggttggacctcctcgtgtaggaaagctagcccccgtgccacgtcaatgcaaattctacgccgtgtttgccaatcaaattgaatgctgcttctacttccacctgaaaaaaaaaaatgtagtgtggaaagaatccattacttcaaatccttgaaagtaaaagaattgatcaaagtaagaatgtagtacagtaagttacctataagtgtttgttcaaggctgttattttcgagatatccatagactaaaattctttgattttcctcaacacaacaaccatgtagcttaacaaggttttcgtgttctatattcgcgatcacattgatttctgtcaaaaattccttcacaccttggcttgattcggctgacaatacctttaaagctgccatggtcccgtccttcaatcttgcctattgtttttttttcccgaataatgaacatatcatgaaaataaataaagattgtacaaaaaagatggagcaaatctatctaaacaagttcctaatccaccttgaatgtttcaggaaaactcgatagcaaacttgaaatatcaaataatggacaagtatttcaaggaaagagagaaaaaataaatcatgagaaatgatgcattgggcaatccaagtgttatgacaacatgttgtgattttgttttgtttataccttgtagacagaaccgaaaccgccctgaccaattttattcccggaactgaaattttcagttgccattcgcaattccttgtaactgtacaatctaacattgtggaggcttgacaaaactgcataacacaaatcttgagttaacattttgtaaaccattctggtaccatttcatataacaatattagttctaacctttcatttgttaccctacattttacaaaacagtaaaaaagagtaccttaaactcgaatttgaccatatacattttcaatattcattcctctttagcttacattcgcaatgttaagatgacccacgatttattccccaagcacgttagtttaatcaaattctgagtctaagattcttgtcctttttactgattttataaaacacatggtaccaaataagtattaccgataacttaacatatcccagttccccaaccctgcattgagtatgaatattcattcctaactacccgacaaagaacccccgaactcacccccattaaggaaagtaccctta

SEQ ID NO: 14865 - DNA, 3151 bp, Cannabis sativa
gtgttggcttgcagggctagttatcattctcgaaagtagccaaagtgacatacccatgtataagagccacaagtctgtagaaagatgccaatggaggcttgaagaagaaatgttacataaaggtgtttggtttgctagtcaatggggcttgagaactgaggttttataattcatcaaccctttatctttattgaactggattttaaatcctgatattcaacttggaatcccctctacccttaaatttcagttcaatatatttgctacttgtctttactatgagatgtggatagcaagaaaaaaaaaaaagcttttcatgagggtgttattcttacattggttggtgttaagactttggttcaaagttttgtgacacaaattcttcaaaccttggctacgaacatcagaaactcttatgtggactccaaatcaaaagtcttgttccacgaatactccactgataaaatttctatttttgtggatgttacttgtagagtttgtgggcggctggtgctatcattgctaaaaaccatgctagggtggtgttggaagcattaacagttaggtatgatatttcctcccctttccaagtcgagacagagaccatagtgcctctccatgcagtttctctttgttttttacgtggatggcattgcctggtgcttcactcagattgtaaggtgttgattgatggcatctcctttaagagagctcatatttggcaagataaatattgatttattcatctcttagagcaactagacactttggctgatgcaaaaattgtgtggatttgtaagaaccaaaacaatcatactcatgctcttgcagtttgggttgcctcatttgcatatcatttctacttaaaactttttctctagcgtggttttgtgctcttttaatgaaatttgtaattaagcaaaaacaaagattaaaaaataagagcatgtttggtattgttttctattttttatttttaaaaaaatgctttcagaatgagaataaaaaatagtttttgaattttcaaaacacaagtcgtgtttggttaatggtttctaaaaacaattttttatgtttatttattttttgaaaaatactaatacattgagacctaatatgaacaagacccgaccaggacacggaccctgacttagactcggacccgacctcggacctcagccccagccccgtctctggacttgaattttaaccccagcctcggactcagacccggaccttgataaaagagaaagtgaagagagagaaaataatatgagaaatgatgtgagataaaatgaagaaaaaatattgacaaaaagtgaattgtttttaaaacaaaaaataacattttgttgttataaaaattcttgttttttgcaagttattttattagagctatttttaaataataaggccgaacacacctaattgtttttttaaaaaactattttttatttttaaaaacagaaaaaagtattttagctatgatgcaaaatatgcactaattttagtaacgatttcctaaaataataataatgctaaaaatgaatcaaaattctttctactagacaaaagcaaataaagaaatgagaattttttatcccaataactctaataaagtttttaccttttctaaaataattgaaataaagcgttaacttagacctcgtggtcattattacaaaaaaggttcacatgtatggaagaaacatctacgcaaccatattgattgtgggtaaaagtccacttagccatattatgagctataaagttacaagttcttacaatactaaaaaataaacaccccacaaaaaggaagtagttattttacaataactagaatagttctcaatctcccatctagagtctactccattgagagagtttattatcaccttagagttacttttcacaattacaaacttgcatcccttttcagctatcgtctccgaagccaaaacacatgttgcggccaagccacaaagagctttagaaaagtctaatctcgttgttgtcattcaaaccatcgcaccaaaatgatctcgagcaacaacggtaatacacatgttctccatctccactctaacatcacagttaagcttaatctgatcatgagaaggaggacaccattcattcgaaggaatcaaagtaggagtaggaatgagagaaactcagtaatatgtataacagtaataaatagagtcaatatagtatttcatgttacccaaattattattatgtaccttattattttgagcccgccaaatagtgttcacaacaatagatgcataaagaaaaactctatttatgcctttgtcttttaagctccagctgaacttgacccagtcctcgaatgcatgtttctatgatggggaaaataccccacgtgatgacctctacaggtgatacgccaaattgcactggaggaataagtgctctattgattcttcctcagtcccacaaatagggcataaggggtcatcaatgtggaatcccttgtccagaatagaacgaattggaagctcgttggagaggatactccaccaaatgatcttgcgacactcaagaattttgttgttccagagacttgtctcattacaattgtatactttttgataatcagataaataaattgcttctgatttagagatctagggaggaagacttagttgatagtattacactatcaaattgtgataactgttatggttcaatcaggtacgcatacctaattattatatatactattattgtgttttatattatatataaattgatcttgagtttattattactttttctaagaggcctaccattagattttgtatagaattttttttcatgagtcactcaatcatcatcccaaatatatatataaatatatatatatgtatagtagtcgttacatttgttactgacattatttttttattgtaaaaatacttaaattgtgatggtaagataaaattgtattgcacaacaacaaaactctatcgataaaaaagtaaaaaataaaaatctataatcatttatgtaagttctatttattgattttcataattattaccgagttgattatctttgaatagattgatttcaacacatgtattttagacttgaattaagagtaaagcagtaaagcacacaaaga

SEQ ID NO: 14866 - DNA, 9022 bp, Cannabis sativa
aaggagttccacagagagatatagagctccaaaatttaggaagtgatccccggatgaatttctttggagaatacccaccaagcggggaaaaaaagtttcaaacactctattacaagaaacaatggatgtttttgaggtaatatatagaatgcgaccaacaacatgtagcctttctttgccttccaatgggatatcattatatcttctgtaacttgtaataatgttgaaaatgctacttatgtctacatcatccagaattaaacttaaatataaatcattattttgcaaaacaactattcctaggagcactaaagcttcggctgcaatttcattttcctgaaacccaagaccatttattgattctgatgtaacagcttcagtaggctcttttactgaagtactaatttcacttttaattgaactccaaatagctccagcatgtttggtcatcctgtctgctccatacttcagtgagcaatagctcagatatttcaaagaatcaaccttcaaacataaagaatcagcatggaatttaatacaaatatgctacagcaacgaaattaattcagttgccttcgtaatcatataaactctttgtattaccaaccttagatgatgacagggaagaagagagtttttcaagaagcaagggaatgacatatggctcaagaagtggtgttgatgagaaagctatctgcggaacaaaaaaacattgtacagctcagttattagtacaaaagtgctttttacaacccttgttatttatggcaagcttgaaagtgctcttgactcgagactcgaataataataaagattaaaaactagtaaatttggttcaagtaccagagagaatttattcatttgattataaacactcattagtcatcttcaccacagatgcctatgcatttagtaacagtttcctacttctatcaaatttcttattgtgctcgcctattcagatatattatccctccctaagccagcatccaagatatactaaaaaaaataattcaataggaatccagaaagagaaacccaatatttggaaacatgaaagggggagattacagcaagaacaattaagatgaattcaatatagataatctggtcatgcaaaaaagttctgttgaactatacatgtaaggattaaggaatgatctataattcacgcaggtgagagactgacaagaaaagaaaagaaaatttggcatttgtgagatagactagactgtgggtgggctatactagtgatttatgtcgatgatggcattgttatcattggcattacaagtgcttcattgttagaatgctaaaagtttggttattggaagatcataacaaatagcataaatatgttcaagacctacatacaccatacaccatagcaatggagcatacattcaattacagcataccataagcgcccttgcaagatcgtctcttttcacatcagtgtcctctccttttggctggataatgttaagaaagcaaaccaaaagtaaaaaaaagcttgcatagagcttttattaataaatataattatgaatttgtatgtatagtgaaggtaaggcttccatacatgagtaaaatgaatgggaaagtaactatttaaagtttcaaaaagctctccagaaaaatttgctagcggcccattaggatctggaaatagttgaattactgcacaaatgatgtgaaaggctagcaataagcaatgaggatccttctctccatcaacagcttcacagattccatatagaaggagttcatccttgacaacaccaaaaaaatagattaagactgaaagtgggaaaaaaaaaaagaaaaagggtgaatatgccacgaggaggcaaaacataaaagaattagaagggaattctatgttcttttgacatctattcagcaccagtgtctagttatgagaaaatgctcacaaagaataaaccctaaaatcattattttgaaagaatgtaagcatttatctgcaatatgaagtgagagaacacaaattatagctttgcaactttaaattatcgatattaaacattgacattcaaataacaaatcagtcaaaaacaagtaataaaattgaagttagaatgataaaaatccagcaattaattttgatagtaagtttggaaagaataccatggaagcaacctcattgggatagcattctaagacacattccagaagctgaaaacaaagctgcaacaattttttatgttaaatttagtcagtaaaaatttggaaaaggggaacagctatacatgaaagctaataattcttttttttttttaacttcttgattcttccatttggattcttacctccctgtcgtgctgacctaaagactgcacttgtagggtatttaagaaaacctcagcaactgcttttgcatcagtggaagagactacaccaacatcactttttctcctcagtagtgctaagcacccaacaagagccccgcgtaatgctctccaatctacctgatatcattaccaaataatacattgacagcaacggctaaaagttaatcaatgaagtagtttgtgtgacaatttgccatcatagggacttaaaacaaagagcatagggggaaacagtgctctctcaccagcctatctgtgaagaatccaattaagctatgaatgatagcactgtctagtggctttgaagcaagacgtcgaagtacttccccaagaagaagagtgcctaaagatgaggacacaatttatgagatttcagactaaattaaaataaataaataaataaataaaagcttttgagaaaaagaaagaaaaagcgagacaaagagagagtggttaacggccaggaataaattttagaacattttgtacaatgctgatataccaaaaaaactaataaacgcgactcaagtagaagcacaaacagaacagcagtttaaagtaaaattcaccaagtatagtctaaagtaaaaacagaatcattatgcaattcaaaatgtgaccattatgtttcaactttgtaacggttgaggagtgttgtgttgtccatataaataaaaggcaaaatctttgtttaactttcagtgagttcaacttcaacttacccctagctcgaatgacattatctgtagtggtcaggtacatttccatctctctgacctaaattacaggaaaccacgtataagaacataaatcaattaatattacctgataagatagtaatttattcttaccagagtttcaatagttatgaagtcattcttaacaagtaaagtgatagaatccaaacttgctgcctgcagtcaaacacaaattatagaactgagtatcccttttcttatcattgagtaaaatatataaagcaccaccaggataagtagcaaaacgcataaaccaattgtctcagccctcaattcctttttatttactaatctgtgcttcaaaatcttacaaattaaagttgcatgcaacattaagaaattctcagttgtaaaataataacgaaaatacaaatctttatgccacaaaagctacagttcacagcataaaataaaataataacgaaaaaacagatctttttcgaaagaatctgacctaaaccacttacagaacatatgaagaaaaaaaaaagacggcattagtagcagtaccatcgaaaaatagctatgatcaaattatttcctcaataaaattaaaataaatactaagcacgcaaaatttaaacctctattatcactcgaacggcaactttttgtttctactcccatctcaataaatcaaattattataatgtcaccagaactccaaatagtacttttctcacttccacaacaaaggaatgcattaataagaaacagacaattagtacataagttcacccaaaatcattgagaacagggaaagtaagggtgaacctgttgactctgggagcgagaggtgtcgacgtaagactcaatgtgctgagtcaagtcgctcggttccgccattgttggcgaatagagacttgtagggttttagtaacgttttcaacaaaagaaattggagaggactgactgaactggatgcttttttctttttgttgaagttgagtagaagcccctaatattccttatatttacttacgacccctgttatttaaattatctgctacacacgccaccaaataagatcacttttttagccttttgattttcatcatttcatttttttgcggggagttggtgtagtgttgctgcagcggttagagattctagaggcgtttacattggtcttctatgggtaaaatttaactcttcttactgattttgccattttatttttagccaaatatgctattgatcattgagctcgtgctacgtgaaatagagagatttctcatttctcctttgttgcttgtgttgctgttaatgcacacaagacacaagccaattctaatataaatatcatttcttctacgaagattaaactttaagttttgggattgttttccctctactcgttttttatgatacaacagaaagaatttcatcgtgattaattttgagttagctaaacaatgtacccttcgtgtaactaaattcaatatcgaagttatgcattttgtaaatttctcatatttatgtcatgtattatgacactggaatttcatagtacaataataatgctctacaaaagttcatgtagccatgataatactacagtcgtttaggatataaagctgattgattctcaggaatatcacacaattcccatggttaaccataacaagttaagcaaacttgttaaccataacaagttaagcaaacttgatggcaaaacaaaatttaacttggaacttttaactctctccatcaaaagaggcctcttccaatagatcaaggaatccattccgagaagttgcacgaacactaagggagaatttatcagtactagtagatgccgcttcaaactttgtccacagctccttctttaaagtgttctcaccaggatgtttccctcttttgcttgtgctttgaggaggttccatccaagtgggagtgctttcaacaaggctaaagtttctgcctaaattttctgcttgaaaaagaaaagttcagcttgcaatctgtcttaatctgataaactttacaaaatgagtaaaacgcaaaaaagtcacaaaaaaggtcttaccttgtagacgagttgtcttggcttgctgaccaacatcatgagaatcaactccttgggtagtcacattcatttcgttatttagaatatgacctgtctgtggcaatgttaaggggcagttagtagaagtagtagcagcagcagtagcagtattattttcaaaaacttgatcatcacaaggctctagtaagacacatgttttcggaggtgatccaaaccaatccggtgagtcttttaaaaatttctttttgactgctgatttataactgtgttgtatacccaagagttctggatacttgtacgccagaacttcagaagcttcactgccagaagaagactcggaatcactataattcataagtccaacaggaaaaggggttgacttacgagcctcaaaacggcctgcatgagaggactcagcaattgctttcagcaatacacaagatttaggaggcgatctttttatacatggagtcattactactgctccacagttgcctttcaataacatttgtggagagtcagagctccccttcaatgtgctacttgtcttagtttctactaaatcagtaatcttacctggagttggtttaagatctacctcttcatgcaaatcgtgagttttagctttgcattcagaatttaagggcagtatcttcacaggagtgtccaaagtaaccttttttaaactcgatttaggagggtctggatacatggacgacatggactttgaaaaaggaagtggggtaaccaaaaacatttgtcttcctctatctatggtacaatcagcacgccaagacacaagaggtgaaggagaaatcaacaggttctcgtttgtgttatctggactcttgtcgacttcattttcaatttcattaacagcagaaacagcctggcttgctaaagaatttcttgattgattcacagtctccaatgaaccagtggagatcaccttctgaaatctgggcacccatggctgaacttacatcacataaatgatattaattatcagttctcggataaaatgtattcaaaaaacacttaaaaagtattatgtacgaagaattaaccttcaaagaggaaacaatttcagataagacacgtgtaaaggattcaacttcctttctcccttcttccccatttgatttgaacttaaacgcttgcacaacaagttcatcaatcttcaaaacaaccaattatttcattcttttgagttagcaacaactagagaatgatataaaaagcacaatctgtacacaggatgcttactaacaaattcaataaaacacatacatacaccaatgtcatttccccaaaaactggggttagagtagcaaatagcacatcaagaacttaactcacaaatttccaaaagctattattaccttgacttagtacaaaaatttaggaaaactcatcacagcagacgcgtctggaatttcttaatttaaattccaaaatcccatcatcgtctggaacttttagtaaatggaaatataaaaaccagttctcataagtgtttttcttaacaaatgcaaaatcagaacaaaccaaaagaagcaaagaagttcagatcaagtttaagaattattcctacaacaaagcaaattaactaattacctggttgacaagagcggttaggtccgtttgaacgagaagtagacgatcaagtgcgtcgtcgttgccatccttttctacttcttgaacccttgcaggcaactgttctttctccactttcttcttcgtgacagtggtggtcataattttcgagcatcttcttccaccgccgtagttgtttgaaacgtctctcaatgccttcctaacagtcttcgtctttgcttcgcttctctgaatcggcatttctccctctctctggttttttgaatttgtcttaccgttagtaatcaatggcggataaactagtctgaaaatttcaagaaatggagccacgggctgtaaaccggcccaaaaacaaagggcccacaagcccaataagcccgtaattttcctgggcttcgttagtttttatgagtagcccattattacaatttcttgaaccttgacgcatttccggaccaaaggaggaaaacaaaactatcccaattctctttactaagttcatacttatcctctacaaactgcacagaataagtctttagccggagcgtgaccacgcgccaccgtctccccggaagcaacacaaacaaacccagtgagcagtgagtgaatctaaagttaggttttaaagaaaaactatggcggagtactgggttgaagcccaaatcccgcagcagaagctctacaacggaattcagtttccatcagtgttgtctccgagctctacagccccgccctcctctctctccgtccttaccaaaacaatccaaactcagaaaccatatctccagtctctgcttcacaaatcgggggctttactcttgaggggtttccctgtaagtacggcgtccgatttcaacgacgtcgtcgaggctttcggcttcgaggagtttccgtatgttggtggcgcggcgcctcggagcaacgtcgtgggtagggtcttcacggccaacgagtctccaccagaccagaagatcccgtttcaccacgaaatggctcaggtatgtgtatcattaaactagtagacactaattgagccctgattctgaactgagtgtattttcatcccatatgtgtatcaatttaggtgcctgagtttccagcaaaggtgtttttcttctgtgaaatagagccagcaaatggaggagagacccctattgttctaagtcacattgtgtatgaaagaatgagagcgaagtacccagaatttgttgagagattagaagaacatggtctaatatatacaaggattttaggggaaggtgatgacccttcttctcccattggccgtggatggcagtctacctttttgaccaaagacaagtctgttgctcagcaaaggtttcttttttttttctattcttacaccactgacagatataataccacagaactatgaatttaatctggatttataacctgaaaattttctttgcagggctgcaaaattgggcatgaaattggaatggttagaagatggtgtgaaaacagtaatgggtccaatcccagctgtaaaatttgacaagacaaggcagcgcaagatttggttcaatagtatggttgctgcatatacagggtgggaggatgcaagaaatgatcctttgaaggctgtcacttttggtgatgggaagccattgccaggtgatgttatctatgactgtctcaaactacttgaagaggaatctgttgccattccttggcagaaaggtgatgttctgttgttagataacttagccgtccttcactcccgaagatctttcaccccacctcgccgtgtgctagcctcacttaccaagtagtttttacactggttttcgtaagtttgtattgtatgtacatggataaataagcagggttcgtacaattgtcaagagccccagtgataccaatgccatcttcacataatagcattaatttttcaataaactcttcaaatgttgtatctccaattattgtaccaacttactactgtacatatgtaactatacacaaatacacaagcagatagtatagacagaacagaaattacaaaatgtgatcaaaaaagggaataaaattgtggttgcattaaacatgatggctggccgctggcattggaataactggcgaagtagagaatgaatgaaaggcttgcttaattcagtggctgacgtagagaatgaaagggaactgataagtgttttctcgtcaaaagagagtgaagtatcccccacatctccaatcaaaatagggaatgaaaactgtttgat

SEQ ID NO: 14867 - DNA, 9066 bp, Cannabis sativa
tgttgttttcgtgttgtttccatggaaaatcgtaaaaatatatataaaaaaattctgtaaacgtaaaactgtaatttttttttacaaaaaatggtgcattatgtaattatcccaaaaattattaactaatatgccaaaattgtcaaaattctaaacttatacgtttatcaccctctcttctctcacataataaaagtaagtacttactgataattgtttaatttattttatgaacaaaacaacttattagaaaagaatatcaatgatgattacaagtgagatacggtgatgacatcaactttaaatacatcggtgactacaactgagatacgataatgatagttagttttaaaattatatgatgaattttctatagatttatcatcttctttttgttttagatctctattttgtgtaaaaaaatatttattttttaattttcttcactataatatatatttaaaaaaaatacctaattttgtatttatataagaagttgtatgataatatatttttttttaattttttagaattttctatatagatttattttttaataagcatatatatatatttttaaaaaatatacataaaaataaatttaaaactatttgatactattttattgtttaattaatatttatataattatttagtcgccgcccgcgaagcgcagcctattttctagtttgttataaaatataattaattaattgaattaacgtcttattcaaatttatattaaaataatttgttataaaaataattacttaatttgattgatattttaaaataattatttaagtcatattttaataaataaattaaatttagatatttaaaactaatttttttttcgaaaaaataattaattaattaatttaatggccttagttttaatagctaattttaatgaaaaaataaaagcattaaacaagcaatttctgttagataatcggagattatgagatggattcttgcattattaagaatagcatttacatacgtgtaatggtatgttctcatcaaccaatagttaaaaagttgtgttcttagcaaaaaagagttaaaaagttgtgcatataacaaccacacataatagaatgacagtcatcgtctacataaatggatgcagttatgtcaatgagcaaactgcaatttaattttacaacattttcccctctaattgtctccctttttcattaatattcattctaagttaataaaacagtacacattacaaagatgattccttgaagatttcgtatatgcagtgtaatttctcttgtttttcataaactactataagaagaaacaaatagtttctttattttatttttcttagttccatgttatcttttttctttttctttttctctttctctttcttcccttcttaagcagaaatggaagaatgattatgcaaaacccatgtactggatcatactcgaaaatcatgttcatctctgtttcactcattcataagacaaattctcttggggctcttcctcatctttatcgcaatccattttgggagcgcgacttaaaacagagctcagcagttttcttagcttaacgttatcgataaagatgttggctaatgtcttgcgcaactcatcgtctgttgtcgttggatcattgaccatttcgtgactatcctctaactcagaagcaaaatctccattttcttcccttagaagttcagcctgtaaattgttgagaatagattgttgagtcatcgtaaaaaaaataaaagaaaggtaccatttgtgctattattttcataggtagttttacaactttttcacatctcagtaagaatttgacagaccatctttctctcaaataattccttgttactcattgattgataacaagttcaagaaacagatttatatataaaaaaataagagataaaaatagatgtgataagcaataaaatagttcctacgaagagtacctctgtaagaagagagttaatttggtcatctgatgccaagaaacctgaagccaccattactgatggacagggactaacatcatcaaaagccccagctaaattcagattgcactccttaagtttactctgaagaatcctgcacttatgcagtaacttttgcctagcattttcacgctgctcactccgttgtctttcctgtttaagaagtttctgaacaaaagaaaccaccccgaagtgagttgcaggccttactttctaccttatatttctttctttcactaaggatactagttattgacacaacaaagccttcaaattaccacacaagaaagaaagaagaaatatgctgcaataccaaatatcaagaaacttgaatgggaaattttacttttaatagaacataaattacctcagcttctgccttctccttgagggagttactgagctcatcctccaattgtgattgtgaatttcgaagagatttgacttctttaacaaggactttgcggtcagctttggattttgcttccaagtcttcatatcgcttcgacaaaatctcaagctgctccttagaagaatccaattcctgcagcaaaatgtctttatctagatcgattgaacttcttgctgacttcacacatgatttctcatcctgatattatattttgattcatcaaggttatttcaaaccattataatgattccacacatagatgaaaaagatcataaaaatgaaacaagataggtagggaaaccttttcagacttcgaactcaattttaactccatttcaaaggacttctgccgaagttcctccatatcccactgcattttggtgaacctttctctctcaatcaatatagcttgctccaggttttctttacccttttgtcgagcagtttcaagttccacttccaaatccttaacctgcacatgtccggttgtgttacgaaaacacaaccaccagcattatgtaagattaaacaatctggtagcatcaagcacaacttcaatatctctcaatacatcattaaatggcaacatcatggatccaaatatttcacacacactcaagagaaaagtaacttgatgtcttgtagaaactagaaagtgacaaattcctgataagaagctaagtgcagccagattcattataaaatttatcaatatcaagacttcaaagacaaattatacgatctccaaggaaaaaaatcatacaacatttcaacaccattagaatctagcaccattttatcaacaagcagtaggtatgtacttaacaacctaaacaaaattggtccaactgcttgaaatcacaaatttagaagtacctttgttgtaaggtagtctttgccagccatttcttgatatagtcttgctataagatcctccatatcagtttttgctgtgactagccttcgctgcattgtcagaaggatcctattcaatttatggcgctgatctaatggaagaactaaccgagcaccacctcctgaagcatgcatttctgagttgccaagagtctccatgctgcttgaaacttcagcacctccaagaaggtcaagagaaccttctccagatgaatttggaatcccggatatagacatttcactacctctaagagaacttgcatcacttcccacactgtcatttgatagcttgcgagcatgagcaattactttattaatctcttgctcagagaaaagatctgttccgttactagataagaatgaagttttagaagcgtttccattatatacattcttccctacaacattgttgaaatgtctggcttgcactttactccgaggaaggccttccaattggtctaaaatagtctgccccataaacaaaccctcgtcgatattagacatgccatactttacaagattttctaccgggcttgtcaaaacctcatccaatgccagatcctccatacccatgtcataactgtcatcccttcctagcctaggagttcccatctcggatacctcataagcagtatcacttccataatctgatgttattgatgaactaccaacaatggcaggcaagcttgactgggtaggcaaatcatgagaattgccttctgaagtctgcggatgtacatcttggaatgctgagaaacatgtaatagaagaacatagatcaagacatttataaggcttttatttctctaagacctagatatatactatttcactgaaagtaaacaatgtgggtataaaagaaaaaggcttagaagtgcacttcatgcaatagaaaatcacatacacgacctagcagcagcttcaagttcaagaaaagatgccacaataacgcttcttgacacatcaatatcagacagaagcttcgtcatccattcctctaaggagcatcttctctgtaacaaaacaaaatatgattaaaatatatatacatacatatatttgtcacgtacatgcatttatctgcatcagcattggtaaagattgctgatcaaagtttgcttgacgatacgcacttcagttatatttcaaagaaaggccaatgaagctaggagaaatggtagtctctcttctaatatcactagttagaacaacaaaattgtccataattttttatttattttttaaactaggatacccacctaagaggaaactatagtaattcctatgtaagtatcccaggaaggacttgaaactcaggccatgtggaacagtgggagcaaaccacatggctgaccatttgagttacccctcttgggtacaagattgtccataattatgtttatgtataaagaccaatatcatcatactctacataataagtttagaaaatacaatgaaacagactccaaattactcctgcttgaataagttaaaaaggcattacctacctcttccaactgagcccgacttctcattcgcagtagccccttgggtggggtcaatgggaaatttttctttggaaacacttttttaagctggccaaaaataaaaaagtaattccctcattaaaagagcaacttcaagaaggaaccaagaaataggaatgtttttttcttcatataactcaagaaagaaagaagtaattcatcacaaccaacaaatttgcgaaccagtatacataaataactaaaccaaaaggcagacttacatcactgaataacttcaagaaatcattgaatcttcgcagaactccacgagttgtagtacttccttctggtgattgcacaccaacatgaactctgtagaactgtcccttggaaatgttagaaaggactttgcaaaagctgacacattggaacttgaatattaacaggttggtttgacgtaaatcacagtgtgctttttctatcaaatccacttacgtttgataaaaattagcaaatttataaaaatccaaaactctatacagaacgggttacacattatgtaaccatagtttgacaataacacacacagcataatctggtaaaactagcaagtagaagttaatcacaaaatatgaacatgaaataatattaacacaaactccacaagataattatgtaagtaccgaaaagcaatgcgaacaatgacaaccaataatcatatatggtgtagtgtttacggacagctctaatgactatactatacttgttagactgactctagtatcagtgttatgcagcctatctccactatcttggaaaggatcatatttgaatcccaaacgatgacataaacaacatctaaccctgatacagaaaaacactggagggtcattcaaatttgagtaccactacaggatctgaatctcttgattttggaaggacaacccaagaaggtatagtaacacagtaactccagccagtgcgagaatcatgaggccaaaccgtgtctcggccattctgcagagagaagtgaagtttaagataaaagataatattaaaaagcaaaaagcaagaagcacgaaacacatatacacactaagtattccaataactcaagcagtgtatgaactgatgagaagccttgcctacaatcccaaaaacattaaatcaaaattggcattaaatgatgccataagaatcacaataaaataggaaaaagaaatacaaatggaaagtgaaaaaccaattaaaactccttcgtaccaatcaaaccattaccgaaatttaatgatcaaatgacgtgttgatcaacgtgtcacttttaaattggttaaacaaacttgtgcacgtacggtaaagacaaatgaacatgactgtcgcttggaatggaaatctagtaaataagtaaaatgctaagtagtaatcaatattctctattcatagagttatacattatacattgttttggagaatatagtaatgaagatatgtgctactacctcccctgtatctgctgccaaactattttctttgctgcaagtaaataaggatgtgaactatttgttctaaaaaatgagcaatcaacataatgagtgaaactagcatcccaagaagtcatatttggtgaacaacagtatgaagcaatataagtcaacgagtgatcagcatcacacttcgaaaatttgagagtaaaaaaatagatcacaaagtagatgatcgatcatacaggaaaggaacaattttattacacacactgaacagtaattgagaacaaaggtgatcaattagcagtgattagaaagtaaaaaaaaaaaaaaaaaaggaataattttcctagagaaaaatgtacccattttctagggggaggactccaatccatcccaagtggcagtggcgaagtcccatcgtgcctgtgcttcgggggactccgtccctgcattttgtgacctttatccctaaaaattcagactttctatctctaaaattcaagagtaataatcaaatttcgattgcctcgcctcttctctccaagtttcaaattaactattcgatcagtgaaatctgtatgtgtgtagtctgaatcggaagaaaattgggggtgatgaaatctagggttttggtgatcggatcagaaaaactatgtgttgaaacgactgcgtattaattacttttatttattataggcaggcattgcgtgtcatctgcttcgtttggggttccatctcttctctatatatcttattagctaggcttccactctcaccaatgtaaagtagggaccattttcaatcccaacaaagaaacaaaaaacaattgttcaaaactatgtaaataaatatataaggggattcaagttttattgtaagaaggaaagttactatgttaatcttttttctttatataggttgatatttactatactactaactctaaatttttaagaaattttaaataacttattacgttaaaaataacgtttaaataatcaatatatcaatatataaagaaaaaaaataaaacgttaatatatcacgctctaaaatcttttcaaatttatttttctcttctttatttaattctcctatttttaatattttatcacggtataaattcactaattaatattttactattattttaataaattttccataaaatatctaatataaatcaattaattttttattattattttcttattttcattcaaaattaaagaaaagtattagaaccaaaaaagtatctatcccttcctctatatatatacatatatacatatacggatgcactcttaatggatattacccatgaataggtaatattataaaattttgattttttatgaataatttttctatttaattataaaaatttctcatttttacattatatgggctgagattggtccattagctgaaaaaaaaaataataaaaaaaaggtttttcggcaaaaaaagtgataaaaaagttgaatttgacttaaatatttttgtatataaacatattattgatatagtaaaaaaagagtattttttgatattttctttatttaattagctaaattaagcatacaaattcaaaattttcttttattatccgctaggaccaaaatctgatggtttaatatttttaaaattaatatttattgttaaatttgtttattacctattaataaataatacccattaaaaagtattacatacatatatatcataataaaaactaaaaaatatatatcaatacgaatagactacgtggtagtaagaattttttaagtttcattctcatataaacttaactaaaattttaatattaacttaatttttttctcattctgataatatattctctaatctccattattttttaatcactctatataattatttttagggacttattcatttttacacataaaaacaattttgttttgcatttttaccgaattttacatagaaactcttattgcaacattattgtaactagcgctgcaaccaccttagaaatccaaaccgtaaatttgaaaagaaaaaaaagttaaaaaaaatagtatatagagtaattccccttatttttaatactttttttttctaaaaagaaaatacacataacacacattttttttattttagattgttattgtgtaggatttagatcatgaggtaaatacattctatccaatacttttttttggtaatttcaggctccttgaagaccattacaacatcgaacatgctcttgataagagttttttttttttttttttatcaaattaattaaactcttcataaacttttttttttaattttgaaatttatttttttactttgtgactgataattatacttttttatgtggcatcatcaatttagagtttcattttttttccacttgaatttttttattaattttttactatttcttctctattttaaaataacatttatatatatgtatgaagagttattaatattttaaatttaattgtaatataatagtatcaaaagatgaataataaaaatatagatgactactatatataaaatatctaatgcatgtaaatatataactgagaaaagagtacattaaaatagaagatgatgtgatggagataagggaagatgaataatatatgttttattttccttgaacaattatatatatatgttaagtgtaatttaaatgtattattttgaaaactatacaagttcaacactacttcaatttattgttttaaaatatttttaaca

SEQ ID NO: 14868 - DNA, 8144 bp, Cannabis sativa
  modified_base (4151)..(4163): a, c, t, g, unknown or other
  modified_base (5389)..(5395): a, c, t, g, unknown or other
  modified_base (8108)..(8113): a, c, t, g, unknown or other
cattcacctcgatcaagaacacacaacacgaaacccaattaaacataacaatgtcaagaactaaatgaataggggagtcaaacttgtatagctttcggctactaaccgaataagataactaacttaacagaataagctaaccagtcacttaatgagagttagttactggttacttgtaactaaactcaacaaaattcatcatactcagcagcaatgcagctataaatttcaaatgacataattatttttattataataattaaaatttgaaacaccacactatattacaacccgtgatagacagacaaaccttaaatcacggttgtccatgccctccaatatcaacttacaaagctcctttttttctcttctttatgagctttgaatctgaaataggggctcagatttatgtacattacattatactatatattacaaagagatcatattacaaaccctgcaaatccatatatctgagcataatacatcttattttatgatctttacacctctgtttcaacaccccaaattacaatctcaagcaggagttgttgacagaagtcaaagacgcttgtttcggtggaacaagtaaggatccaccattacagatatgaccagcagttacatctaaaaaatgaactggtcattttaattttagtacacaaaagcatataaatatatatacttttttttttgtaagaagtatgataaactagttcgcgagtttgtcaagccgggaatccatgatttcagagacaacttcaagaaatgctgtttcactcatgcccgggagacaggaatcccacgcttcttgaacaatcacctcaatgacagattccttatttacattttctctacacatgatacttccaatggcgaaaggagttaagcctctctctactcctttctttagaagcatagtggaaatacgaagtgttcgggcacactcaagaggaatgtcccaaccatagtatttcaaaagagaaatatctctttcagcatctaatgagtttatgtactcgacggtgtcaggagaataggcttggcgtgcctgtggccagtaaagccagtcaaatgtgcaatcttcaaactgcaagaaggaagagagagtaagtaaacttgtgattaaccacaaaaatccaaacaataaccagatgttcaatacgaaagtaagtctatagtctggatcagggtggctagttttaagcaagctaacgattttgatatgttcgattcgaacacttaaagcaaaaagtctgcataaatcattatagaatgcaatgaaaaattgtggtatgatcagaccagttctacaaaagacaaactactgataagatagcatagcaaaggaaaagactaaaccatgaaaaaagacttacgctatcaggcagacagtatccatgatcaattggaatgagcacagtttgaccattttctcctttactcagcagaatgtttccagcatgcctatctgcattggccatccttatgtcaaagacagtgatcttatgcacctcctcgactgggaaggctccgggaccaatgtcctcacaacttccctcattcctcttgaacatctgcagtgatcctatcttaacattctttggtccactctcatacccatctggatggttaaatcctttgtgcaagcactgaaccatgatcgtcggaggcacaccagcaaatcccataacctgttcacccgatggggttcgaggtccatttcttggatgatccaatatataggcagcgacttctctaagtgctccatctccaaccttggttcctcttttaagaccttcaccattcagagaaacgggtaatcctcggggattgttcacagccataggctcttcatcaataggcttaaacacagaaacatactcttgtcctaatccatcttgcattagataagttcctccagttccctcagaggatctgatgggttcatagcctttctccaaaccatcaaatgtagagttaaacatatcccagacagatttcggaaacttaaccttgggattaacataaataggttccaacaagaaatctctatcattacaaggtggcttagttgttgttacaagtggaagctcctcagatcggatctcttctgactcattaacttcctcatcaggaactgcagccaccacagacagctccaaatccttctcaaggggtttagctctaactttagcagatttctgaaccaccaaatgaatagctgcatcattattcttattaatatcatcaatgagtctttgatcttcaagcttttcaccattaaagaagatttcttgatcatcaatatccacaaaacctttccctttcttcaaaatcctttgcttcaagtacctaacatttcggtatctatcaacatggaattcaaactccttaccacaagtggttctaacagtgatgagcaaaagatcagagagccttaaaaccaaatgcaaaacattcccaccagtcacaccataatccttaaccaaggaatcattcctggccaattctctgcctccaaacacaagcttttgcttcttaactacaaaccctttacaagtctgaatcctaagtttcacagaagcaatggaatcagattccagaacacgcatgggaatcacagaaccagccacactgagataaattacaatagattcactcgaacaatgtgaatgtcttcctcctctcctactcccgaaaaacccggaagaatgtaccgattccttccgaatcggactcaaagcaacatccactgacattttttcccccaaacccaaaaataaaaaagattccttttttccggcctttcaatcaaacttgacgaaaacccataatcaaaaacatcacaaatcgaaaaccccacaaaggaattaaaaatcccaggggggttcacaaacaacaacaaccgaaactcgaaaaaaagaaagaaaaaaaaaacccaattacgaacaatctaagtgatgggggtagctaagaaaaaactctcaaaaagataatatttttttcttcagaaaagttgaaaaggagagagtggattcttacccaaggaaaagaatcaaaggaaaatggagatggaagttgagcttaaattgccaagagggaaagctggcatggcgatcaggtggcgattaattgagatgagttgtttacccagattggagggttaagagtcataggtctctccgcagtgttctcggcgagattttctggtccgagaaaattgtagtctgattaaagagaagaagtaaagagagagagagagagagagagagagagagagaaactgaattatagccgttggctttatataaacaccttttgacccaacgactattaccagaaaatattaaatattattttaattattactattttataaatactcttaataaaaaaagtaattaattaactaattaaaaatgggaaacgacgtcgtttaagttcgtaacggtagtttgcttagctttattaatagcgtggctcttgtcccccatgtcgggttaactgtcaggtgttattttaccaaattgccattgcttttaaaggtaattttcctaactgtttttttctttaattaatttcaattattagagtaaattagtgaaaatagaatttttttttttttttgacaaaaaaatataattgctttggtaataatagcttataacttattgatttgttgaaaaaaagtcagataaattatttgttaaaaaatagtaaaaaataaattctttttatgtttattcactctaaaaaatgattgagaatttattatgagatattaattgttttgagtagtttttggtataaatatataagtttaatttttaacggtaataatatttacgttataattgttataatttttataagtatctgaatattaagtgttaagtaaattgactcgtgataattttgattagtctaggtaattaaatttttattttttaaaaaaaattagtttaattataccaataagaaataattttcattctattcctttatttggttgcatgttaaattattgaaatatcatttcaatataatgatctttccaccattttggtggaatgactattccattttaaaatggaatgaaagaccattgcaagatttgaaaaaaaaataataattttttttatcaattnnnnnnnnnnnnntaaattttattctattcctattccaattttcatttccattcctatttctatattttcattgataattttgattagtctaggttattaaatttttattttttttaaaaaattagtttaattataccaataagaaataattttcattccattcctttatttggttgcatgtaaaattattgaaatatcatttcaatggaatgatctttccaccattttggtgaaatgactattctattttaaaatggaaggaaagaccattacaagatttgaaaaaaattaataattttttatatatattttaaattttattccatttccatttcctattccaatttctatttctatctaagtgttatataaattggcttgtgataatcctgattggtccaggtcattaatttttttttttttaaaaaaaatattagtttaaatatactaataagaaaatgatacgtgaataataatttgtcatttaacgagtaggtacttacagagtttctgaaatataacttaagtattattaccgctgaaaattaaacttaagtatttatttgcaagagtattaaatttaaaaatttataccacaaattatttatttttaaatgaggtgtgttatgaaattaaaaaaaaaatcagcataaaaagatcatattatatttagttataaatttatttacttttgtaaaatatcattgctgtaaaaaatactattattatgtatcaaaatgattataattacttttagttaataataataattattatttggagaaatgagattttattattattcttttagggggacagaataaagtatattatgcattactaataatcataattaattaaggttaagcacaatctcacacatgtgcaccgtccacacgtgtattcattcaaacctaatttgtcagaactgacaaataaggataaaatggaatcaatttaagttattaaaatgccataaaatcaagatctacaatatatttttaggataatcacatattaaataaataaaattaaagtactaaaccatgtgtttaggtacaatttgcaaattatttttatttttattattttaaattaaattaataataaataaagaggcaattttaatcgccgttgaactcgaaaagggtccctttcaaaaaaaaaaaaaagaactcgaaaagggtccccaaatctacattgtcttcttttggtgctttttttttaaaaaaaaaaannnnnnnataaataaataaaattatatattaatttataaaataaataatcaaatatttattaagctcccctaaccatcattggaaccattaataatatatgcattgaatcttgtagtgttattctaacgtatatatatatcgttagatcattattagaatgaacggtggagatttgttattactacaataattaatatttataaaaataacttctcaaaagaataataataatactaataagaacaggtacagtgaacatgcatagtttctaactcttctaacttattattattgctttcgtttgtggttggaattttgtaataattttataaaaagttgtgtaaagttttattcatttataataaataaaaaatagcattattgatttgctaaaataaaaaagttgagtacgtgggggatataatttgagagcacatgtatgatctatgtaagtttacattatttaattatatatatatccatatatttataatataatatagttaataatttttcataataattattacattaaataatatatattttaatgtaaaaataattatttttaaatattttagggaagatacaaatgctagtaaataatatattagttatgaattcttttaaataatatatagattattgttgggatatgttcttgatgtaataatatgcatggttgattaatgaaaatttttaattgataaaaaaatatgtaatttttaatattaaattaaattatatttctcttttatattatttgtatgctctcaaattctcaattacaatcataagtaagtacttaataatattaatctaaaaatgattattaaatagtattttgatggagctcaaattacaaataatagtcaaattactataatttattaaattacttttaataattaatatttattttattatttcgattattgatctagagtaaacaaaatgcattctttaatacgacaaaaagtccaatctctctatatatttaatttattggtcaaataataaaagttagtaatgaatcataatagatcttatggtttttttttttttttaagccactaacatgttacaattgaccccatttattatatatagaaaccctttgatattcatcttatcttataattagttttacatttaaatatatgacaagtaattagtatatagcataataattagtctaagttttaagcaaataatttaagagaaaactttataggtgaatattaaattgaataattgataactaagaataataaatcttacttatgaagacaaaaagaaaatattaatagtataagtgtggagcaagaaagaataatgtttagctcatattcatgctcccatgttgcaatgttggtgttccccatcacaagttttatttattaatgttgttggtaggtactacactaatacactataatatatatcttatattaactccataatattcattttaggaaaataatgatcaatttatcttttaagaaaaccatcattttcttaaagaacaattaactaattacatattataatttgttaaattataataaaattatgggtaattatgggtaattaggaaaattcttttatgtttttaattttttatatttagcacctttatctttttttttttggaaaaatttctttatgtttatttttttagatttatgaggtttcagcaaaatatcactgctaaataacaactgaagtattactgttttgactttgaagttttactttctttcacatacacacaagtgtacacagtgattatccagttagtatttaacagtgatatttaactaacgccataaaaattttaaaaaaaaattaaaagagtttctccacaaaaaaaaaaaaataaataaaataaagaagagttaagtatataaaaattaagagttttttgtggcttatatatttatttgcacttaactttttaagttcaaattttggtgttaaaaccctccaaactattaaactattagtaaatttaagatgtcatatattttttatagttaactactaacatagactgtttatgtgtacactcttatacacgtgacacgtttatattgatacacttaatattattatttaaaaattataaaaaatttatttttttaaaatatttatttatttttataattttatttagttttaaaataaattttgaaataataatattatgtgtaccaatataaacgtctcacgtgtacacgagtgtacacataaataatcaacagtgtcaattagccatattacaccttacatttgctaacagtttagtagtttgtaaggttttactgccaaaatttgagcttggagggttaagtacaagtgaaacgatggctgagaacatttaactgccaaaaacttaaaaattaaaatataaaagagttttgccgccaattactctaaaattatttatgtcttctaacattattataatttaataataattataaaaaattatttatgccttgataaaaatttattatctaattttatttattttttgattaaaagtaataactaggaacattctttttattatctcttaacaaatttgtcgattcattcacaaataaaaaataaaaatattaagggcccgtttggaaagctacttgggaattaaaattggatgtaattggaggtaattacacagtttaacgtgtttgtgtggccacgtaattacatnnnnnntgtgtaattagaggtaattgggaggcctcaa

SEQ ID NO: 14869 - DNA, 9551 bp, Cannabis sativa
  modified_base (8833)..(8855): a, c, t, g, unknown or other
aaaaaggtatagtttttttagggttttaattattggtttagaaatcaaattttttgattttctaagcatagaaaatcaaatttccctaatgtaaagtcatgcagaaatagggtccatttagcatgggacctcttttgggtgaacgactaataattttgaaaacagttgccgggttccatcgaaactatatatataggtcttttttttttggtaacaatctaaagctaatttgcttttcatatatttatatcacaatttacaatgaatatctgatcatttgagccggaaagtttgtcccatttgtttgaaatattataaaaagaatatatacatatatttataacttgttgattttttcgaagcaaggaatttagtcaaacagcagttttataataatatgtaattttaggacacacgtactataagtacaaatagcgatacatgtttcataatatagaacttataaattacaagaaaatttgttcatatataaaaccgaagtctagtagtttatatatttgtatacgtttcggtaataggaacgaaactttattttactatgtatataaatacacatatatttgtctttttcatgtgtaacaatttatcatatagtatttaatatattaattattggaacgaactagcaaacaaaatctcattgatttttaatcatttccaaaggatcatgaaaagaaagaaaagacaaaaaaaagtatagattccatggtttgaattataaagagaatttgataagttacaacaattcaagataaaagatataaaatgaaagaaaaacagcttccacatatatatgctgtaggagtaccaacaatttataccataaataaaagaaaaatcgttaattagatatatatttgagtgatatttatgatatacaatctacagaaaattaatttcagtcaatcatgtataaacacacatgcatgatttaatatggggaaatgatgaatttatattataatttatgatctcatgatattctttgaattaatttgtttgacaattacatgaaagtaagaatgaaagaacaatttttgttttctatatctttttttttccttaccacaaacttatataaatagactatataaatgagagaaataatcatatatgtatataatatatatctgatttttgaacctaaataaatgatttttttactacacaataagttgacaaccagagcagcacgttttaacaaaagtgtacatgtgttgcaaatttgctcaaaatctttggtatttactctgtaaaaagaacaacaaagaagagagatacattatacagacatataaattatatatatatatattcttaaaataaataaaataataatatataatatatgtaataaaaagaaaaagatatgatactgtaatgatataatggtgatgattttcatgcaaggatcgacataaggagggtgtgttgctttccttcgctttgttttgggtctttggttctctccttcttcaaatattattttgtcagaagtgagagcagcctttctctccttttcttttctttttcttccttttttttttctcattctttcccttttgttcttttctctctttcctttccaacatggactgtttgtacagttagttcagttgagagaggcgtgtatatatatatatacatatatatatatatatgagcgtccaaaccaaggccccatcactattagggtaaaaggaaagaaaaagagcaaattgtggcctcctctcacgttgaaagagagagaaggcttcaaagtactaatgatgatgatgatgatgatgttgtctatcagaggttttccttcctttctttttttcttttttttttcttttttatttaataatcttttattgtttttttcactcctacccatgatgatccggattgtcagggtcaggccagaaggaagagtacttcatccagtctgcctcttgaggtacgtttgccatagatgattcctgctgaaaacaaattaaattaaatcaaaaacatgtacataatatctaaaaataataattgaagtatatatctatgaagaaataatatagagaggtaattttatattttttttacagtaaattagttcacacaatcaaagagataataattaagaagaagtacttgttattatctaattattcctataatttctaattcttctactgatcattttttttatatttttattttatgttatatgtaattttatttcttttcataattctctaatattttcttataaggaagattctttttccaagttattaaggaatattaacaaggctaactattgctctagaaagagaaagataaataaagagaggtcaatatgtattgtaaataaatatattgtgggcttgttgtttcacattgtgtactagaaaagaaaaagaataaaactaatagcattttaaccaattaatattcttttcttaaagagtagaacttacagagtgagaaaacaaaaaaagctttcctactcacacttcatatcctataataagtcgtcaattaattgtgggctgctctatagcgacgcttatatatatatatatatatgttcttgtacaataatacttacgatcattaattatccactaagtataaataatttatctgacctatagtcgatctaactagttaattaattaccgtatctcagaagaaaagtaaaaaagaatgacacactaaagtgtagtatttgcaaaagcttggttataatggttatatattagtgagctcaaatattattcccttaaaattcttcgacaatgttgtctttccagttagtgacaaaaaatattcgagtctaaaatattctataacaatatccatatattcgatatcacttgaaaatccaccaaactaaactcccatatatgtatttaaaataatgtaaaggaaaaaattcaaagagaggaaaagagaaaaaggagaaaaaagatggttctctacttgggttggggcttcaatctttaattcaaactaatagtaataaagaaataatcatttctctttctttcatcctttttaattctttgcttgacctttttcttttagctccctagctattatttgtattatagcgggcgatttgtatatatatgatcacaagaaaaaacaagtagtatacacatagatttcagggtcaaaaaagatcgaacctagctagctagttatatataatatgatgtaatataaataaaagtatatatactcacttctttgatattattattattacttgaagtgcagcccattatgagttcttccaaaccagatgctgaccttcctcccattttatgatgctgttgttgttgttgctgctgctgtaatattatattattgggttattgcattattattattattatgtaaataagaaaaatacacataaatatatatatgtataattaaagggtaactaaaattattatgaagaaagaaaattattaattaaaaactaaaaagaactatacacacaccacatgcatgatttgtttgttctacgtacgtacgtagtgattattaattaatgtgataactgataataaattaataagagtatttaaatataatttagtttatataaatgtagtacctggaaagaagtattactagtagtagtggtggtggtggtgtcatgattttggagcattattctataggcgtcctgatcaagaatgatggaggtgtggtgtagaggaggaggagagattatattggaaatagggtgtgaaggcctgcttatgtgaaacgacgtcgttgccatttgatgatgtatttgctgctgttgttgttgatggtgatgatgatgatgatgttcttgagccatgttattaaggtgtactggtggcctgatatgttgatggtgttcacgcacgtgatcttcgcacgcgcttcctcctcctcctcctcctgttacttcccttactgttgaactatgatctcctattcccacctgcattaattaataaataataatacttattcacattattaattcaaatatatattcccatgaaaaagctagcccttcattttcaagtaacgttcccaaacctatatatattatttgagagttagatgacagtaatgtttcaattaaggtcaatggaaattgtcacgctgcatatgcaagcatataaccaaatattggatatttaaattatatatgttatagggagaaagaaagagaataaattaattacaacttaattattgagagcttatatatctatatcgatgatcatgactaataatttaaaataataaatacagtataatttaattacctcatcaaaactttttctaaacggaacaaagctgaagtgatcagatttcaactgatgaatgggaatatccatagtggaaccactataagcagtactagacaactgagcaacagcagctgcagctgcaaccatttgattatgatgatgatgttgatctctctgaggattattaataatattaccactactacttatctccttagaagagcagctaccactcccagtactgtctctcctacccccgccaccgccgcctatgccgccacctccgtcgctactaattccttccgcgacaaccacggaggcggcggccgaggctgcacggtcagaccaattacattgcctaggctgagtttggtaaaaaatcttagagacaacaagctctccttctttttcttcctcgtgttgacccaaatggtattggtgcatgacccagttggtcttttcgggtttgcggtttttaccgaagttggtgtacaaaacaaggattttcttgcaccctttttgctttccgttgaccatgaccggtctggtcttcccggtcttgtgccacctcgtttctcctccttgttgtaagtggtcacattctgtttggatttttcttcgttttcttgtacctgttgtgtacgctttcgagggtctgtgaaagaaatgtctgcttaaaccatctctagtcactcctgccaaagaaaaaaaagaaaaaaaaaatcaaaatgtttggtttgacttgtattcatatttgtgtatctctagcgtgcatggtacatatgattgttattaattattgtcattattatgaatgataatagttattacatatactttgaaagttaataaaagtggagtttgtgtatgtatatacatatacatatatttaatatttatttagatcgatatatataattaaaatgaattaaggacctggaagtttttcaggatgggtataacaaatcccatcttctccttcaattgtgggaatgaactcatctatcaaagggtgagatttcatgtctttatcttctacttttgcttcgaggtgttcgatcagttcttggtctgttgggtcgaatttcactccagctggtagacctaaccaatcctacacaatatttatttgataccatatttattaattagtacttttttatatatatatattcaataatttaaaatattctcacctttaaaaaaataacaaaaaagagatgggagagggagagagagagataataacttttttttttttttgtgaaatttgaatttggcttagaagaaaatcaaaatatttataagaaattaatttttaataatatttgaagtaataatttaccggttttccttcgagcttgtgaccacaaccggggcagtgtttggatccacacatctgatgctcttcaagctttgcatctatgagatcagagctggtgattgagctgcccagctgattactactcttattcatagcttttaatatgtttccaccttctgattatgatgaagaacaagatcaacaacaatatttacatattatatatccaaaatatttctacttctgattcaacgtatatatactactgattattattactcagcttattattattcgtagtaatattattatataagccttctacctctacaagattatcttcatcttcacaaatcagctcactcataatcccaactttttgttcttcttcttcttctatatcacaaaacaacttcatatggttaaatatatgtatacaaatatataaagaaataattatatcattatcaattaatacataatatagtaagatttgtgacttgaaaaaaatcaacaggatacaaacaaatcatacaaaagataatgttttgtggtatagtacacttactgattatatgttaaaagagcaagaatacagcttcaaattaataaattaatgaagacaaaaatctttttgattgctttcagtggccaaattcgaccaaaaccaagaaatttcccaaagcccagatgagattagaagagaatataatagtattaacatagaaaataaaaactaaaaataaaatctctccctagctaagaaataattgataagatattagctgtagtgctagtaagaagaatatagaagagagaagaagagagagagagaaatgaattgaagaagaaaagagagagggaaaaaaggaaactgtcacagtaggatttgagctataaacctgctttaacccatggaatccttctctactttaactgaagctctcagtgagaaaaaaaaaatataatatataatatataatatataaaattaaaaaaaataataataaaaataaaaaggaaaagtttctctctctcaacaaaacctatacaaacataccaactttaataagctgcctttgctaatttaagaaggccatatgtatgtaggcggtttatgtgagagaaagagaaagagagtaggatagaaacaaattaaaaccaacttgggaatttatatttatttataataaattaatagttttgggctaataaaataaagctcttctcaagggggttctctatttctctctcacacctttgtttgagtctcttgactatcaaaagcaaaaggcaagaaacggccttcacagctgttactatatggaacaaacactcaaaagcagagaaaccccatatctttgtattacttattttatacttaattattattattagagttaaaataaaaataaataaatgaaagtattattgtacgtacacctcttgggtttgtatttctttctttataaatttaactaattgaggtcatatatatgtctaaaaattaaaaattggtgtaattaattacctaagctataattttacatttaaaaaataaagaattataatattttctaaagatagattaatgatgtaaaatataatagtgaaaaacgaaaaaacacacacgaaaaaaaaatgataagagctcacatgggttttgagctggagtgctgatcatgatgcttttgccatgaatgttgcagagagagagagagagagagagagagagattaagagaggttgcttgatttgcaaggcaaaatgagcagtatacttgatggaccaccaccaccccttctaattaatagagctacaaaataaaattatctatatctctaaaaagaaagaaaaaaaaaaatatttaattttatatctaaaataataataataataataaatctactaggaaacttcagggagaagcaccccccacaaaaacaaaaaactattacctaaatatctaaaagggtaaaacgacttcattttacatgcagtattagttttgtatccttctctacttttgggggatgtgttatatttttgtatagagagggaaaactaggctactttcagtcacacacagattatgttatgtccatatgctgcagtggcaatgggggcccacttgaaatctttctcctctctaaagtgtgttcatatctgatgatgggctaagcttcacgtttataacattcattccggcagtcaaaattaaaatgatggatggtccaagatgatgtttgaagaatatatataaatatattgtatatgtatatatgtaactcaccatgattacactgctcatttctctaatattttttatgtaaaacaaaaaaaatttaaataaatatatatatatagaaaaattgtagaagatcactacttttgtctttaaataaggagatctctagttttagtatttacaaataatataatttaaatttttttatacgattgtgtatattatacctatactgtatttcgtttgtttttgactatatatattttaaattctgtttaatattgtaaattatttaattatttttaacaacttaaatcatgtatactataactaatcatgtagactttcatataattaagttttcaaatataaaaaatattaatgtccctagtagtgatagagactgattttagtgtaattgttctctaaatatatataaatgaaaaataggtgtgtaaagtattggtcgatagagcactgacattgaggaatatgtccttatagggaggaggagagaattgagatctctattaattaggtaccaaaatcaccattcactagtgatcaacttttttttttaaaaaaaaaaaaaagtagaaaataaatcaaaaaagaaaatatatatttaaaaataaataaaaatagtgaacaacctttgattagttttctctttttgtcccttaagaaggaatggaagaatcagattgctgagattggattatatccaataagtcttacttttgactaatgaataggggaacccacagatcttaagcactgtttttatgctctccactcttggcatgttacacaatatcatatctatatttttatttacttttatttttttagtttaaaaattcaaaaacaaaaaaatccttttttgaaagggaattaaatatatctatatgtattattatgagtatcaagaacaaaataataataataataatnnnnnnnnnnnnnnnnnnnnnnntaataataataataataatgaaagtatataaattctaaatattctgaaaacttcaaaactgcaagtagctataggtctagctagggaagaacattatgtggaaaaatacttctttaattttaataggttgaaatgtgtatatgtacgagaatatttctacaaggctagagaataatacttacttggtactcatttaattattttgttaagattcagagacataatttagattttctagatcgaatgaggaatatgttgcatcaactcgacaaaaaaatttcttttgtcaaattattactttcaagtggtgattaattgaacatacataggaatatagatgtatctatatagaaagaaattgagaaatttatttatatatatttataaaggatagttagatatagatagtttggttccaattccacaccaaagtaaggacgtggcagctaaagctaatgtaatgatacttccatatacaatttttaagtattttcttcggctcaaaattttgctccatttatgtgtaataatataataaacatatatatgtatggtatttgagcacatgttctaatttataatacatatccattaattattttcaaaatgttgaatcctatatacatttgttgttctctcttagtagatagtatcttgataaagtgtggggctatgatacaaattgttgttaattaa

SEQ ID NO: 14870 - DNA, 3484 bp, Cannabis sativa
tgagaaccatcaactatttgttcttaaatctggaacttttgtccaaagctttcttttagtcttttaaatgtgaaagtttatctctccaacatacatatgtaatctctatgttttccatttcacttttgcattgtacttggtatgtaattgctaaacttaggcatgccagccatcttaaaatttgagcagcaatagtggcgatttccgggcaccaatcaatacgccgtcattcatttctgaaaccacagtggtgaaacaccaaaatgggaggggagctcacacaaacttacagtgaggttttgtattcttaaattcggcacactagcagagtttaacagaacaaatatacaattgaacattctaaatgttaaaacaaaaaatgaagtgtgctagaaatcgccatgactgaaaatatcaaggccatgattttgtaaaacggaaatatcaaagtgctactgctaccttaggaatcatcaagctaacctaccaaaaagaatattacatgcttttaatatataagagggaatgcgcactattattcattacctcgtatcatcgtccaccagacaactcaatagcatcctgattataaatggaatcttcaccccagtcgaaccttctttgtattctttcatactcttgccttcgagtaacttcgacattctgccactcttcccaccgctcagccagtccctctccttcaagcatccgcacaacctctgacattaacgggcgatcatctggtgattgttgggtgcaaagcaatgcaacctgaatcatcatttctacctcttcgagttcataattattattaagattgcgatccacaatagcctcaagtcttttctccctttccagctttttcacctgcaggaagaaaagaaattatctacaacaaattggttctctcagatgaagaaaaacaaaagtgcacgagtaagaatgcagcatctcagtacaactaaacagtaatgaaaatatatgaaaacattactcttattttgcgtagtacagtgaaaaatgagaagcataagtcgactatcttaaatagcaaaagcttgatggaaatgtccatgtagcacccatcccttgatttctcaaatatgtttccacaataaaagcagtgtgaattatatgcatgtttagggaaaagaattacatggtcaagcaataaaacatcatcttcctcttccaaacgcgagaagtctatcgcccgttggcctgttacaatctccaagagcatgatgccatagccgaaaacatcagttctttctgatgacttcccagttgacaagtattcaggtgctatgtggcccatcgtccctcgaacttgagttgtcacattagtctttctagcatccaccagctttgccaagccaaagtctccaacaactgcttcaaagtcttcatcaagcaatacattagcagccttaacatcccgatgaatgatcttaggattgcaatgttcatgtaagtactccaaaccacgcgctgtacccaaagccactctttttctggtgggccaatccaatactggctccccaggttttatctctgcaataaaactcaaaatcagaaaagtacagtagatgtataaagatgtagatataaatccggtaacaaatcacatttacgacctaaaaagaaatacctcgtaattgataagcaacactcaagttctgcataaaaggatacaccaaaaggcgctctgttggtgtagtgcagaatccaattagtcgtaatagattcctgtgaactgcaacactaatcatctcaacttcacgctgaaaagctgcatccccaccaggactttcatagtcagtcaaccgcttcacagcaacttttgtattatcagatagcactcctttatagaccttcccaaaacctccctgaccaaggacatttttctcactgaaattgtcagtggcaacctgcaattccctccatgcaaatctttttaattgaccaaaggcaattcttcgatcaacttcacctgaacccaaagttgaaaaggataataaaagtaattatttcaaaggtgccaagcaaattatcatcctccagtaaaaaataatccaggtaaactaaagcatggaaatgatttcacataagcaaataaaataaaaaactaaacagagaatgatgatagaaggcttgtggtagatggtttaaatcatgctccctattttagacaagacaatttatgcatgaaccaattaaaagaaatgcaaacctggaacgtctacaaaaacttcacgcttgtagccttttcttctatttttgcatacaaaataaagcgagccaccaatgaagagaatgaaaattattccaccaacaattccaactatagttccagtactcagcttatgtgaagggcctgtcaatagtagtaagatcttagcaatagctaaataaactcggggtaaattggacagctgaaattgctacatggccactatgatccatttacctgattcatcaatatcagtagcacaagggtgaggaaaatttggaccacaattcaagtggtttccagagaaactacaaaaaaacacgcacacacataaaaaaagattaggctggtgaacaagttagaagggagagagagagagagagagagagataacggtaataaaattgaagatattgtctggaatagaaatcattaacttagaatgaacttcttacttgtacttaacgatctggaataatttctcaggaatccgaccactgaaactattggaatctagctgactgtaaataacgaacataccacatcatcaaacacaaagaagatgtgaagtatacttacaactcaaatacatatatctcgaatcatactttagacaacgcgcaaaagaaagaaaaagaatcactaaaatacaaattaatttattaatgttctaccataggtgcatactaaagataactaacatacagagtaattaagctctgaagactggaaagtgattcagggattgttccagataggttatttccacttaaaatcctgctcgcatatgaccaagaaatcattgtcaaggacaaaggtatgaaaaatgcaaaagtttttagacataaaaccattactatatgcatgatgttccacttacaagaattgaagctttttcaaatcaccgagggacgaaggtattcctccacttaaattgttatcctccaagttcaagttggccaaatttgcaagatttccaaattcatttggtattacacctgttatgccatttccttgcaatgaactgcacgaatatattataaatgggatgattaattatacatgtgtatgcacacagacaaattaacaggaaaaacaaacatcgaagtagttggtgcgaaaaaacagggtagaaataacaaatcaattttccgcatgctcaaagctcaacaatataaattatcacaagcacaaattactgaaaaataatgaatgctttaagttgcttcaaacgatttgcataggttagaa

SEQ ID NO: 14871 - DNA, 9482 bp, Cannabis sativa
  modified_base (43)..(56): a, c, t, g, unknown or other
tatttctgatctatattaataactaaatctgattatattgaannnnnnnnnnnnnngggcataaaacccaacaggaagtggctgtcttccaacaatgttacagctttgtttcaagcatgtaccagttgaaactctttgcccgatctgctctttagaagatgaatcaactttgcatgctcttgtaacttgtcctactgctaagaggtgttgggaccgagtgggaataagaattgtagtacagcaggaagacacgtttctggtctggtgcatcaactgatttcagcagctggaaaaagaaaaaaatgagttgttggtggctttgtgttggtcgatttggaatgcgagaaatgacaaggtgtggcaagataaaagagtcagagtgtatagcattgtttcgttagcaaaaagctttcttaaccaatggaaaaacgcacaagaatcagtcattgagactacattttctggttatataaccgaagatgctgcagtgtgttgggtgcctccacatgttaatagtgttaagataaatgttgacgcggctttgttcaacgaaacccgacagtttggagtcggattggttgctcgtgatactcaaggaatgctaattgaaggttgcactaaattgttccaaggccaagtttctcctcctacagccgaagccatgggattccgagaggtgttgagttggattaagaagaaaaaattatttccattcaaaaaaaaaaatcaatataagttgttcgtcctccaatttattagttcatatatagaattggtcaaaattattattttacccttctaattatctcttgaattccttaagtactattaattcaatgtgaacatttaatctataatttcaatcatagatttggatccaactgtaatcactcccaaaattaacaatttaaagaagttaatatttgatccatttgaaaagcttgtattctacttattgtataacatgttcacaagcatccatgttattaagttttcaaaattgaagttgtaggaatcacctcttgagaaactttaacaagtgaatcaaagaacctaataaatacaaataagagtttatgataaatacttaggattcaggctgatctactaatgatcaatatcattgtgatataaataatttttttatgatcataaacgacacgttgataaaagatattaatcatattgatcagtcatgcattaaattatacacagtatatttactaaatatctatctacatatgtaatctgaatcaaaatcacatgtcacgaaagtatagtgcttagtaaactgtacttagtaattttatattaaagatttcatactttaatacactaccaacctattttattcatataataggatgttaattctcttatacttccttacaagattattcactttctctatatgaatatgaaattttcttatattaattttatttctataattaatatacttatttataatatatttatattttatatattctctaatatattatttactaaatactcttaacagatttaggaaaagaaaaaagaaaaaacttatttaatttacattactattgtgaacttatattacctaatatatatacacgaattttatagtagggtgttacttttgcccttaacagtaagagtgtttctgttttatgaagaaattataagtaaaagatgtatctatgaaggtgtacattatatttatagtaagcattatactaatttttaataaattgtgaataatacatagtattaaaaataaaattaaaaatagttgataacacacatgcttaaattttaaattcaacatcagaaattatttagaatgcctactatatataactacactcttaattttcagtatttaaataaattttaaccaatatcttaatattacaatctacaatataattatagtaaatatcctaacattgaaagaagaattcacaataaataattacacgaattaaaaaataacaaaaaaaaaaaaaaaagacaaaacaaaacatgtttgaatcatatttttagtaccataaaattatttaaaatttctaaaaaagattaaattatctgttataataaaacacagaaaaattccaagtgccaaaaatgaaaacacaacttgtaataaaacatttccccatataatactaatataagtgtaaaaacatcctcattatgatgaatcaatcaaacaaattttcttgtattatatatatgcctatcatctatgaagattttacaccgaacctcctctttccccttctcccactcctctcccagaatacaaaattgccctttaatcgttgttaatgttacactttggaaaagagaaaaatcaaaagacccccgcccgcaatagctaagatcactcatcaatatgtgtgcggcaacatgtacatcacaagtaaaagatcattaggactctctgatgtttggactaaataaaaatcaagggtaaaagagtttggcaaaaagaagctcattccaagtatcttgaagacccggtaagcaccagtgtgtacaatcggcatagctgacgggattggctatttgctcaggagtcaatggactccattgcttcttgtatattgatgtgtgtgcgtctttccggtataatgagagttgtgtgatgttgagaaatgtaacgggaaacttcgatttacggaatacgtctccgatcacctccattatgctttttctgctatcagaaccccagtaatttggatcttctatcattcttgtttcgttgtagcaattacgacctggaacaccgccccaatctccactcctataggccaataacatcagaatttagttcataatggagcttaggaactggaatttttatgttgtagtactagttttaggacccggaaacagttccaattctgtcacgaattatgacattgcatagtttaagataatattaaaatgataagatctgattaaaataagattaaataccttcccgtacctaaacatgatcaacaaatatctttctgaaaagtagtagtgctagttagcagttactattcagggagcatgtaagggtaggatttaaaatttgggaattatcccatataatattttttaacttattttttcaaatttatggtttgggttgctccggtagtttctatgtaggttgttatacagattttaattgcgatttaggttgctttttagttattataggggcttttgtgtggaatttcgtaaaaaaaaaaaacaaaactgttttgaacaagttcttttcatatgttactctaggatagactataatggccttttggggcactaatctgtaacccttttccgaattttgagttaaatgacttctcctttagaaagtgcaataaactatatgctttttttgcccacattttaataattttctctgttcatcgtgggaatcaggccagctatagaaaaagaaaaaaggaaaacgtaaaataaaatcttacttcgcatgagtaggggacatgctagtaaagaatactcttgtctttttccggtccatattgatcctcacccatctcaacatactcctcattgccatacgataagcatcttctgtcgataattccatgatatccttagcttcgtcatcaaaagatccacgcctaaaagaaataagaatgagtaagttacacaagttcagctagaactaactgagaggtattaataatgggatgaatattttagacccaagagcaagaaatgtacaatattttcatcttcaagccagtcatccaccacaagtaagtgttaaacaccattatatcaacacccttccaatgtttgccatgcttattgatagatcctttcctcacaatcctatcagataccctatggatgacagcattgtctgaatttgattcaagaataaatggtgcccaatagaactcaattgtggcattatattcctaaacagataaaaataaaaccaaaaaaaaaaggttagtaagaaagttttccaaaagatagcaacttgaacaagacatctttcaagtgaaagaaactaaagtcaccttggcagtgaaaactgtcaatgaatcgaaggtttccattgattttccatcttcaggaatgagtttgtgaagaagacaaaccatggagacgtattgacctctgttcagagaatctcctacaaacatcatccgcttgcctcgcagggtctcaagcatcagcgtggcattgaaccttttaggatttgtgacaacaacgttaaattgttttgtaatctacagttaaacaataatttaacataaactaacatgttttcttctttttgcatgacctacaatcatatactgaagataaaaaaaaaaaaacaaaatagttctaaaaagttatgtttcaaatcaaaatgtgaattgcccacttgtattgtgggactgcgaagtgggcccagatcaaagaaggcccacagcttctcttgggcttcttattggcccatgagtttttcaacaaagcttttcactgaagagcattacttcttactgagaagccaaaccaacaaaattgaagacaattcagttcaaatttcatagaattattattgaggttttacaaaaattgtctttttataaaacaacataaaacgaccataacaagaacaataaaaaataacagtaaaaacttaatacaataaacaatataaaaacctattttgaaattctccacagtaaaagaaaaataaaaataaaaaaaaaatcaaaattttgtagaaatccttttattattttgtttgtttgcttagaaaataaatcagaaatgggttccgtgaactggaattagccaaccaaaatgggcactaatcatttgaacgttttgacccatcatggacattctctacatacgcccccacccaaaaataacaccaaaaactcctctggacctcatgtgggttcactcccgcacattagatactatgactggcccaacttagcccatccccacctcaagagggactggcatttcgaacactctacactcattactgacacgtggatcaagcccacaaatagtgggcccatcccataacgggccctccgtcactttacactcacagattgtgggctcgtaactttgaaatgaaaatgcgtatcagagcaccaaaactgttgaccatctagattctagacgaacaaagacccaacaaatctagacacgtgaacggccatgatcatctaactcgccggcaaacaggtccaatggccaataagacaaaaaaaaaaaaaaaaaatctcaggcaagccgtcgtacccattcttcgcgttgtcggtgagtttacagagtcgaaacattttcggaaagagagatcgattctcaagatacaaattcaatcatataattgtaagaaaacgaaattaaagaagagaaaagcaaaaatcaattatgagcatccataaacccccaaaataatcagaaactcaatttcgattctcaattttgaagttgggaatgtaaaattcacaacctaaaattatgttgattaaaaatttaatttaaggctcagctaagaagtgtgtctggatagtgagaaagccaattagaatttcacctgggtagatcacagccgttaggttgccatctccagtgttgataattcgtctctggtcgaccgtgttcaaggcaggtcaactgaggttgtatataaggacaatccgattcttcgtaaagcggtcgagattcgtcataaacccaacgtccgctgaaaatgtcgcaactggggtcagttttaccgatggcgaagggaagggccttctctctcttcttctctaccccgaaaactaaactcgcttcagtaaaccacggtttctaatcaaaaaatatataaataaacaaagaaagaaagggaatcataaacgagttaagagaagagagctcacaaggtccagtgaagtatcggggtgagtcggaaccgagttgaagctgctggttgaagacgcaggcgacgtcctcgccgtaaagaatggcgacgaagacaatgaaagctagtaaggagaagaggtaaggagagagatggcgaggctttctgagaacagaggaagaagatgaagacgaagacagaggaggtttcattgtttcaaaccaacctctctctctgctgcctattattctccttccttatttatttattgcgtctgagttgagttaaaccgagttatgtgcaagcttttatttatttaattatttatttcatgtgctcattgagttggtgacatccaatgcttagaaaaaaataataaaacagatcattgttcttaattttttttataattagcttaattaatgcgcaataatgttattatctactagtactaattacattcaaattgttttattgttaatagtattattgagattttgttttattgtttaatttcaattttatgtagagtctgagtcagtcaactatcaatttttttttcttaattagaaaaggaaaaattaaaagatcggaagggagtgataaggaagtgcagtagtagtggggggtacatgattttgtacttggaaaaatggaggttatgattttgcttgccttttaagccaagtgtcttaatggaacaatgaatttctttttcttaactaatacatcaccataacattataatttattttttaaaaataataataataataattgatgaatgaccatagttcaattaaatttatagataggctgtggtagagtgcaatagggtaaactggtgaaatttcagctttcaagtagttggcagtctcacctgcttcctttcttatttcttaaccaaaacaccaattagctctagtctgttcactcacagacaaccagaaactgataatggtgatgtgttaacaaatataattttaaatgctaactacaaattagtgattagtgcctcttaatttatttaacaaccggcgaatagtagtattactgattgtttagtggaaaagaaaaattatatgtgctcatttggataggatgtgaggaccgaacgtattaaagggaaaggaaaacaaaagtagtttgcactcaaagctattttagcaatcttttttacataatattaatctgcttaaaaatggatattttatttgaagaaagaaacagaatgtgaagattcagaaatgaagagtgaaatagttatatacatcattcatcttttgtcattgaattacttctaaatagccttcttcatgggttaacatatatttggttattgagttttagcaggtgctatgctatccaggtggctttgcaatgttgtatcaggtatgtttttgtcctgtttcactgattataaaatcttcaaatttcttgaaaaatcatagtaacgtttcttttgaaatttttcttttataaaaaaggttagaataggactatcaccaactaccatgtgacccaacaataaaaaaaataaaaataacctccacagatatatttctcaaggatttccttacgcaatatgttgactcttaagtattataattgttgtgttaaaaaaaaagtagtataattgttcaatagtttttggtttatttcaaccaaaattagcaatctaatccttccatctaccacaccatatgaaaatttacaataggtgcatcaaattcagtcatgctaatttctaacatatgccaatttaatgcatcaacctgattgtccagtaaccaaccacatactccactttcaatattgagatttaagattcaaaatcactggtaccaacaaagaaaaagacccagataatttataatgacccagtttggatccaaaagaaaaagaaagatcatcggaagaaccatatctgagccagaagtggtttgagttattacatacaaatcctctatacaggtttagaatatgatcgtttaataagaaacaatacaataaaatacaagtaaatccagatacttgagaaaatacttgtgtttgcttctatttttttattttttttctttttaagggaaaaaaaaattcacgaacggtgtatgccatgtattagaccagaaaatagtctaaacaagactaaatagatttcagtatattcaaaataagaacaatgctagcaatagttacaataaagaatccagggactgcagctactgagtgtcctaaatatagctgtggtgcatgatccaagtcctagttctgttacaaacaatgggaattcgaaagagtagactgcttcggaatggaaaaaaaaatgctcaacttgtacttcattgctgaaatgttcatgtcagagaagaaattaacaaaatgaactcaccatatgaatgatgctcagaagttgacgggggaatatgagctacggtgaccttgagaaggtcccctgaattttcgcaccagagatgcaaaaagactctgcaatgggaaacaaatagaaatgttccagtcactaattattatagagaataaaaataatttataaaaaattgaaagtataggattattgaaaaacacggcaaattacctgtgttctttgtggtatactactccaaaactctaagtttggaattatctacaaaaaaaaaaagaaaaaagaaaaaggaacgtcaaacattgttagaagtagaggaagatgaaaaggtgggaagttactgggtgcagcatggctagtaaatattaggacatactttcattttccagaataatgtgagaaaatgcataactctcgagaaaaagcattcccctttcaaaattttatgtggtatataacaaaaattcttgaaaacttagcatatatttaatactgtgtatcgacatacatctatgccacgaatgccttggaagtagcggtatactgtaccaaccagcagatatgctccaaaaagacatgcagaactgagaccagacaaaaaaacattagttcatgcaaacagctcggtaaagaggtaagctggatagttgtaaaagtaaagctcatacattaataagaagaagctaaaccagccccatcctctcccatgaatatccacaatctcagcacagccagaaggatgtctcagcactgtagcctgtcaaatcaaattataatggaaacagtgcaaagtgaaaaacatgctcatttggaaaactttattccatggaatctcataatctctattattatgatgcgcatcccaggcctccaattaggttcacttatgctagaaggggtaaacaatgtaaaaccaatgatgagttggcataggaaggggtattttggtaaatgttaataatggtgagctggcttttgtattgagggtgagtgtttggattcagtatgcaatttgtaagagaattctcttctgcatcaggggagagctgccttggctctctgccttttgagggaagattgactctagtttcattttaatcaataacagctcccatattacctaaatccatctgtgtttactgttttattactgttactgttgctggttattgttgctggttgtttgaagttgcagcaggtgctcatcatattatc

SEQ ID NO: 14872 - DNA, 9998 bp, Cannabis sativa
gattggattggatcgtgcgaattggattggatgtgcgaattggattggatcggatactttgtgaacacccctacttagtgcataaatttttaaaataaaactcgttagtacaattgaaagctatacaatttttgtgaaaatgaaggccatttgcttgttgtgcccaagtcaaagtttgcgaaagctattgaaatttaagaagcgttaagctggatcaagacacaacggtggaagaggatgctctgaagtctgattgtttagttatagttcaggcaactagaagtagtttttctttaatttctccattttttttaatggttaatgattgtaagaaattacttcatttgatgattggcgtcttcttgtatttgtttatcggttctctgctaactagattgttcatagttttgctagaatatccttttttttttatttcaaattattcaatatgagtaatgttcgtactatttggttgtttttttttttgacgatatttctatgtagtgaagaacttccaatcaaaaaaaaaaaaaaatataatttttaggaccaatatagaaatgtaatattctaatattggataactacacaagcagagtagtatattgttgtaaaatttctacacaagcgctctgcgtaaattttcagtgtgtcaaagggtatatattttggtagatgcttaggtttctttttattttttttttgaaattatatttagttaatgtttaccgagattttcaaaaattgaattaataatagattaagttaaaaggaaaataattcaaagatgaaaaagacaaatatttttacgtaattggggagttaagaagtcttagttcatgagtcaatattattgagctttttagtatggagtatattacacaagtgttcttgtcaaatttctatagagtgtctagctaattttttttttttataaccctatgcatgaagggttaaagccctatttataggctaaagttgggttctcgggtgaacctggacccgttagggtcttcataaagaaataagcccattgatggggtaaaatatattataacattgactttaggccgagtaagtgaggcccaatttgtggggtaattgttttttatacggggtcgtaccacttgatggtgacaggtgggcgtgcaccattaatcacatattgaatgttagagcagtggacgttgagaaaaggtaatttactctattttgttttgtgccttttcaaggtctgacacatgggacaaaccccttgtcttttcgggattctatcagagatttgccacgtaagttgatgttcacaaccaatacaggtgtcggacatcccttcgtatcgcgtatccggagactgtctataggtgtttcttctcttgttgtcgtgtatcattgtgagactttcgagggtcatttgacttcgggtctccagctttaggtctccaaattcaggtctctgggtccaccaacagttgacatccaacgtgaattcgccttcagttttctgagttcgctccttgatttggaagatcttcccccaagccaattcagtcgggccttctaggtgggcccaacttctaatttgggccttgggtcagttcatctcttagatacccaaaaacacggataacatttatccctaagcctttggggcttgagggtcatggaggcttgctatccagtttttggtttacgaccatttgcagaggcataaatagggataacccttttgtacccaatttgaactcatggcggttgcatattagacccttgctattcctttgagggatacacgtgtccataggtgagtagttcgtgtggattacacaagtaaggtgcttgctgtctcaaagcgtgaactggcgagtgatgatcttgacacattttccaaggtggcattagtttaaagcaagtctctttggttctgatgagaatttatgtggtgtgcttccgccttcccccaatcgttggatttgggggtttgtgttttgttagcttgaagtaaagttgttagatctaagacacatggatcccttccctccttataaatatttaaggatttctgactaactcatttattagccatttcaagttacctgagctttaagagaaagagagagagaaaattttcattgaacccaggatttcattgcaggttgatgtctgacgcttacgacaaacttcaacataaacttcttcttctccaatccagactttttcaaaatacacttcctttcattctagtagccgtaccagcttcttctgacttttagttggattttgacaaattcgagaggagtttgcaagattttcaggtgaagcattcgacacctatctagaatttggtatcgccaccttcaaacataacatgtaagtatttcttgccaactttcgtattgattttgctggaataaggttgttgggtagtgtacttgataggatattgccatgtatttggagtttttctagcacttgcatagtagcaccgctaagtagggaagatttatcctttatgtttgcttgagaagaagatcctcggattaatgtgaacttgccatgcttatgtgaattgcgtatctagaaaacttttagggcttttttttttcttttcctgaaccacatttgaatgactattaatctcatgaaggtggaaggtgtctttggggcctattcaccaccttttccctcggtctgggaccctcttggtcccaaactatagtttttatttctttattttattcttgtgttctcaattctattacccgagagaggagcgtaccttgatatagggtctagttgagacctctttaagcagttattaaggaggattctcccgtacccttaataatttgtttcgattagggtattaactacttggtgttcatttctttcaaattaccatcatgtcatacagtctgcctgtggatgaagatgaaagcatcattaaggacagggatgatcctcgatagaatgttaacatcctccccttggttagggacaaccctcgggagcaaggcactagatgggagatagaagacattgtcaacaagttccaaaactatcaaatgctgcagtagctggaagacaagtggagcttcctaaacacatcgtgtcttttttggaatagactgtcatgcaagactgagaagggtagatgcaatatcgacggtttcagcgcatggagcgcctcccacatcgctggagcacaccttcctctccaggactacttcaccaactctctaacatttgttaggatagcccctttccagttaatcctatagagttacaagcttctcgcgggagggtatatcttttacaaggagttgggcaaggatgagcctcgttccacaaaggttctttacttctatgaattaaatatgctcttttgcaagatggcccatattagggatggcttctactgcctcaaggtgtagagtaaaaggtacaatgttctcatagttcctagaaccaccctccggacatgagggaatattggttccttaccttcgtctttccactgcaaaaggcacccaactctggccctgaaattcctgagagttggtaagttttgtttgccatttttgtttttcttttgtctttaatttagtgcatccttcctaactcttgcaatgatccaatgttaggtccgtgcgaacaaataatggagtcccataggattagattctgtgcagagttttatgccagctacaccatggaagatttggaggttgcttgtctagtcacaatggccaagctaaggaagttggtatgattgcaaatcactagtccatcaaaattccaaagttttatggcatagttacagaaatagaggagattttctaggggatcatcgagattattgcccaggaatttatggaggaagtggagaaggacaagctccgtatgtaaaagatgaggaggatcgagagatccttggagaggacgtggggatcgatatccatttttgagtgatgtttcctaatggtggaactctgggagccagaacttcaagagaaggtaaaaatcccttctatgtaataaacattcagtttctggaggattttttgtatataaaacaagatgggtttggcccatattttgtaagtttcagtccttcacattatcctatccagagacacttgctttgggtggatgaaattctagaaatccgcacacgtttcatcactccttcccagaaaattagggtagaccgatttacacatccattatctgaggttcttccaatatgataactttttagggcgcaaagatataactaactttgccttagaaaacttggactactccggttccaattttgaggcttgatcccagatcttgctttctatttgtctttactttataattattatcatgttggtctaactcttcctcttttgtagtgacgaatacaataatgaaggaggtccttgacctttgtgtacctattgctgcctagattaacactttgaaggaagaaaaaggccctgcaactaagggagccaaaaggcaaggcttttagatcccaaccctaaagagtggagagagtctggaggtgctagatcttccaaaattaccgagaagctttcgaagccaagcgctatggtttcaactattttgatttaacaagttgctccatcaggggagcgtcaggttactcctacagttgctgcagaagaggtcataactctttgcgaagaggaggatgaagattgaaccattaaggagtctttcatctggaagagaaagtttgatgcactcgagaaagcgaacatgaaggcaaaatttgctgctttggcggtcaagaggaggaaagaacaaaaggaacaaaaggagaaaccgccagctgagtcttccgctagtaacccaggcagattctttggtgaagtttttaaagatagtggcgtgattcttcgacttcccaccaaagctaaattgatcaaagaaggaggtgaagttatagtagatcagaaaacaaagttagtggcccaaatctaggacgaaggtcgtaatgctcgcgatctattgtcttgccatcttgccaaagctaggaacaaagagctcgaaacctatcactacttctaaagcattcgaaacagattattgatgttcctgctgctactacaaaactcactccaactctagggagtgccatgggcgcctttgccgcagatcttctgtaccaattcagaagcaccttagcagaggtacaacccaagagatatgcaacttctttcagtgaggatctagttttcctcacatgatctctttgccaccaaatatcagcggtaagtactaaacttctcttttaatgaggtatgttataatttttcattcatttttttgactttaattatttgttgaaataggatgtcctattagctcacagagccacagacgctgttgctaggatgacccttgaattggagactatccagatggaggataatgcaactattagtcaaagggagcagtccttgcgaagtgcaattctattaaagaggagcaagacacaaccaaaatgaccttaatgttgagctagaaaagtctctgacttctcgtactaagatcatgaagatggagaataccaaccagaagcaacagatcaatgacttgaagattaagcatgcaaagatgaatggccaagtgcttgccctttagggagccctttgctaggcagacacagatttaagcaagaggcagtaagatatcaaatttaagaccaaccaaataaagtcttagaggaagatgtccaagctgctattaacgaaagggatagagcttattcggctgagcaagtgctccttacttaaaacaagcaacttaaagtagatctcaaggatgccaaggatgaagcacatcaagccatggacaaattaggagacacagagctggggttagaattagcctttgaaactttttttctttcttttttggcaagcagaaaagaacacgatccttgggatatatggtaaagaggcagaatatatgagagacaagttcgggaagcgagaataaaaggaacttgcggaggaagctgcctgagcccaatgtgaagctgaagctgctgttgtagctgcacaagcccttctggaccctaatgctgacatcaatgcccaagtcgatcttgatgcttagcccttagctttatttcctatttttctttatttttggggacctaggttccccttttgggtttacaaagacaatgatttagcccaaggaggcttttaaaatattataatattgactatcttttggtgggttcctgaggaccatatatataccacttttcatttcttagatatgatttcatgtttctatttcaatcttatacatagttccttttctaagatttttgttaaattatttacttgcgaactccccgaggctccgattccaatggcccgagccctcagacttagatgtgcacacattttatccatcaagtttagaatagaaatttttacaaagttaatttacttctgattccgtgaagttttggttccgatggtttggacctcttggtctttaatttttactttttcttttaaatttcctgactataaaaatttaggggatgtttagattattcttgcattagcgtgtttactgactatttgcgtttggtaaatttagtttttagtaaggtgcaagtttttaatgagtatgttattgtacttaatgacatttttcatgtttggaagtccttatctagtatttttatttctcattataaacgagttaataatgctctaacacattctttagctgaattggctctctcaatagaggattctcaagtttggtagtcgggtctcctgcctaatttactttagtttatcatacttgtagatcgtttgatctctttgactctttgcctttttaatgaaactacttttttttttttttaaaaaaaaagctgttttcaatttttaaaaactgataatacaattgtgctcttgcaaaagatgcaaattaatctttaaagaacataattattaaatttgtattgaaactatatgaaaaaagttatttaaatgtaaataaaattttaataaaaaaaagtcattaattagtggtaaatggataaataaaaaagttgacatttattaaatttagttcagactatattattttgtgttaaatttaaccaaatttttaacatgtgctaaatttgacacacctttttacactacaattgaagcttcatttttcaaaatgttctaaaatataacaaaacatgtacaagtgcggtttgttcggactctctttttgctttggcgatcagtacttgaaaggtgtatgctaatgtctggagtttggttagacaacaacaatttttattttattaatttgtttaattgcattttgaagtattataatcttattctaatagaatgactatttttttttttatcattttggtagaattgaaatggaaagaataacgtccattctaatgtaagatgataaaaattttaatagtctttttatcatctttatgcattttaaatttgattgtattctatttctattctcattctcattcttatgtttttgttcactacgaaaaatcttacttttagttgtacaaatgttgtgattaaaagatatgtggctaaatttattagtcacaaaaggcacaattcattgtgagtaaatatatttttaatcacaatacttattgttactcaaactaaattaataataaattgtatctaaatattatattttagtcacaaaattattatgtgattaaaaatttgtcactaattaattttttagtgattccaaaaaaatagatcatcattttgttaaaaaaaattatttaagaagtgaaaaaaaactttagcatgcactacgtatatattatatattgttgagaatcatgaggttccatctcaaaattaattagtaatgagtacagtagcccatgttcttatagatgatggctattttttgctcatcaatcttgaaccgtatcagaggatcagttgcccgtaagggatatgctcctgataccatgtcaggaactatgaggttccatctcaaaaccaattagtaataagtggagtaactcatgtttttatatatagttcaattctttactatttattctatgtaagacaatgtccacaaataatatattcgattggtatatatatatatatatatatatatatatcacatggaagcagaaagactatataacaattatataccattataatattattcttgttgtatacatacaaatagatcaaagaatcaaaaacaatattagaagaatatatattatcatcacaagatttgagacaaaataaaaaggaatttaatgacctcacctaacaaaattaagtgtgatagtgtcggacttgtattctgatcatattactgaaaatgacaacatcttaatatttcatgaatatctatttaaatagattgaaaatgacaactcaaaaattcatatacatatatgagtcataatcataaataataaataatattacagtactgtatactggaccatataatgtatagcatgtaagaatacaatgcaacattatattagagtcaactgtaaacgacaaatgaaagttaattataagtgatgggcaaagctatagctataataatactacatccccaccttaatttgtctcacctaaactactttattacttttatcattattattgtattttttatcattattatgggatatggtaactctatttgtttgtcatgatatataataccaaatgagaaatataagaatagtggaagaacaatattatcatgatgatatattctcgatcgatctctagctaataattatattcttaattagggttttatctttttttctcttcttgttttggccggaagtcaccgttgttgcttggaaggattagggttttatgtcgttggcgttgaaaggatcattcgattttggggtccaaaggagtaacaaattactaggagtgttcaagacacaatctaattcgcaaagtgtgaatatattcactaattaatgcatattaaattaataaaaatgttagaatttgtacatgtgtggcatgggatgcacttttgatgttgaaagcaacaaattcaatcacagtactttatgtgttaatggtcatttttctttcttatttattgcaataaacattgttatatatacccatttctcaagcagtaaagtaattgaggatatctaaatatatgacacatgtacaatgagtataataaagtaaattggttaacacaaaaactgagatataatgaactcctcaatatatgaagttcatgcacaatcttctttaggtaaactgagatatgcaacattaaatgcgagatgattaaacacactcacaatatgaaattgagagtgttaggcattcaagaacattttgatatcaacattgtatatgtcgaaaggcttaacttacttaaacttgttcctgctcatcacctcgggaaatatatataattaaagtcaaggtgctctccgaggagtatgccacccaaagcgcgcacacatccaagtatcactaaattttccctagtgactacacttttaacaaccaagtgtggcgttgatatgccacaaaacataaagagtcaaacatagtaattatgttaattaaatgaaacctaaggaatgttcacgattcataaagagttatgtagataagatcaaaggtaattgctatcttaattctataaataacaatgaaaatcttgtaaaggcagacacaatttttaacttaagaaaactctgttaaattataatctcaacccaaacatacttataaataatatagactcgtatgtaaattttaactacaaaactatataattttttttatcttcttcattatattttacagctaaatatatataatttattatattattaatttcaagcattaattatcaaagtcttatgaatgttaacgaaattttgagttaaactttttttatactaatat

SEQ ID NO: 14873 - DNA, 5568 bp, Cannabis sativa
  modified_base (5541)..(5543): a, c, t, g, unknown or other
ggacagtctgagaagtagatgcactttgtacagctaaaagaagacaggaaccctagaattattcttttataatgaactagagatgccttgtcattttgccattactgtgatgaaagttaatagcgccgaccacctgctgtagacaaaaggacacggcttggtttcttgcctttctttcccaattcgttcatcttcggtgcctctaagctttcaacggctttgtctctagatattacattagcgaacgacagtacaccggtgtttcttgaacctgcagatagcaaaaaggtttgcgaaaacagcattactacttgaaacaatatggttcaatcgattcataatccaagagcaaaacagtttaatatgggacattgataatgaaagttaatggtgcatgcatataattttaacctttttgaaaaagagcattaagctcccaacctaaccctaaccctacaatatttcggaactataaaactatagcaggttgagggaatcgaactgtttgtgggcaacccttaatgagtcatgcacatagttgcaactcaatgacaatcgtaaagtatatatagaataggtagtcatgattcaaaagccaaaagtattgttccatagaaaagcagctcttgaaactaaccagcagaagaagactcggttgtcgcaaggttttcaagctgagaactaatttcctcaatttttagagatggagaatcatgcccagcagcaaaaccaagcttcgtaacatttgaaaagagcctccgttccccaacaactgaagtgcttgatgatgccacaggtgaagttcctagagctgatcgtaaccatggcaaaacatataaagctcagatgagattaacaggaaaaaggactgaaaatgaacatgcaaatcaaaatgcaaggaaaaaaattaactgtacattaggagagtcgagaacattttaaaagtctcacacatctcataaaccatagcagacaacatgataatgtacaaggcaaactaatactgatctttctctttcgcaataatattttcttaagacatcaagaaatcatatgattcctacatctctgggtagaccaaatagtgatgataagattaccttcaaagtcatccatggagaaaataggggattcatcacgagatgactgcacaaaactagaaaatataggcattgggccctctacagcagcttcggccttgattttctctttccgctcctagaaataaacaatagcatattagcaaataataaaagtacatccaaactcatgtttgatgcatatattaaataccagagaacaactacgacacagaatttttttttctgttaataaaatgaacaatacaagaatgtggatgggcacaaacccaatatgtcactacaaacctaccatgtactgtacatgatcaatcatgtcaaccgaaacagtacaaagaaatacatattaacagtaaaccataatagaaaattctaatgtgctcagtgtgctggcctccctagaggttttgaaagtttaacagtatccggtgtatgtttcagttatgcatgcaattatgctttcttccagtgaaaaaacatgctgacccacgcaataagaggcaaaatttgcttctatagtcaacagaaagcaatatcaattagttcagcaaagatgaaaacaaatctaagtttagactacgtttatagagaatatagtacacaagtgtaatgataccttgcgagcaacttgcttcctttgctttgcacgtttctttatttcctcaataaagggaagcatggaatcagggggtaaaagctcgctcaaatcgatttcacatagctgaacaaaacttagtcattagaaacataatttcaaattatatatatgaataaacgtgagaaaccaattaaaaattttactatattatataataactagtgccaaggtacctgaaaagttgtagttaaagaaaaatggctcaagaagcgaaagcgcctccttatggcttctgactgagtcactgtctctaattgcaagatcttcccagaaattctacaatgaaggaaattgaagatcagaaaattaacacagaaataacaccatggctaattacaaaatctttccaaagattctgcaaaataaaaaaacatatatagttcatgattatgcatgtacatgatacttttaaaacagaatatttagaaaaatcgggcaatcaattactggcaaaactgttactgacacatgttaacaaaggaaaagctacactttcaattgatcatttgaattacactacacagtaggcccattctagtaaagcctttggataagatgacaagaactatcagtcatattgcaaaaacagaaatcaacgggcacaatggaatttcaaggggctatattgcagaaaacaagaaaaattttatagcaacaaaacctgtcaggcagcaaatcggcgctcccaaaatgatgtagaagacacttcatatttattgggtggagaatgatgtgctgaccatcagctgcctaacacagacagcatcagagtatgaatatcaatattacacttaacagtgaccaaagaatattgaaaccaatatatcttgaaaaagtaaggaatactacattaataaatggactacttcaaaatctctcttttttctttctttctttccttttttattttttcctttttgagaaatcaaaatctagttaaaagcaaatatgtaggacgaacacttgttagccattttttaatgtttaaaaaaaaattcaaaattgcacattgtgtagctaatattaccatcttattgatcagtctaagatttggaacctttattttctatcatattttgcaaaattcaaaatgtagagccacaaacatgatgaaaaatgagagaaacatctatcattcagtcacctggtaaaaattgtaagaatccttctccttcacatctccaaagaccttcgagttcctgtcattgctttcatcgtacgaagaagataacacaacttcttggggccctaacgattcagaggcatcagcagggtgatcagaacagatctgtgcatctaaacaaacctctcctatattgtcaaaattcttatttttatcagagacctcagtagacaaagtatcagagactactaaatcactgttattttgagtagcatttgcaactggctgtgtaacatatgaaccagtattccgaccgaattcagaagatttaacattatcagatgctcggtgctcatcccaatatttctttctctgttctaaatgttccattgcagcacatacatatggaagcttctctaggtcatcaacaagccctgcgtctgcccttactaaccaaccgtctagatcagaaattgcctttctgaccgacagatctacatctgatgtaaatgtaaattttgaaaatggatcataagtttcttcagggctacctacgtttatatctttctcctgtttgtttttgtgggacagcatagaggagtccttctgtctagttaaaagcagaagctctaccttatcaccaaccctgtactcattaacattctcaatgatgagagtatacaagtccttaggtgatatcataacaaaacataaaggacatcttttccagcaatcacctttcgcatcctccttccccattaacaagtactgaagaatacatgggaaacaaaatatatgtccacatgaggttatctggggacaaagaggagattccaaacaaattggacattgaacagtagacgaggtagaatatctcaagcatataatgtcctcccaccgtaacattttatctggatccattgattcaggagtatagtttccagaatctagcaccacaaatttatagtttgcctgaagaaataaatctttattgtaaggctttatcttgtgatgtcttcttggaggaggagctcttggttgagaacgagaaatagggtcataatggaaatttaacaagtgattgccactcgtgacttgagcttttcttcctcctgaggatgcagagcttccatgagaattaacatgtctagaaacttgttgatttcgaggagaaacagtggttcctgagaacttccctctaccctgggctgatccagctcctcgtcccccagagcgactctgggaatgcacattgggcatttgatgagataaattattgtctacatttctccccaactcagttacctagaaaatcagaattatagaatgagaacatctacccacaacaagaagtagactctgtaacagctaacagacccaacctcaaataaataaaatggggtttgcacccaaaaagacattcttccaaaagaaaacagaaccacattcatacaattgacaccgatcatatatgtctatctattctcacctctttggaaagcccaccagaatctcgagtgccagagacgaaggggcctgcaagtacattgaacatataatataatggataagcatttcaccatcgacaaattcagtagctaaactaggtgccaactttctatctccatttcaagacttaaaatttcaatcttccccaattcagctgacttcaatttacattgcccaatacatacatagcatgctagtacggtataacagtcgatgaatacgaaattgaagaacgccaaaagcagttcccaaaaattgagctccgacactctagagttcacactcaatgttcaagacagcaaaaattccaagtaaagaaaaaaaaacgacataactaattaaactgaactaaactaaacaaacaaaacctgaattgtttcccacaaacataataagccaaatttctatctccatttcaagacttaaatttcaatcttccacaattcatctgacttcaatttacatttcccaaatgcataacatgctagcacgcggtacaacagtcgcagaataagaaattgaaattgagctcctccgacattctagggtttcaaaattccaagtaaagaaaaagcaacgacataacaaattaaacaaaacaaaacctgaactttctggcgacatatcgttgggaggtgattgagagtgagagtgagagtgggcgatctgaagcgatccaaatgcgtggaattggcgggagggagattgagattgagattgaagtgaggatgagaagaaggttccatgattggaaggggtagggtttgcagaagagggagatgaagacgaagacgaagtggatccttgggctttgtcaggcaagatggacatgaaattgttcgatggtactgccacccttctttttcgttctctctggtttcgtcttttcaatttctttgcttcctccctttctctcttttctccttttattattgccttttctttcgcacgctttccaccctcgcacgtgttaataaaaattatttatttattattattttaaagcataattagagcatcttcaattatactctattcttttaacattaagtaaaataataatttaatagtgaaattgatgtttgtgaatcttaaccatgaaaaatatcaaaatattagctatatagacttaggtggcgtttggttggagnnnatgaaatggaatggaatggaaagga

SEQ ID NO: 14874 - DNA, 3014 bp, Cannabis sativa
  modified_base (2955)..(2959): a, c, t, g, unknown or other
atacgaataccattaagatggcagagacttgttggtattgttccataaaaatgattagaatttagtctaaggaaaaccaattgttttagcatttcaccaatccacattggtatatttcctctcatgttgttttctccaatatctagaaatagcaattgggtgcaattcttcatagaagatggtaaaattcctgacaaattatttttgctcaaatcaagcatttgaatttgatatagagatgcaatcgagctcgggatcaatccaaacaatctgttgttgaacaagttgaggaatttcaaattttgaagatggaacaaacaatgaggaatgtttccaaataattgattattggaaagatcaagaatttgtagattatgatgacttgataataatatagagcaaaagagaggatggaatgttgtgagagtgttattagaaagatataaggcatttgctttgaaaagagaatttggtgagacagagccatgaaatttgttggcccttaaatccacaaaagcaaaattatttgattttagtttaatgtcaggtaatgtgtcattgatagtgttgaaagataaatccaaataagatagtttggaataagtttgattgaaaaaccaaataggaatgatatcagatattccagaatcagataaatctagaaatgatatatttgtttgtgtttgaagccatgaaggaaattgtggaccaatcatacaagatctcaaaccaagatgttggagttggaaaggaggaacccaattggtttcaaatttcaaagttagaaaatttgaagataaatcaaggtgttccaatttggacaatttctcaaggtgtgtttcaatgacaattccagtgaaagaattcactgaaatatctaataactcaagactagagagattgctaattatactttctgcccatttgacattgaatttattgtgaaatacatctaattttctcaagtgtggaatctttgaaaaataatctttaggcaataatggtccacttagattgttataagacaaatctagaatttctaaagacttgttattgcaatcaatgaggtttttcaagatatcaatgatggtggaattgaattcattcccatacaaaactagttcttgaagcttacaaagactccctatcgatttcggtatttcgcctctaaattgattccattgaaagttaaaacgccttaaagatttcaaattttcaaaggaatctggaatggtaaaaacaggactagctttgttattataatttagtgagagatcaataagattattgctcaaattaagcaaatgagaaaatgttgtggacccaaatatactgtcagacacatgaagagttgtgatagaattggtggaagaatttgttgtagtatgatctaactctggaaattgacaataatttaggtgtaaaattgataaggaatgagctgttttaaatgaagaaaaccaatctttggcttcagtgagatttgtaccacccaatttcaagattctcaaattagtgagatgagaaatccaattgaaactcttaatagtcaaattagttccaaagccataatcatcaccaagatcaagaacccgcaacttggttagatttccaagttgtgagggaatatttccaacaagatgattatttgacaaattgagatatttgagatttgtaaaacttcctataaactttgggatttcatagaaagcattgttactaagatccaaatactccaaatattttagtttgagcaaagaagaagtaatttgacccaaaataggatacagagttggcataccatgatcgtaggtaatatttggacgaagatgaagcttgataatatgattggttaagttatggcatctgattcctctccatgaacaacaatctttgttattgttattccaagatgataagacattatcatgaacatcaaggccttgtttgaaggtgagaagagcttgtctctcactttctatacaagagtaaactccatgatcactagtactagtagttgtggctaccaaaaacagaattgctacaagtaccattttgtaatatctaaaattcttcttattataaccaatatgcaatattgatctaattatatatagatcgatatttatgtgtttaataaaataaatattaaattttggaggaatattaattacaacctcttattacaatatctaaaattacatgccgaaatactttttatcaatttttttcatagcagtattcgttatagttacaatatcatttttgtaaatttttgaaaaattatagtaccgaaaacagagttcctaatatttcagtttaccacgcgcgtttaaaaaacttcaaacgtattttcgacactgtaaactattcgaaaattttaaaaaatttacagggatgatgttgcaagcaaaatgaacacccctatgaaaaaaaatttaaaaaattattctgacatgtgttttcgagcgtggaggttgactaaaaagttgtgacagaaaattgaccgtaacactccattaaattttatatttgttgtgtggccatcattgcttgcctggtgcgacaaagcgtgttgttattattattattattataacaaagtgtgttatctagattgactagatattaaaaagtttatatatatataatatatatgagaaggaaggcagaagatattgaacctttatttaattaagacctaacaaagcatgttataacgaagaatatataaatagaatatttgcggctaaactacttgaattttacgttttgtaacacataaatacataaatttaattttttacagcaaaacatcctgaacccccatttcattttgctctgtacccttctatccgaaaatcacatttaagtatcacggtagactgtccgcgtgtacacacttatacacgttgtaaatttttagtggtccatgtaatattagttttaaaaaannnnnataaatatttaaaaaaaaaataaaaaatcagaaagaaaaaaattattattattat

SEQ ID NO: 14875 - DNA, 7647 bp, Cannabis sativa
  modified_base (6643)..(6649): a, c, t, g, unknown or other
gaaattaatggaaagatttgaagaataaagagaattatgaaaattaatagaaataatttgagatttatagattaaaataattcaaataaatagatgaattagtcatacataaaattataaataatattttttctttggagtatgtatttgaagcttctttatgattgtggaattttttctgtttcgactactatctttttaatctctagttttttttttttttataaatatatttatgtatagaaaatttatattaaaaaatatgatagatagttcacataaaaaaaattaatagaatagaaaggaaggaaatttaggaaatagatatttaaataaaaaagattagaaaaaaaatgagaaaaaaaaatagtactttctaccaacctattattttctaaaaaattttattttctgttgtgttttggaagaaagaagtatatcatcatttactaaattgaagcaaccccatactcgattttatcgttttatcaaagtgatcctaagtcaattcagaacttgaaaaacacgtgcccatctactttggccgtcttcacccacctggccgcccattcccgccgcacaatttctttcaccaaatactcctacggcgcacgatagccttctctgtctctctctctctctttctcacatgtaccactcctcttcttcactacactactcagagacgaaaaaccctaatgtctctctctcagccctaatctgaattccttactgaatttcattcaaccttcaccttatttacgattttcactgaatttgttacaattcgaggtgtgggaagatgatgggttccgagaatcagagcttccaagaagctcatctctatgcctccaaagaagatatggaaaatctcgtccttgacgactccttgaatggcaataaatcgtactcaaattatcgtagtgccttgtcgtcaatttccgattctcaccatcctctttccgctccggtggttgtgacgtcagtcgattccgatcccctgcttgctcctccatcgtatcgcgatttccagaatcctggtcctgccatcgcttccgccgccccggacaactcctacctcgaccctccgtcttatgccgatgttatttttagcccctttgatggaaataatttcaacgacgctaacggtgtcgatagccccagcaagagatcagacaattcggggtctttttcgagatcgtcatcttctaactccgaatacattaaaataacggtttccaatcctcagaaagagcaggagacttcgaattcgctcgttcccggaggcaatacatacgtcacttacctgattagtacgagaacgaaccttccggacttcggcggatctgaattcagcgtccgaagaaggtttcgggatgttgtgacattgtcagaccggcttgctgaatcgtaccgagggttctttgtgccgccaaggccagacaagagtgtggtagagagccaggtgatgcagaagcaagagtttgtggagcagagaagggtggcattggagaaatacttgaggaggttggctgaacaccctgtgattaagaagagcgatgaattgaaggtgttcttgcaggttcaagggaagcttcctctgccgacgaccaccgatgttgcatcgagaatgcttgatggggctgtgaagcttccaaagcagttgttcactgagagtgcggtagcaccccatgaggtagtgcagcctgcaaaaggtggaagagatttgttgaggttgttcaaagagctaaagcagtcaatggccaatgattggggagcttcaaagccacccctggttgaggaagataaggagtttatggagaagaaagagaagatgcacgacctcgagcaacaactcagtttagcttcccagcaggtaactgatattttttgctcattgcatttgcagttgcttgaactttttaatgtcgttaataaaatcatgaatggtcatttgaatttttcttcctcttatgctgtggttataggctgaatcacttgtcaaagcccaacaagacatgggagaaacattaggagaattggggttggcttttatcaagctgactaaatttgagactgaggaggctgtttctaatgctcagaaagtccgggctgctgacatgaaaggtctcgcaactgctgctgttaaagcaagcagattctatcgtgagttgaatgctcagactgtcaaacatctggtaattgtgactacttttgccatagattatttgtttcatttgtcttgttattacgtactttatttgataatcggaaagcttgcttattgtatcagtagttgaatttcatttgaacttatctgcttgcagtcatcggatttatagtaactgaacatttgtagcttttgtttcattttctggctttattctcatcaagagtccttatatgtattgcaggatacacttcatgaatatcttgggttaatgttagctgtcaacagtgcattttcagaccgatcgagtgctttacttactgtgcagactcttttatcagaactagaatcattgcagtcaaggactgaaaaacttgaagtagcatcatctaaaatatttggtggtgacagatcaaggattcgtaagcttgaggagttaaaagaaaccataagggtcacagaggacgccaaacatgttgcaatcagagaatatgagcggatcaaggtaccatgtactttgagtttattcattttatcttaattcagcctttttatggtaatttaaactttcatcttaactcagcaaagtccataagttatgtatttgtgttctctattgatgacagttctgttttaccttagctgaactttttgtggggtattacactatacttatttatcttaatggaaacatgttctggttatttctcattgcttctttaattgaaaattccttaccttccatttttcgagagaacattgaaagaattaatttttcccagcttattactgattaagctgcatgcttgctcacaatttgaagtatcttggcttcaagatactctgcaagcaaaactatacaaaagccttccctgaatcttttttttctatgtgacttgtgatagtgtagattatttgagggtttatatatgattgaatcgtgaatttctaaaggtttgactcttaaccagatgagtttattgatacctgggttatagaagaaacgtattttcattcttaggttttaggttcactgttgagaatttgtaagaagaattactgtataaagctgacttagcttaaaatttaataaacaactggctacccgtacttgagaatttgtaatgatgttcagggatttaataagtattataagaaagtgggtgtaaactgattaaacagacccaagaggggtagctcaaatggtgagcatgtagtttgctctcactagcataacaattgctatagtttcctagcccctaatattgtagagttaggtggggatcctaatttaaaataatactaataaaaaactaagtgagtaaacaggatttcacaatcatacattcttggtactatttgcaattgttttctccctctttgatacatatcttacatgtaaagaaatgagtttctgttcatctttgtcgggatagtgagatgattaaagattagactcggaagggtaaaatttggctgactacttggttgagtgcgtatcttgtatgtcttgtatgtaatagtactttcattagatgggtcctaggtagccaagtaagcgaactatgtggcgttgtttaagagtgtatatatcagttggtttaaatttgaagcaattcctttagtgtataggctagttttgtgctctgtgtgtttggctgttctgtatttcccttaattgaagggattctccgtatctcctgttattttcaatgtggtttttgagaaggatgctgaatggcttgaggttgttaatgttttttttcttctaataaatatgaaatttcattaatttacaagttatatctttgctataattgctagagctaaaaatatcattctggtatgaatataccaattgcttagtgatgtaagggagccaaacctgtcatacttcacttgccataagctatgaataatataaattaatgttgagatagcatgaatatcttcatcctgttcttatatctccgtttgaattaattgcctttcttttatcattcttcaatgcaggaaaacaataagtgtgaacttgaaaggtttgacagagagagagatgctgacttcttgaacatgttgaaggggtttgtcctcaatcaggtcattattattttattttttccttctagtccacacgatcttattcattccttcattcatttgatttcttttcacaaagcagctacctctcagcttattttgtctttagacagacacaacttcactgtccttatgttttttctttgatatgttatatgataaaaacatgggtttttgctatgcaagtgatcatataattatgttctcttatgcaattcttcttgttattcgtctttgttgcttgtcaatttctcacaggtaggatatgcggagaaaatcgcaaatgtgtgggcaaaggtggctgaggacaccagtggttatgcaagagaaagctgttgaacccaaaattatgtaaattcagaagttttatttttatttatttatttttcttttacttccaagttcaaatttttattgatatcccacccaattgaaatagcattacatggaatggaaacaataaacgacaaaatgggtgcacttggttgttctttgcctttctcagtttgtaacagaaagatttatcgacacgtatttgatctttgtaaattacggtgctaccttactttacttgttttgacatttaatcttaaactttgagtaagtgacatttattttgctataaggtattgtgggatcatagactcatagcatacttaaatcactcacacaatgatttctttagtcataaccacaatttaattgggacttggtattttaaaaaatagtgtatattcttattatcaaaatgcaaattcattacttaagtttgaatctgaatacaagagtaagagttcctgtagagcaacatggatattagactcattcgacgatcggagagctactgagagtgcctacagtcttgaatgatgagaccaaaactagaatatatttgcagattactaggaaaactgtgagcatactatctacttcaatctctctacttgctgccattgcatgtctttgacccaacttaaacttcttttaccaccatagcttcaatcacctccacagccagctgcccgtggtgacaaaaagacagttcaaaaagtgcacctgaagcatctctagcaactatcccataatcatacataccatctccttcaaatgtgacaggatcaacattgactaagtgttaacagcgggtttagtccaagactcagcgatatggaatattgccactgccctgagtcttccactgttctaaagtcatccttgctgacttcaccacatcagccacaaaggaggttttttggttccaaataagcttattaggagcattccaaatagcccaacatagcatggctgccatacaaattttattctcatcaataatgtcaaaagtctgagcaaatcatgtaccaaaagaagttgtttgacccgaaatagtaggcataccataccagcatgattccaacaggcagcagcaaaagaacaacaacagagcacatgaggaaatctccacatgtttagttctaaattggaatctagtaagaagacattactgccctccattcaagattcttcacctttggggatatcttgagttgccataatttgtcctaaaaatcagaattattgacacaccaattctttcaactttttgatcttgcaacatacggattttaaaaatcatagtttgtgcgtatattattaagataaatgaatattcatatttagtgatataagtgtttgtttagtattgcactagttgtatactgtgtaatgtgcccctcaaaaattatttcgaaattagggctcttgagcatcaatcaaattaaaattatttcttaattttattagagcagtactaggtgcctaacatcatactgatatgatgcgttttaagtagttaataattttctatattatttattaatcaaattgtgtgagtcgatattgatttgcaccaataataatatgtcacctcttgtagtgcttgaaacattaaagtatctcttagcattttttattgagttaattgcggcaaaatccctaatactttcattttgcttgcacttaactctcaaaactcaaattttgacagccaaactctcaatactcttgttctgatagcaatttaatatttccatctattttaggtgttaagtgccatgttggactgtctatatgtacatctacgtggacatagtgtacacattacacaattttattagttcatgtaaaaaattatttaaaaaattaaaaaaattgtaaataattttttttcttttcagattttttttttcatttaaaataattaaaataaaaaatcattaaaaaataattttttttcttttcttttctttctttctttttcttcttttctcgttctttttttttttcacgatgtctctctctctctctctctcnnnnnnnctctctatatatatatatatatgtctacatttctcttctttatttacagacctaaccaccaccaccaccactacccaccacaactcacctaccaccaccgcaacccagcaccaccactgcacgaatccgacgaagacccaaaaaccccaacgagttgtttctaatatttctctttctcccttgctagtctcggctcaacaccgatgagccacctctaatgacactcgaccaaaataaagaccaatgcagacctccctgactatttaaaccttaagacccttaggtccccttcgtccatcgccgtttaaaaactcgttagagcttctcgactttagtctagccacactgagtcttaggggaccaagtgagtttcaaaagtgggttccttttgtgaagatcttccacatttgaaacttgcagtgggtcgtggtcctggtttagagaagatgaactagttgtggtgatgggatgaaattgggctcacgcgggttggaaaaagagagatagcataaatgatggttggtttctgggcagcgaagagatgaaggtggatgagtttttaggttaagatgaaaaggaaagaataagaagagggtttcgctgagaaggatagtagcaactatggaggttttagggggagaagagagaggtacgagggggaaggaattagttaaaagaatgggtgatttttttttttattttagaaaaaaaataaaataaaatgggatttaaaatgtgtgggggaattaaaagggtgtattgatggtggtggggaaagtgtgagttacagagagagagaagtagtttttggagagaaaaatagtggttatgtgtaacgccctgatcagggacgccacgtgtgtgcttttcttaaaattactctttcattaaactatatgattatataaaaagtgtgggtaatttaaattttgtaattaaaacaaacacataaattttataaaaggtaaatattaatatttatggggaccccttattat

SEQ ID NO: 14876 - DNA, 7209 bp, Cannabis sativa
  modified_base (1768)..(1770): a, c, t, g, unknown or other
taggaaaaatggaaagaaaaaattataaaaggacacatagacactctttgtgctttcctttatattaatatattgatgtgacacggtgtatttaagcaaagtagggtggtatatatcctttaaagtaagtcatgtaatttattctttttgtaggaatatataatatgaactttatcggtgttatatataatgatctagtacattttcttatggaataaccaaattatattacataaaagattagactagagctttgtttatcagtttttttttttaatttatatattattaatttcaatcacacatattattaatccaattaaaaatgggaaaactcaattatagggttaaaggcttggtaacttgtttattagtttggctatagctgtaaaggcttttccaagaatttttgccacaaactaattaacattcgatatatgtaagttatttaactaccttctcctactatcattgctacttacattatttttaagtctatcgctaataacattacttaactgagataattaaatcctggtgaattctatcaattacaatttttataatattatattttaatatatatatatttatatataacaggcaagatataacacgagtctcctctatcagcaaggtaaagccctgagtactataataaaccaggttcccagggtttccgaacaacaataccaaacccccaattcagttgagaagagacaacatcatgcatttaatttacattatcccataataagtggacaagtccaatcaatttttcgacccaaaaaaacaaaagagattatccaacacaggcaaaaaaaaaatatattttttattattctaaatatatagtccaaattaagcagagaaattcttcaaagtcagcaaacgttaatgttgatggtgccttatttgagcatgaaggcgggtttggggttggttgcgtggttgtgactgccatggtcatgtggtggaagctttcaatcggggtctaatggggcgggttcaacctgaaattgctgagatggttggcataaaagaaacattaagttggatcaaccgtcactcatggggacaagtgattttggaatcagatagcttggtctgcatacaagctatacaaaaacaaaatctctatcatcttcgtttggtcttttagtgcatgatgttcatgttctacttttatttttaaacaatattgagttgtgttttgtcaaacgatctgcaaataagctggctagctcactacttagtcagtgattcttgtttctctccatggtcgtgtgcttcagttgaaagattgttcttctgaagcacgttctattattattaacgatttgattagttaataaagctactgaattttattttaaaaaaaaaaagataaaaaaaatgtgaagatgagaagttgatcatatactacttgattgataatatttttcctgcattgtttctaagtgaaaaattcattttcaaaatttgtttgtttcactagtctttaaatagtatagggtgaattgttataaatatatggatataacaacttgtaaccatttttattcagtttgtaaatattttatttataaaataatttttttgattattttaattgtcaaaataatttttttgaattgatttattattttcctaaataatttcggttatatattgatggttgtgtttttttattcactacaaataaaattatttttagtgacaattttttaataacaaaataaattttttgtgattaaatgtgattttnnntcacaacaaaatattacttatgactaaaacataaattataaaaaattataaagtgatgtatacactacactatcccttcacaatattcatgtaagaataccaagttttacataaaaaaaaaaaaaatgaataggaactattaataaaattagttggataaatatggtaatttgaattattaaagtagatatttattactcaatttagcaagctaattataaacactacctattggttccacatggtatattaattataatatttattcatctataccacatggtgtaataattattaaacaaattgtatagaactatatatgtagtatccaagattgaaaagtacaaaaaatcaaacttatttcttaatttgacactcgaaaagaatgcctggcttaatatatgtagtagtataccctgttgtaacagctatatactataatgacaattattaactaattaaccaataattaataaaagaaaatattactttaattttactgtcgtctagtacagcacatgtcttggttttcgcatgagtacatgactgttattaaggtcatgttcaagatgcaaaatatactttataccacataattaattatgtgacttccatgtttcttccttctcatttgtttgccaaactaatatataaagaaaaactaatagattatattttcttttttgttcatcaaaagaatcatatatattcaatgaattctttagtacctctaatataactttatgtttaattcctttgaaaaaaaaaactaaaaaaaactttatgatactgtttctgtgtctgcgctctgtatatatatttttaatattttagagtagtgtcaaatacactcacaaaagaatataatttcacttaaaatgatgtagaattactaattttaactacatatttttaaatgtattagtgattattaataattgttttaaaatatagcaatattcttgttcttatattttttagaggaataatctttttctagaaagtcttatagggttgataagttttagtcatacgtttcaatttttaattggttggttcccttaaacaaaaatgttaaatcacaagttaaaccttggatatgagataaattctcccccatagaaagaaaaagttatatatagggtatactttagtactattgaacaactctaaacaaatcacaaatagtcattttcagaaagttgggtgtagggaaggtttaataggcacaatgatcaagattatgacccctctattaatgtgtaccatgtattatatttattatgttgaaataagatttacaccattaaaaataaatttataggtaaaattgccacatgttaatctcatccttcaaacattattatcttaaaactaatgaatcatcatatatctctacatatgtatataacaggccaggtggcgcaggttcttgaggatgacaatattaaagttttgaatattactaatttaagtaaattatgtttgatttgtcatcataatatatacatatatatacaaagtgacataatctcatgtgaaaactctataaagataggtaaacatcaaccttattcaatttttgtttatttatccgtaatattaatcccttctttttatgtctcaatttggttgtgtgtgtatgtatatatttatacgtacactattttgtatcacacgtgcatatgttctactccacaaattcaaatttgcatgaattttttaagcatttatagtttcaaacttattgagatcattaaggtgggggaccatttatccatagacaagttccagtctttcactttaaatcaaattaattagcagcctttaattaggtatatatatatagtatacatatatagagagcaacaaacaacaaaccctattcttatcatgttttcttctttaatttccacaagtaattaatcagtctacttatagtcatactataattatatttaatattatatataccgaccaatttcatctccacgtcatcacttcgtgtagcttacctaagctgcatctttaattaattaccatttcgtataattaattaagaattgttttccaactttgtcaacaaaaaaaataagataaataaaataacaatgatacataattgttgtatgttttccaacttaagcgcgggtcacgatcgagttacattgattttcttggaaaaaaaaagaaaaatgaaaaaagtctactacagttaaatcacttgacaattaagtatataaaaataaaaaacttaatttaacatacatcgaatattaattgattacgtcacaataattaataagtggtgatatattaattaatttataatatggcaaacaaaatttataccatatagctcatcgatcttattatagttcttatattatttcaagtgaatcatcatatgatattaatatttaattaattaaccctagcaacagtactttattaatatataatatataaaaatacacaaaactgaacgtatatatatacacatgtatatacatgcgtgcgctcttatacacacactacacacatatctatgtatatatatataaagcatcatgatgatgatcaagagagagagtgagaggagcaacgtgtctgtgtttggcaggcttagagagagagattttaattttgtttaattattatcgatctatagagagaatatggttgataatttaggcaataatagagagagagaagggtttcatcactacaataattgctcatccgggggaccaagtagtactaccaatattagtcatcatcaggatcaaattgatcatcatgggtttatcaaagagcaagatcggttgcttccaatagccaacgttggacgaatcatgaagcagattttacccccaaatgcaaaaatctctaaagaagctaaagaaactatgcaagaatgcgtatctgagttcataagctttgtcactggagaagcctccgacaagtgccacaaggagaagcgtaagacggtgaacggagacgacatttgttgggcgttagccgccctcggtttcgacgattacgccgagccactcaagaggtatttgctcaagtttagagagcttgaaggggagagatcttcagctcatcatactaataataataccatcaacaaaggtaatcttgatcaagataatcataataatcataatcagaatagcgagttcatgatgaattccaattatattggagcaagtagtagtggggatcatgatcatcaacgacatcttcatgtttcttcacataataataataataatagtaataacaatgcttcactcgagtttaatgtgcttgaaaggagtaataataataactccttttcaaggcagttttgagtatggtaataattaattataagatcagttctccaatctcatatatgtgttgtattattttgattatatggtttcgttgggatattcaaattaggtttttttttaataagatttgtattttgagattacatcttgttttgactgattagtagcttataattaattgatttggagctgaatctgatcataattattaatcgatcatcatcttttatatattgtatatatctcatatatatatatgtaatatggaatttggtcaagtattacaaaatatacatatctaatcttgatcattctatatatttatatcatagattctgtgtatatagattaatatgcagtttgaggatgtatgtgtatataggctttgtaaaattacagtgtctcattcctctttttgaccagaatattatgtagtagtacaaggattgaaatgagaaattatagttcaatatctaagggtttttttttttttttttttagtgtttaaccatgcataacctcggactcgaatctaggacctccaacacataccccctatggtcacttgagctagcctcaagtggttcaatatctaacggtttaaacatgattaacctgcactatacagagtgtcttaaagaatttgcatgatattacaactaatcagtttgagattacttatgagtcgttgagtattagatgttcaaaatattaatatatatgattatttagaatactaattaaagatgagaatatgatttatctggaaattacctataaattgtgtttggcgcgcaatatttagttaaaataattcttattaattggattatattattcaattaactcataaaaatatgataaaagttaatgtaaacttatcaatatgttgtattgttttatgatattgatggaggtatttagaaaccactgtttagaaaggataagaatatcatctattaattaatacagtaatttattctcatatattatttttttttttaaaattatctcatatattatttttttacttttttttttaaaaaaaatacggtttgaattgctcagtaatttttatgtgggttgttatgtgaattttagttgtaatttaaattcctcaattagttactaggtgggtttctataaaaatacatataaaaaaaaactgttttaaagtgtaaaaataaaaaaattatttttttaacttttataaaaataactttatgaacggttagaaattattttttttctacctatatatacattaattaataaaaaaaaatcttttcttttttgaaattaaacaccatgtgtataattatttctttacatattgttgataataagaattcgtctaagttaagttgccaaaaaatctatatataagtatgtattaaaataacaacaatggtaaagaagataagtaattctatttctcaaagcctatattatacaaatttttcaaaataaaatgagggctatttataagggctttattggctctatagtagtgctcccaagaaaacaatttggtactcttgacttatgtgggaggtggtggtgatatgacctaagagcaagtttaatggggttggtattggaaattgcttattaggggtgggtcaagggagagtagtgatgtggaggagaaaggtagagagatacagtgctttgcccttttcttttatttaagataaaaaaaaatttgattagataaaagatgacaatggatccacttaaacaatagtaaaaattacaccattgttgatgctataatgtacccttcctatttccttgtactgccactaaggtgtgtcagcctttgaagacatacacaacgtactcctaacatgtccttagtcgtatttgtcctttgtgttggcataccttactctagaaagagccttcgactatcaacatacttggaaataatcctatgtgtgttcaattaatgtgtaagagattcttctatgtgaggttcttttatggagtatataatagttcacgtctgtgttgtacctccattagtgatagggatgacaatgggtaaggtgtagggatggaccacttgtcactacaacatattagctcatta

SEQ ID NO: 14877 - DNA, 6735 bp, Cannabis sativa
  modified_base (3440)..(3443): a, c, t, g, unknown or other
atccactttcgctgtaatggtaacaattcagtttttggatcgtattgccccttactcccaagctgttaaaaaaattaaaaatttatatgctgaatggaaagagagggtttcctgaaaaagtttgaagactaagggaaagcctattatttctatgatgaaaacatggaaaataggtatataatcctcaaaaaagatatgaagctcaaagacatgggaactaggctattttttttcctcagagttcatcataatattataaaattatgataaatttgggtggcaaatgttatccctaaaaaattcaatgtaaatatgtatggattttgttcaaaatataaaagaggttatcaagaagacctaaacatcgttaaagccaaaccctgggtctcataatgaaagtccccgagtcccatgatcaagttccccgggttccacgacaatggtcctcgggtcctatgaccaaagtccttatgacccatgatcaaagtcctcgaaactcatgactaaagtcctcaggactcatgaccaaagtccccgagactcatagccaaagtcaccgtgactcatgaccaaagtcctcaagattggtgaccaaagtctccacgactgatgaccaaagtcctcatggctggtgactaaagtcctcaggattagtgaccaaagttctcaagactcatgaccaaagtccccaagactcatgaccgaagtcctctggactcttgacaaaagtcatcatgattcatgaccaaagtccccaagactcatcaccaaagtcctacagattcatgaccaaagtccttgggactcatgactaacgttccacgggtaccatgacgggtcaaaagggctgaccccctaagctcatcactaggccgacccttaagggcctcactgctagggcaacccccaggggcctttccactgggtcgaccttcaaagttcagtaagaccgctctcgtggacttgggtccaaatttaaacgcactcttatgctagacatgtgccatcaaagctattctgaaatatctacaacaaagttatctattttcgaatatatttattttggaatgttaattttatcattatttaatattttaaacttaactctagttaggaaaaaagatgtatcaagttaagaaaccttaagccctatgatgtaagactatataaaggctatgaagttaattgtaaatggaccatctctctttctctcttacactctttcactttataaaatcgcttgaggactgaactcttgtagaatataactttagagaaagatcaataaaattacaagtggactagcctattaccaccgaaagggggtgaaccactttaaaaatttattgttcatcattgttaaatttctttacataaattaatttattttgatcgacatccacttgtgttcattttgctcgtttatgatcttcttagatcaattgacgaaaaattgcgtcaacatgaagcgtgtaaattttatttttctagatttacatttatcaattttttttagatgggtttggcaaaaaaaattaaatttggttttcgatctgtgttttggtgttgatggtgtttgttattgcaatgatggtggtaatgttgtaatggtgtggtggtggtggttgagtggtggtggtggggtggtggcaatagtgatggtggtggtggtggcggggcgatggtgatacaggtggtcgtagtatataatggtggtgatacgatggtggccatcataacaattgtttttatctcaacttttaatttattttattaatttagaattttattttttttataatttttaaataactatattaggtgtgtagtaatataaatatatcacatgtataagagtgtacacataagcagtcaagttggtagttaattgtagtaaatagatgacaccttaaatttattaactatttaatagtttgacagattttatcgcctaaatttaagtttataagattaagtgtaagtaaaaaaataattgggagaatttagttgtcaaaaactataatatttacctattaagcaagaaagagcaagaggtttcgaactttgaatttttctttttttttttttaaaaaaaagaactaaattatttattaatataagaaatttttctaatggatcaccttaaagggttgttttagtagacgctttatctgtttcggcattttaaaaaaaattagtctattttttttatgactgcgtacatacgttgtaattatttaagactatttataaatttttaaaaaattccgaataatttacagtgccgaaaaatagtttaaacagttacaattaccacatgtatatatgaaaaactatttttatttttagtattgtaaattatttcaaattgtctaaaaatttatagatagtcttaaataagtataacatacataataataaaaaaaattaaactaaaaaactctcctaaataccaaaacaaatagagaatttatctaaatatttcttaaaaaaaatgtactatacacttacccattaatatatattcaatgattaaatggggcaaaatctcacatggcagcaggtgaaattaaagcaaacatatatctcacaaaaaaattattaaacaaagaataaagcatgccaacttgatttcgatattgaaacacataaatatttgtcatgaatcgacaagacaaattgatacatcaaatttgtacagccattttggttttcgtgtagagtggaataaacacctctttcatcattattaatttcccatgcttatttatttgtattgtacaagtactcccaatagctactatttttttataggggtggcaaaacctgtcacattcgtagcggatcgtgtagtgtttgattcgtttttattttgtgagaaatcgtgtcgactcgttttccacctgcgtcaaattttcccgacccttaacccataaaattcgtgttgtattcgtgttcgtgtaccgtgtggaaactcgttttgccacccctaattattctttagagaggagtgttaaagagcatctcaaattaggtatgctttatataatatttaattatatggatatatttttaatattttttaatgaatgtttagtaaaaaatatgctaaaaaaggcatacaatagcattttttttatattttttctttcttatttgttttttttaattattttgtcataaaataaaaaaattagtcctagttactcttcaaaactaagtggaagacaacaaaaactaaagcaaatatataataacaaatttgaaattgtaaccaaacatctcccattggttattttttaatattttttaatgaatgtttagtaaaaaatgctaaaaaaggacatgcaatatcattctttatattttttttcttatttttttttattattttgccataaaataagaaaatttagttatttaatatatattaaataatnnnntaatattattttaataatttttaaaggtgctgtaataatattttagaacaaaaagtaacaaaaataatgtgaaatagtaataaaataaaaaattatctttttaggtgatgtggaagtttttaacctctttgaatgtcactattggagatgctctactctctatcacactctctagttaatctatgataaatgtcatcttttcaataatgcttaattttacttaataactaattataatgttatacttttattacagtaatctgttaatttaatacctgttctggtattacaaatgtcatctgttaatttaaggcatgttctggtagagataagtggtataacaacaactggaatacgtgtatcaacatctgggataggtgttgcagcaggtagaataaatggaagaaaacattgattatgtcatcctgagatgttagataaagaaaagggaagagagttcatgaaatataacatctctggagttataaatcttgttagtttgaagatccaaccatgtgtatgccttcattctagggggatatatagctaatgaaaactaaagcacgacttcttggagaaaatttgtgtctatcggagtccaaggtagatccataagctagacattcaaatcatctcaagtgatcataaaagagtagttttttttgtataaaagctcaaaagaagtaaggtttttgagtaaggcaaataatgttctattgagcaagtatgttgcagtttgtatgatgtatgatcagtataccagtggtaaatgagattggaacacaaagcttgagccacatttagtatgtgttgatgtttcttttcaaccaatgagttttgttatggtctttccacacatcagtggtcatgagtgatggcttttgaggcaaaagaagatgtgagctcaattttttagctttgttcaatcggataactttaatttttgtggaaaattgagtgcagaccatgttaaaaagtttagtgtaacttgttgagcttcatcattatttttaagcatgtaagtccaagtaaacctagatttatcatcaacaataatcaagaaatatttaaaaccttctatgctaatgacatgaaatggttcccatgtgtctatgagtattaaatcaaaaatattttttgcaaagttgttttgtgaaacaaaagagactttcttttgttttgctcagtgacaaatagagcaatggtgattggttttaacagaataagaagaatcaatcatttattgaattaatttgaaatgtacattgaaggaacctaggtatttatgccattggtctacattattatgatcaaataaaagctttgattgactagaatgaacaaagagaaaagactcttgttgcaggatgtagagttttccttgtcttctagttgtcccaatcaccacagtctcaaaatgtgcccaaataagacaaaaatcaaggtgaaaagtcaccaaataagaagtggtggtaatgaagttatggattgaaaaaagattaaaccagaatttgggtacatagagcacatttgttaaagtaatagatgagtttatgtggattgtgccaatgttatacacaccatcagcaagtataacatgcttaggataaggtatgtcagaaaatgatgaaaagcataattttttagagtaaatatgatgagtagctccattatcaataatccatgataagtgagaggaagcaaatttataaccaaccatgtttgaggcagcagggggaagagcaacaacatgttcagctctatgggcagtttgattgatttgttggatgagaagggaaactagttgttggcattgcgcagtgagatcagtgctaagggtgatttcaggtgcttcagcaggagtgtaatttgtggaagcttgattggtatgggcttcacctttctcagacttcttcttgtcaccatattcaggaggcaggccatgaaagaagaagcttttatccaccaagtgacaaggtttaccacagttagaacatgatggatgaggcttcttggtgcaagatggattaggaactaatgatggacgacaacagaggctaaggtggagatgttggaagaatcaaaggtcctttgtcgttcttcttggacaatcatgccaaatacactggaaaggctaggaatgggtgttgggtatttatgccataaataaaaaccatattaatataatcctgaacatacaaattggtacacatgttactttgacgattatgtgtattaatatacaaattctattaaatcctgaacatattgttatttatgattatagtgttgtttacacagtagaaaataatcatgataatatgcttctgcttcaaactaaaactaattagtctcagtctcgtgatttatcagtacactggatttatactgatatgataatcaacgatgtgttttacttacatttgaataagtagaatattctttctgttagggtttatgccttgaaaaacatgtaaagatatttctgattattaataaagagttgaacattttgatatatgcatgcatgttaaattattaatatttattattgaataattcatattaaatatcaaaaaaattccttatttatatatgaggctatgactgaaagctatacagaaaattaagaccacttaactataaataaaacagtcagcaaaatattaaagtttgggaatctttaatcaacagttgctagtatagtttattgatgcccgttcttcagtacaagtaatcttagttcgaattacagatttagtatgacattaaaatgaaagtactgtatataatagagattgtatatgacaaggaccgatatgaataaagttatctttattaacatttcgtttactataaatacctaattcatatcataacgatgattaatagtacatcggcctaaatcctgagtaatcgtgaactcatattcatgttattagtttctttgattcactcgttaatgtttctcagataagataattcttacaattactattttgtgaatctaataatgtggataggtgggaacatgatctacaattatgaaatcttgactttcccaccagattgaatgctggttccctttaagtgttaattctagaactgcacaaacttagatgggatctaaatatacttccactagtgaattaatggtactaaatgataacaaagtaattagaagggtaaaaaggtattttgatcaaaactaataaagaactaacacatagagggctaattactgaaattgattatatcaatggacactacagtaaaactcagtaaatataat

SEQ ID NO: 14878 - DNA, 4273 bp, Cannabis sativa
  modified_base (51)..(52): a, c, t, g, unknown or other
  modified_base (79)..(86): a, c, t, g, unknown or other
attttaaaaatttaacagtgtttgacacaaattttttaaaactatttttannttttttcttactaaaaaaattaatatnnnnnnnncataccatgacatgaactcatccggattcagatttgggtatggtttcggatctaggatccgagtatgcaagtaaaaatataaaatataatatgttagacagaaaaatttgtttttaaaaattgaaaaacaacattttgatgttttctgttttctagttttttaaaaacttttgccaaacgacccatattagtttttaaaaactatttttaattttgaaaaacaaaaaatagttttaagttatgaagccaaataatctctttgcttttcgtttttattttttattttttaaatgaaaaagaaaacattttactcaaaacatattatcataaaaatgttagaaaaaataataataatcttttaaaaataataataataaaacaacatattaatataaaattatcaaattgagccacattaatatcaaactttacaaattgaccccgcattttaattgtttttacagcatacgccaagagacccaacctcaagttttcaactaacttaaaccttaaatataagtttccaaaattctcccaatctttttcctttccacatttccaactcgccggagaacctgagcaccgtccgtaccgtcaaattctccgacacccggcggctaatctcacaaagttctccactttctccacgttacctcgatcgattatggcgacacctgagtcgatgttgttttcttcgtctgattcgtaacggtttgttttttcttttttccgactttgaatctgaatccagtcaaaatccatggcggcgaggaatcaaacctcgtcgttcgggaattttagggatgcttcgaagatcttccaagctccgacgagttcatcggcttctacaagctccggcggtggcggaccggcgattgggttgacgaatacgtcgctcctgaatccgaatcggtcttatgctccgctcagtactgacgatcccggtaattcaaggtctcgttctctttcactttttctctccaattcgtggaaattttgtgttgaaatagaatgcaagtaaattagagacaattttagaaattagctacactggaattgaagggagcaaaacttgtttaaactcaatttatgggttcgtttactaatagattaaataaatgaagcaatggcaaggtagaaagcattgtgtttcactaagtagagactcgttaaggcttgctttctaatttaatacatgaataaatcgagaagggaaaatcaaaacaagtcgggaattttgtagaactttttttcgtatagtgtctatgtgcaatttcggtcatttctattgttttgctatgcatgcccaagaatgtagaacataaaaaactgattttgggagtggtgcattaggttttagacccttatattgtttcaatgatcattcagacaattcgatttagtaacgacatgtccaatggcagcaggaaaatctcatttggaacttttcccttcactggtcatgggtcatttacttcctaagtcctatatgaaaaatttcattaagagaataagggccaaaaccaaatagtttgtagcttctaaaaaccctttctgcatcagtatagtcaggtgccagatgctaagctggagaatgatgtgtgaacttgactgatgatattctatcatcagggtaatatttcctatatgagtattaagtggattattgagaagcacaatgcaagtatatagtgctttaaattatcaaaacaaagtatatagtgctgtaagttgagaagttcctttcatggggtgacttatgtttttattactacagtaggggtgcgttcactgttgatccatctccaacttgggtggatgtatctgatgaaatatcagcaaatgtgcaacatgcgcatgtgaaagtgtctgagctaacaaaagcccatgaaaaggccttaatgccatgttttagaggtggaagaaaagataaacacttaattgaagcccttacacaagagataattggtttgataaggaaaacagagaaaagactacaaagactttctgcagctgggtcatctgaagattcgaatgtcagaaaaaatgtgcaggtataactttgttttaatcttttttagtaattcaatttgctttattagtttctgcaaaacaatattgatatttgtttgcctgtcgtctaaattttatatttagtggaggttaatctgtatgctttatccacactgttgaacggtcctaatacctatggtcattagtagcttgcaaggttcttaaagtttgtttccctttcataattgtttcaaattgcattaataatttagggccaacttgtctaatttgacattaaacaaaactgtatgctctttaggttataggtatcttttgaatctctctcaaactaatagtcaataaagtgccctagttacactattatcaaggaaaaaactattattaagagtgacatgtaccttcatagctagctatataatgtatctagaggttgctgaataattatagattactttagtaataagtgctctagagattgctcattattcttcactctttttgtgtacttgtaagcactgtttctttgtcttttcatgttgagaaaaagtacatgtaatattgcatccttccacaatagtggtgagaaataaggcaggctgtgttatacctacaatccagcaactgttagaaattcacattttggttaacacaagcaaacacataaatcaaattaaactgtctgaaaaatagtgagataaagatggactatggttttgtgtgcatgtttcgactacagcgttctcttgcaaccgacctcaagaatctctcagtggagctaagagagaaactgtctgcttatttagagggcctcaggtggcaaaaagaggtcagtaaagaatatatttatttatctatgtatatgattatgtaagagctattgtttcaaatggattgaccatggacattgcatgttatggaagtttatatctgatttttcaagcatggaattgttttttatttataaaaagcaagtacatgagcctcttatatctgctcctgcattaaaattctggtgaacttttctcttattgttaggaattactgaattgtaaattgcttttaaagctcacaaagtacgctgcattccttttgatgtagggtgatgaagtatatatagatatgaatcttaatggaagtagatctagagtggaagatgaagatttggataacatggtatgctggaattttcttctgtatctgttgtatttctttcagatcttgttaaccatttcaaatatggggatcaaattccattgacaaggtcaatatttgttgatcaatctctgagtatactgactggataactgaaatttttttaaccaatattttatttgagttaaaagctagtagtgatacaaatgtgtggacaggtgtttgatgagcaccagcttgcaaaacttaaaaacagtgaggcattctcagtagaaagaaagcaagagatccaacaggcaattgaacttctctgcactaagtattttcgttgatattgattcagtgcttagttaataattggctatgctttttgccttgtttacaggttgtagaatctgtaaatgagctttctcagattatgaaggatctgtcagtacttgtgatagaacaggttagataaatccaaatttaagcacatttattttttttcaagaaaaatatggcatgctattttcaaacggattttccatgtcctaaatttaatctcttttcaaacagggtactgttggggataggatagactacacacagaatgctgcaacaacagttgaggagggccccaagcaactaaaaaaggtctttttgttgaataattttggaaatggcaatatatttgtatataaatctgtgatcctctcttaccatttctaggcttttccattttagatttatttgatctccaagtggtaattttttttgaaaatatattaagaaaaaaaaacaaaaaactttgaagattgcttggtctttggattttaaataaattcaaactctacaagaactgattaggacaggaatgttcaaaatttattaaaatttgttttgtaacgtatttcctatggatattgtaatttgattactttttatttagacaaggaaatatgtttctttttaaaataataataataacgcagttaggaaatggtttttttttttttttt

SEQ ID NO: 14879 - DNA, 3242 bp, Cannabis sativa
  modified_base (2895)..(2896): a, c, t, g, unknown or other
ataagtgatgaaaatacttctgtctctttattgatatttaaatgatagagattacattgatatagagttttatttagggcataaaacccaacatattacacctttgtaattctttcccaagcaaattcctgccatccacatcattaaaaccgtacacaaaagaaacatagaaattgtttttcttgtctacagtagtaacaaagagatgaataaattggctagaacaacttaggatatttattgtaaacctcaagggattccaagccacaatgattcaacctcctttatgccacacattatttgtagtgaaacaccaacccaagaacatattgacatataaggctccaaactttggagccttaagtctcatctcgaggagaccaacaagaccaattttttggtgagcaataaattgcttaactagattttgtttgtactggctattgatccctcagacgttctaactgaggactttatcgatttgagagaggaggatctccccttccttttgtagtgctcaaatgatcttctgtattttcctgccccttgtgttgctcaactacattctctgtgtcccttagaaaagtaaaggagtttcatgtagaaatgcctgctacaggccctttaggtttaattttccagccattaataattggtttaaatgtgtctgcactttctccacccttatcctctgtgatttctttcttcttgttatcgtttttaatcacccactccagtttccttagttcttttttcctgcaatctggtgctgcatgacccatccctttatagtgaacacaaacaattggcgtccattcataattgaatatcacactaacattcgagccatattcatcttcaaaatctatcatctctggaaactcctgatttatagaataagtaccctaggatagcttagtttgttcctaccctttgtaacttcatccatcattaacggtttcccaagttgccctataatcttgtataatgatttctggccccaatatttgagttctaagtcttctaattgtaccaagattagaattattcttatatcttcctttttgaaattcacattcagatcctagtccttcatgatgaccgaccttttgttaaagaaagtataccccctgtaagaacactatctttgtcttctatagaagagaaacagattaagaaaattccataggaaagcatacctaccttgtccactttatccttccatatcctccttccaaaaccttcaagcactaataaaggaggattagctcctaaaacatagcatacaatcgatgaggtctagtaagctacctcctcatcaatgtcatctttagtgatcttgatcttagaagctttcttcgagttagaaagcaagaattccaagtttctaaccactccttctgatctgagaacatggggtgtgggttggagtccttgtaaaacttcattcgagaatctctgattcacttctaagaacacagaaaaattagttcgaacctcttcttgcttttgaattgccctgagcgatgatcttggagataagggaggctgagaaacatctttaaggaattttccttcattcgattttgcttcaagatcttcatcctcatcagtgaattccagcggttcaactcccaatacttccttcattaatttcgttttcttcataccagtagtagattttttacctttcttcttcttcttcgcagaaatctctagcttagcttgaacattttcccttgttttggccatggcactagctcgagagagagttgcaaaagcaaaagtttgagaaaaaaatactatatataaccaaacccacactaacattatatatatattaatttatttgcacatgaaaggtcctaacccaagtttacatctagaatctatgtatatacactactagaaaaatccctttttaagtccatcaatattgactagatatatatatattatcatgtcttgttttaaaacactttctaacttttctttttttttttcaatgacaattatagtagtagttttgagtgaaatgtgtgacgattgaaaaactaagattgagaaatctggctgtatttattcagctttaccctcttcagaccggtccattgactctggtgttattttcataaccccctatcatccttattggaagaagcaaaaactaaagtatgatcgtaccgattttagggtacaattttaaaaacactatactgaactcactagctttaccaagacatacacacaaatgcattaatagctccacacaatgaaaaagtgtccaaataaatttacaaacccagaagaaataaaaggttcataataacccattaaagaccctaaaagaccacataaaaccaattccaccactcaacacaaatgtacatgaacagtacaatgctcaacctagatttttcatttgtacaaaagcaaatattcaaaataaacatatcagttagacaagtagggattcaagagtacaatgcacacactgtcaaagatttctaattagttttaccaaaaacagaaactttaacaaagacaacaaatttagaaacccatttgagaatctaagaaaccattcacattaaacccaacaaaactccccatacttttcaatacataaaatccaatttacagtactaaaatttcagcaaatataacgacaaatacatgaatatatgtataatgagaatcactacaagaaaaggactttttctggcgtatttcgtcacatgcgccggcaaaagttgtcgagacaaaaaaaaaattctggactcccaatattattttgggtttactttggccggcgcatgtttgcgctggtaaaacatagcaataccggcaatgtcaaatcaaatgcgccggtaaaacgtaacaccattaggcgcnngaatttgccgcctttgatttcatttttggggcgtatttcttcttttaccggcgcatatgtgcgccggcaaaaggctaaaagaaattggagggaaattttttgcgtgggttttatgtggtaggtggggccacttttttcggggcaattatgcgccagcaaaggtgttaagtgaaacgctcgtttttgtgtaggtttacaattaattttttaaacacttttaccggcgtaattggatgcgccggtaaaagttttgatatgtatcagggggcacgaagccccctttcttcccccacttcatttctgcaaacacagccgcccccctctctcgttctctctcaagccctct

SEQ ID NO: 14880 - DNA, 3441 bp, Cannabis sativa
atgaggttggatgattttttacaagtaaattgataattgtgagggttttgccgcaaattactcaaattttaatgaccaaagactttatgtttgtaagtgggttccatgttttaagtttataatgttaactcttttaatacttaagtttcataacccatttaactttggttaagggcctcctccgagtgtttttcaaactttggtcccttcccatatttcctcctttattcagactcaaaccaaaacgacaattacactacaaaacgacaaacatttacttaataaataatagatcatagatggttccttacaagtggaaacaagagaatccaatctaaacactagaagaacttgttcataccaacgcaagagaggttcacttaacatacaagtatttgctcttatggcatttgatttttaaatcatagcaagctcttctcccacttcaacttttggcttgcttgcaccaactgcacacatacaaactacttatgttataataacacaaataaatttagaaaaaatctaaacaactccatacataccaaactcaaaattgattcattataataagtaaccaaaccttgacactttttgttgttgtatgcatcatcatcatcatcatcagagaaaatggaaactctaaacaaatttttagatttcttaagaagctcgaaaatgcagacatcgccaacttttaaatcattttcctttgcaaatttattccaaccacatttgaaatcagctctagtattcacttccctcgttttaatttcaataggccaatatccacctcctttcgaaaccgaaagaattgcatcaccctccttatcaagatgtctcctaacaaattcaattggtattccctagcccaaaaaagaaaatatacaagaaaactagcccatcatcatcttataatgctcaaaactttatatgacatgaaaatgtagctgagaagcttaccaaagaactccttgaattaagtgatgatggttgtataacaatcttgaaaaaaggatattcggatttaaattgaaccctttcaaggatcttagctctttcaatcactgaaaagtgtggttgttgttgcctttttggcttaggtgtgacagttttttcatccatggaatctttgtgctctgataaaaatggatgtaaagtgagacagagattaataagagaggtgttgtagtaaaggacataaaatctttgttcacctggggacattaagttgtttgagtttgtagtagtgttaactctgaaaattacaacttcaaatgtaaatttcatctcctcaagcataagaaatacacaaatgtccccttctttcagattattgtccttagcaaatactggccaacctgccttgaatatggatgatggtactttattgtacactccaaacttatgttccacaaaccatgtccttccatacccatttgacagtttaagtacagcattgctacatgtttctcctaaatatttcttggcaaagttgtatggcaaattctacacacacaaaacaaaagtattatatacagttctgctcactcaaatatattagagttttccatatcaaatatcaaataaatgtaaggatacagtctatataattaggatttttacctaaacataagtaagagggaattttcaatgacatgaaaagttcgaaaacactatttgctacatgtaaagttcgagggggaaaatcataattagcctattctagataactaaatggtttagtgttgaaggggagattaccatttggtgaccatgaacatagtgtggctgcataaccaccttgaaaaatggtagtctcgattcgaaatcaatagcctgctgaagagcttcatctcttccactcagagacttcatcggtgtaataatctcacatctctgcgattcggttgatagatgcaagtctttttcccctgcaacaaatagaacatatcatcccaaatctgcaaaatacataacataataaattccaaagtgaaatttctctccatgccttttgtctctgactcgagttttcgacaagaaggattgctttgagttctcattttcttgtgaggccgagaacatggtgaagaatattcatccaagacttcaacagaatccttctcaacaacttggattttaagctcactatcaatactagacacaaccaaattggtaggtacagaaggataatttatctcaactgtacttatatcaaatataacagcataaaattcagaatttccctcatatctaaatgttatcatactccctctttttaatccataatgctttgcaaaatctagccaacccttttcaaaccaaatattctcatctttctttgttaatcccattttccatttcgaaccacatggaagcttaatcaatacccaattggataaagtttcaccatatttagctgtaaattttttgggaatatgctgcaaaattaaatcaaataaaaaagttaaaaaatttctctaacaataatatgtgaaaaaaggtacaaaaaatcatttcaaaaagtgcaaactaagacattctaaattgggattattagcatttgatatttatttgataagatcatattattagcatcgttgaaaactcatgattcaagtacttataattaagttgaaatagtttttggttatatgcagagaatactcatgtgggtcagttcttcctaattatgaataagagctaaaacaaacaaacaaaaacagagaaagagaaagatgatccttacaagcttgttttctcgaagagtcccatgaaaaattatcttaaaaaaatgaggagtagatgaaaacatggtctgcttactatctccaccagacatatttgaaccataccaccataatgtaatataaatatatacatataatggagaaacaaagtgtagagtcaaaaattcaagaaaagtgaatcccgaaatttttcgtacaaaaattacaaaaatcttaagaaaatgttcagttttaacaaggagaaaattatgtataacaagagaaatcttgtgcttgaattgtgtttaaattttcttggaaaaatatctcactaaaataatatatatcaaacggtaactatgggaaatgatgaatcttgaaaaattaaagcccctcttcctcatatatttttaatttttttttttttttaaaaaaaaagctaagccgatcccaatgagagattgcatagcacgagtattgtatttttattggttaattagtattttttttctttagttttaacatatattaaatcacgttctctaaattattcaagttgttataaatttttttaaagggttagatataagaatttttgtctaattttattaatgaaagttcaggaacaataatttagtacatattaaagttagggtgttcatccaatccaatccgtactattttgctcatagtacatctgatccgcact

SEQ ID NO: 14881 - DNA, 9609 bp, Cannabis sativa
  modified_base (36)..(61): a, c, t, g, unknown or other
aaacctctattacaactagcgctgcaaccactttannnnnnnnnnnnnnnnnnnnnnnnnnaaaaaattaaaaaaatagtatttagagtaattccccttaaatttattttaaccacaccctaaaaactattctatttataacaaaatctataatatcttagtgtgacattatagtgtttattaagccactaaggctagtttagttatgagggagggatgggaaaaaaggagaggtcatgagttcgaacttaggaccttgaagctattaagctattaaataattgtaaaatacaattatgctacactcaaaaaaaaaaaaaaagacattatagtgtttatttataatttaacaaaataatataataataaaaaaaaaagattttagtgtaacttttagtgttgtaattggaataaaaaaaattaattttaaaattttattatttttgtattgatttaacacttaatttaacatttatcattaaataacttttaaacttgttgagtaccactaatgtccaatgctctacaaattattattctaaacaaaaaattaaaaattaataatcatctgccgttactgtaattatcattttcctgcaaattaggttgcgaaatacccagtttaccccttcaccaactacattaaagtaaacttaacaaggtcaaatcagtaattcaactctaaccgcgctgagcaatgttaatttgaattcccgcgcctttacattctcaaaaacgccgtgaccgactggtttaaagccagttgattgagatttagattccaaacaaaaataataataataataataaaaaaaaatgaaaataaaaataaaaaattcagatcgatcaaattcgaaaactgacatttttcgaaatttgtaaacccgcctaagaatcatattcttcttcatctaactttcaattcaatactttatccttatgattttcagtttataaagagaaaaaaaataagaactttttttttttttttttttttttggggagttcagcttcagctgttttgaaacaaaaatgtcttcttcttttatgtttatggagtccgattctagacccaatgtatattgccgtaaagaaaaatctcttggagttttgtgttccaagtaaaaatgctatctttttttgtttggttattcttttgagctgtatatatagatacaagtttttgtttttgatcttaattcgcttttaattttctcgttttaattagtttcttgaggttgtataatcgggaaggcgttgaatccattggtctcgatgacgctgcttctcaattaggtcttgatctgctcttactctaatctatgatatgaatctgggtttttcttcattgagtttaatgattgccaatattgatttttttttttcaggagttgagcggcgccgcatgtatgacgttgtcaatatattggagattattggagtcagttctcgaaatttggttttcttatcatttaatttgaaagcttagatttttgatccactctttcttcgcatcttaattttcctgaaatgggtcttttggctcatttaggttgtcgcaagaaaagctaaaaatcagtatacatggaagggtttaggggaaattccacgtgctttgcagcagttgaaggtaaatctagcttttgttattcttctcctattgagtttatatggaacccatagctttaacatactttagttttgttttccttacaggatgagggtttgaaggagaattttagtgcctcagttagctgcagctcttctagagtatgttgttacttgtagattttaccttagatttccaattgctggtttgtttcaactaatcatatcatctaatttgtgaattgcccattttactaggttttaaatgacaaagagcttagtggggttctgagtctgaattcgaaagaggaggagtactcttctgtgtcttcgaaaaacagtaatcaccattgtttttttttgacctgtgtgtttgatcatgtgaggtggactcacttttatggtggggatagtttagaattctcaatcttctgatgaatgacttatttgggggtttttacacttgttgctgcagaaaacaagagagacaagtctctatcacttctcacccagaactttatcaagctttttctttgttcaaatgtgagttaagtttataaatttacgatcttttattagctaaccagtttccttaattatagcaagctgataccttagtttccttgtttagatggatttgatattgcttgaaaatgcagctaaaggattgccaggtgatgcagaagatccaacggctttgagaagtaattatatcttataagatgttaacaataatttaattctgatagagacaataattaagtccaaaactaatgctttctttgtgtttttattttccagcaaaggttagacgtctgtatgatattgcaaatgttttatcttcaatgaatctgattgagaaggtaaaagataatcatagaaaccttagcacatgagaatgtaggattaattaaccatataatagcttcgtttatgacatttttctaccccttttttttttgttaaattgatttgcagattcgtcatcctgatagtgggaaaccagcatataggtggttgtgttggggagcaaagaccaagaatgaaattgataatacagattctaaccaacctataaagagaatatttggtgctgatctcacaaattacaatttcaagagaaaaagagaagataccacagaggattgcaagtcaaatcaagagaaaagtaagcaaaaaatttgtaaatcgtctgaattggaacaaaatgaatgtgtctgtgatgatgaagaagtgaagccgcgtccaaaatatgcctcaaagggtattgtatttggaccttttgcacctattagtttggctatggaaggagatgcagcaaataaaagagtgagacaggttcaagattgggaaagtttggcttctacttatcgtcctcagtatcggaaccaaggtacattttgaactacaatgcacggaactaagcttttggtgatgctcaatttagtggaaaacacaaaaacatcaacattgtcaaagttaacaccattgttgtaggatttcaatttttttattatttattgggacaatctttgatagtgtagctacaaaaagctgaacaggaacaacaacaaatcgattccaaccttggcttttttgctgttttctttgatttgatacatctagtttcccaactttatctatatgctatctacattagaacaattcctatgtaaatattctcttgtcaaattgtccatataagctgtctagtgtccacattctggcaaggaacttcccattaatctcagctttcttgcctttcccaacttaagcttttagattattagtaaatccatccttggtggtcaagtagtgttgcatgttctgaaaaatttatatcgacccggttgtgtttaacaatggcagctactaaattttagagacgggtttcgttttgttgatgatcatggcagctctatgtgacctctttgctcattacatggaggcttggaaatcatggttcgtggatgctgtagggaatcaagaaggtgcgctgacattactgtagaataatctgttgttaacttcatttaggattctcaaccccatggttgactgtggattactcttttcttcttattcttcctcttgccacaaagcatataggtgttcaaggaataagtttcttgctatggtagcatggattgtgatcatcacttcctacactaatcatacattaaaagccctcatttttattgtcaatcacttcttgtcattcactaataagagttatatttatttaattagccaaagagtgtggaaaatgtcttgagagctttcttttcttccttagaataataaataattcagtagctttctgaagcttcaactcttgtgtttatagccattggagatgtcttattactatgtttctgcatatattgatttggaatttcaatttatttactcagacaccttatttaattgtcaatttctacttagacaccttatttagtgactaataagaattatttaattagctaaatgatgtggaaagtccagaactttcttttttccttttgaataataaacacacttttctgagtttcaactataattttggtaggcaatagtgatgtcttattactttgtctctgcatatattgagtttgaaagtaagttgttttatttctcatcatttttttttcatacatgctttgttttattccatgtgaacatatgaataattattaatcataaatcactccaatttaaaattttgaccaattaatgggaatcactaattttatttattaatcagggctttttatttatttatgtttctttttgacaactttatgtatcaattatttaaaatctttgtatacataaaaagtttatttatttatactgtcaaaagtttcataaaaaaaattaactaaaatcaccttttataatcaatcatctagtgcattattagcaactttatcttgcatatattatttaattttaaagaactcaaaaagatattttcctttgttttttttaagaaaaagaaattataacaaggaaaggaatcttaatagatagtgagtaccccacacctaatcgtatcagtccttaataaccacagctgttattatacttgaccattttttgagtgttccttccaatcaaagctcaaccaagagccattagcaatcttctaagatgtttttctttctaatgctacgctaaaagttgagtcaaatataagaaaaatattaagggtagtttaagtgttaacagcaacaagatattatatactgttattagtgcattttaatattgtgtctcataattctttcaaatttgaattttgaaaaaaaaatgtcataacgctattagtgcatttcaatcgccttataatttgaaaaaatgctaaaactttaaactttgtattagagcacaatactaaaacttaaactaataattttttttttttcttaaatataacacaatttttactactatctatcgaagattagtaactccaactccaagggcatgtttacttaagggaatgataattaatggtatgatattgattctcatataactttttttaaaattaaagcattccgattactttttttttatttatgtaaacaaaataatatgattctgattttctttgtaaatagtttagtaaacaacataataaaatattattttcgattattttttattttaaaccgattctgccattgattataataagggtaaatagcgttataagtacccaaaattttaagtttgtaagtttgtaaaactataatttttctttagttttgtcagtacagacttcattttgaatttattaaataaatatttggaagtaaatgatactacatgtttctgtttagacctaatgatcaagaatctagaccttatatgtgacatgtttaagaaaataacagagtttgtattgacgaaattagagaaaaattgcaatttcacagatattggctatttatgccgctaaaaataaacattaaaattatgtcacttacaaacttaaactttgggtacttatactcctatttaccctcataataatagtggtcctaattaacactattcttattctaatggcgaatccgtaataatgatttaaaagcaggggtattatagtcattaaacagcacaagttacaaaaacaaccagagtttggtaggtcccaatgggagagtagtaagaaaaagactcatcgccgaaaccaagcgacccgtctgaatgaagtggcaaaatctcatacacaaaacaaacaaagcatagagagagagagaaagagagaaagagagtcagagagctctcgcgcttagctcatccttccatggcagccacagctcgagctttcgttctttctcgcttcacagacctatctctacggcctcgacagcctccccaaccgccaccacctccgtcaccgctctcctctttttcacggcaacgttttcttctttccttacaacggcgtcgttttgctaagtcatcatcgcccgtggtcaaggtttgctccctcatctctggagttgacggaggtggtgtttccgacgagtttgtttcgactcggagatctagctttgaccggggcttttctgtaattgctaatatgcttaggcgaatagagcctctagacacttccgttatttccaagggcgtttctgattcagctaaggattccatgaaggagacgatctctactatgctagggttgcttccttccgatcaattctcagtgacgataaatgtttctaaaggtcctctcgatcaccttctcgtgtcttccataattaccgggtaacacaattttagctcgtgattttcgattttagttgtcagctcgtttaacaaattttagctggaattggaatttcctgtttatggatagtgattttgattggactagattggattggattgttgtaaaattaggtatacactgtggaacgcagagtatcggttatcgttgatgaggaatttcgatattccgacggaaagttctgagaagttgaaacaatcatcgcgggaaggggtttcggaagaaggaaagattgaaaacaaggacggtgaaattgtttttgagacgagtattgaagaattagaaacaacgagtcctcagatttttgggaacctttccccggaagctttgaactatattcaacggttacagacagagttatctaatgtgaaggaggttagtcccagttaatatatgaattttggacgttttttctctttcgaatttgaccctgaacaaagaactgaaatttatatagtgtgtgatttaatcatatgtaaatatagaacgtttaacataggtgcttattgactagtagaaattgtgttaaattagagagcaaagcacatcttttttctataaggtaattgctttgatgtcaaatccctaaggcctatggtttcccctttgcacgcttaaatgatatgatcaccatagaactagttttcgttttctggatttcaaagcttatctaatctttcccttataaaatattctgtttccaatatttttgcatcagttgcatgatactctttgacttgcttacaaacgtgacacgtgtgtcacatgcaaatggttaaataagtgcttaattgctcatttcattgttctcaaacgataggtttactcattgcttagttttttcttttcttttttttttttatatatgatttaatgataaaataataaatctattttaaaaaaaataagttgatataaagtattctaataacactcaaagcaactttctttgatttttcaaaagagatacttctttctgtaggaagagcttataaacatatgaagtacttccaaaattcatccaaacacaagaggtaactttcaggctttggaagagctttaaaaaagcatgacatataaagcttacatagtcaataacaagtgttagagttgagaattttgggtgaaaagctttgcattggcgtcttcttgatctctcatctatgcctattgctgtaatggctgcccttttgacctgtcaattatgttgtgggagttgtaggggtagccttttccaacttctgttgggctaacacatttgctgactttaatgtgtttttattttcaacataacttgcagtcattgtcattatagtttgctgctaaaaaacatgttttgctagctagcctgtatccttttatctactgatggaatgccaatcgaatgtcatgaatgtgctaaccaagatggaaaagctgatgagatatttgcagcgaaagtcactaaaggttgcaccgaagtcatttcacactaatttgatgtgggtgtgtcaccttccattaaatctaacatattacttactgaatttcgtcacgttaaattggtgtgaattgtgacttttgctgcaaaaaaactactaagtgcaatatttcagactacatactgattttcgtttgtcaaaaaatattacttagtgacatgcaacctataatactacttattaactttcaacccaaatttctcaaaattgatttgtaattactgaaccatgtttatgttttttttccttaggtttatcaattgttctctcatttagaccttgaggtcttatagcttgccctgtatgattccagcgtccttgttatgctctattgaaactgatcgatgtacttctttgcaggaactgaatgctcgaagacaagataatctacaattagaatataacagagaacatcgaaatgatttattggattatcttcggtctttggattctaatatggtactatcccaaggctgaaacctctacttcaaatttattggaggtttaaagtccaatacattgttttgtgtgtgtctgtttcaattgatcatttgcttgatacgttcaaacaggtgattgaattatcgaaaccatcttcatcagaagtggaagaaataatacaccaacttgttcaaaacatatctcagagattcttcaaagacgacggcgattcaaattttatcggggagtcagtgacgccaaacagagaaaatcttcctaacgacaatgatgaattttgcaacaccatgggcacctcacgggattacctagcgaagcttcttttctggtgagaatttcgtcagtgtcattcataaatggcttgttataatattatatatccacattatgtttgtatatattagtgaatatgacctgtgagttatcttatcttgacatgggaaaggaagatgaacatacatagttctctcagacactgaatttatccttcgttttggcaggtgcatgctattgggtcatcatttaagaggcttggaaaacagattacaattaagttgcgttgttggattgttgtaaagagaggaaagtgggaaaatcatgtatattcttactacctccttttcctttgtcttttttcttacctttccccccctttttgtttatctatattgttctcattttcttttttataaaattaatctaagttaaaccattctcaagttccgatcgatcactctttgttgtcataataatgacattttgtatttcattcactataaaagcaagagtacagaaaatcagaaacctcaaacaacttcaggattatgtgtaatttgtagttgaggtagatcctcccttccatctgtttcggcatttagaaatttcttttagtttttttttcttcataatcgcgtaaattgtagctatttaggattttatgtatattttcagaaaattttgaatagtttagtcacaatagcttcttcatttccttgtttgtttagtgtgatttcattagatgatatgcttgcatgaacatgttgctcgcattgtatttgtaattttgaaggtatttttcaaggttgtctttagttttcatctttagataagaaattcttatgttactgctagtaaaactcgtcctctatcaggtggcattttataattaattaataattttttaaaattaaaataagtaaaattcaatactaaattacacctataaatacatttttttccattaattatgaaaag

SEQ ID NO: 14882 - DNA, 7115 bp, Cannabis sativa
atatagtttaaagcgtcttatagtgatacttcttttataagaaaaaaaaaacaaataataggtagtgaatttagtttctttcaattttaaaagggatataaattgtaaaaaaaaaatgtcaaaatccattttaagaaccataatctgggccatccatttcaggaaagaaaatgaattgaaaagttgggccaggcccaaacgaccaagaaccgtacgaggaatggattaagattgtacccgatacgacgacgttttctgtggcggtgattgtgccctgactgggtactggattagcgtcagtccccagaaaataataatgccaactaagggcaaaatcgtaaaacaaatctagcgcgggaaagagagccgttgttaactcaacctcttattttggcgccaaatcgaaaatttcggctgcccgtatattttctgggaagctactacctctgcccgactgcccctcctcttttttcactaatcttctcttttaagcttttaccaaattgtctttacacctaccaatatatatatacacatttccacccaaactctagtctttatcatttatttttttttcctaaaaaaattgaaagaagaaaaaagaaaagcaaggaaaattactttcgcccattaaattcaaagcttaatttccctttttcttttccttaaacccttctaattttccctctctttttttctattatcaaagctagccttagccgcctcagagaaaataagaagcaaagacccttttttctcttaatattctcttcttctcagctagtttttcttagttttgttctgattcctcgatcaaaaaatcagttccttttctttcttcgtaacacttcactttgctacaatccgattccttatcgtgttttcctttctgggttttgttctgattctaaaatcaaaccacacttttctccacaactttgctctgttttgatttttttttttgttctgcttttctctttcgaagaatatggggttctctaaaaaatctcaaatcgatggaggcttcgaatcagaaggaaaaaaatgggttatagccggaatttcagtacgaagctctttgaagccaataaagactaaaacccacaaagccaaagattatgaaaacgacaacaacaacaacaacaacaacaacaacaacggtgatgatgattacgacagcgaatcgtgttcaacgactccaaaaagcagagaatcgagaataccagagggattgaagtgtccaccagctcctagaaagagaagaccttccagatgcaatttcaatggtgtgagagacttctttacagtacctgacttggaaactgtattcatacgccgtgtcgaggaagctaattaacttgagagattagactcacttactaagataagaagaactagagttagagatttttagggtttttttttgttttaatggtgtttttcttttctttcttacttactacttatctttttatgttaatctctctctttctctttccggggtttgttagagaagagcttgtaatgtacaaagatatcatatttatgcaatgagcattctgctaatttgggtcaaggttttttatgtgggaatgtttggtgctttgagcttgagattgttttttttttgttttgttgttgaattcattaatataacaacttctaatgttacttatttttgtgtaatttgttcaatattatatgtttgttcttgttgaacaagtatacatgagttggattaaccaaaaagcttttatctttctcaacaagagaataaataaataaacaaacaaaaattgatatctttctatgtttcattttattctatgcaccaaggaatctaataaagctaaaggactcgtttcacaagtaaattcaatagctcttctgcccaaaggactaaaaaaatttctctgctccactctttagtactatcctctctttattctctctctaaatcatcaccaatatgcagagagcagagttacttggagcaatacatgtcagtttaattattaattttctcctttctcaaattgctagtttagcttccaaagctaggaagatgaataaatagttgagctttttaaccatggattcttttttctttgtaacatattttctttgcctacagcgatttttttttgcttgtgaagaaagatatatatatatattatataatatatatacacacacacgtattgttctctatatatagctacttcaaccaggtattagccgaaatttcatctacacaaaactacacacgtgcattgtttgttaccattgttttctcataacaatggtcaatttttaaggtgaaatacccaaaaagttttgccaaccacaaaacgagaatgtaaaagtatataaatctttttttcatggcttggatgctgcacgaattgattgactgagactaaatgccctcataaacacaagtactactacctttattttctatactctgccaagttccaaatctctctctctttaatcttccttatatgtcccacaaagatgatgagtgacccacacactcatcatctggaaagcgatctaaaccctagctactgaaaaccctttgaatgcttattttgaaattatatattaaaagacaaagcaaaatttggagagagactagaatcctatgtggggttggacttcgggaggccttgtttgtttgagtgtgtcaccataataaaataaaatttgtgctagtgtgtttttgtggataagatgcaatttcactagtctctcaccaaaaaccctaatcatatttgtctatgcctattgtgattgttaaattaaagcctatcataacgtcgtggaacttatagaaggaattgttgacttgggtttggtattcatcaagaattctaagagtgcaattatagaaggatatagtgatgctgaattttcttgtgatagagatcaccaaaattcaacattagctttgttcttcctgattggaggaaattgcaccagttggagtgtacagctacatgcagtagttgcattatcaattacaaaggctgaatacatggatgttacagaatcaattaaagaaggtattcggattgagggactaaagaaagaaatacatttattgggagaaattcctacaatctacctagattgtcagagatgtatatgtctatgcaaaaatcttgtatttcatgatagaacaacacatgtagaaatcaagtatcactttattcgagataaagtgacaaatgaagagattcagataaataaattttctactgaagaaaacctagctggtgtgggtactaaaaccttaaacctaacaaaatttaaacaatatttgaatttgttaggatggtaatggtgaataaccattaccttgaagcgtaaagaccgtgaggaagataaaaatacattaataagcttatgaaattgttaaattaaagaatatcataagctgcatgtatcactaattggtccgtggatataactacaccagtttaagattacaactagatcaagacaacttaagatttatttccttatcatccaggtttatttctctttaatgattgcatctcttctaggatggcctccagccatgctgtaacatctttgcttctatcaactttttgatagctagtaggttctgagctattgatctcttttacaaccattagtgcaaaggaaatgaattcagcgtaactaaacctgtcaggggctctactttgtctttttttttttctctatctctagctaattgatagctactcagatcatgctaatctttattgtcttcttcttttcttatctcagttccatctggaacaacatgttttggtgctataggagcagtatgctccacctcaatgtggacattttcatctcaaacatattcattgtctttggatgtgctcttggttttcatggccatgtcatcttctttaaagacaacatccctactaatcatacatttcttgaatccaggttttaaacaccaaactcatatcccttaacctctttagggtagcctaggaatatgtatcttaattcttttagttgcaatttatcctgcctaacacgtacaaaagcagtgcagccgaaaaatttcaaatgatcaaagtttagaggtttacctgtccgtaactcttgaggggtctaaaaattgtttggtactgagaggcatctattgattaagtagcaggtttttttagaatgtctccccagaaagatctgtctaagcctactcctaacaacatgcatctaaccctttcaattattgttctattcattcctctcctctcagcaacaccacaccattttgctaaagggtcttgatcactgttctgagtctttagcttccaactttggcacacaattccttgaactcatttgagcagtaatgaaggtcattgtcagttcgttagaacctcgaatttgttacctgtttgattttataaaagcttcttccatgtgtcaaaggccactagaacttcatctttgctttttaatagataaacccaaactttcctgctctaatcattaactaagattatacaatagtgtgctccacctttagttggaatcttgtatgatccccataggttagaattaatgagcatatgctaatttttctatggtggtatgttctgtcttgttgaatttcaatctgcaagcttttcctaaaacacactcatcacagaattctagcttttttgtcagcttctctttacacaaccttgtttattcagttcttctagtcctctttgacttacatgacccaatctgagatgtcatagtctagcttgactattattgattgagctaacagtaggtgctgcactacctgtaattgtctttccatccaagaaatacataccattgctcaaccttcccctcatcatagtttatgtaccttgagtggtcctcatcactccatcctcaacattgacagtgtatcctactttatcaaacataccaatggacaaaagatttctcttgagatctggaacatgcctgaccttctgcaaggttctcaaggtttcatcataattctttatcatgaatgttcccacaccttttatctcacaagccttgtttcttctaaaaagaaatgtgcctccatgtttctatgaaagattcttaaacaatcttttttggtgccatgtgaaatgaacaccctaaatttaagatccaatctccacctatatctgaacttgacaccataagtgcatttgttgactcatagccatctgctatttctacaacttcatacttgttggacttgtgctgattttcccttttcaatttttcctttaaaacaagacaatcatctctaaaatcaccctcctatttgcaatagcaacatttcttgcatgtagctccgtttgagcttgaccctcctgtggagttcttgaatggttactttgtaaccatttaaattctgatttctcttgtattcactcttatggaactttcctttaacaatgagcaatcattccccactattctctcatttctcatctctttttttttttctgaatttattttaaattcaatgcaaccttaacttctgtcatggtcaaagtttcttttccatataagattgtatcaagaaaagtgttcatatacatcttgggaagtgaattcaacaggagtattgctcgatattcatcaactatgttcaccccaagattgttcaagtccagaattatactgttgtaatcatcaagatgcttcctcagttctttagattcatccatttgaagtgtatacaacttcttcttaagatacagtttgttagcaagtgatttctttttgtagattgaagctagtttgttccaaagtcccaaattatctgttagaatttaatgtcctaaataaaatgcatttcaattttatttacttattaataaaatatcagaaattattttatgttgcatagttcacatgattactttcatgattatatatttaatatataaattctattaaatcccaaacatatagttattactcataattataatgttgtcagcacaatagaaaataatcatgattatatgcttcaaactatttagtaccacgatttatcagtgcactagatttacactgaggtgataattagcgagtggtttacttacacttgtataagtagaatgtcctttctagagcattagcaaagtaaacttgtatctgatgtatcggctatacattataaacttatcgttaagtcctttataagttgatgtcacttagttaatcttagattaattgatctcaatcctgagattgttaggttctagcttaattgtgcagtcaaccgatcattctttctctgatcgcactggttgatgtgtcaacacttcttctttctgttgttaacaacactttctgcggttaacaatactttctgtagttaacagcacatgagtggagaaagcgtacacttacgacaaatcatcttttaccgtgaagaggctccacatgacaacttttcacgagactgtactcgtatttgtaggtgaaaattcgcactataacatgatgatcaacaaaacacattcaagtatgtccatgaattacaactcaacaaaatgaggatgaaccctcaatcacaattgaaactcaccctgaggaatacttgatcaaatacacaagcgccctatttacaaccttctacacacacttgtaattttagacaaaaactcgaaacaattcttgaatttcgtaagcataaagtaagatagaattgagagctgtttataagtgttggtgaagcctttttcgagttgtgcacaaagccaactgactaactaatcctgagttgaatttactaacttggacaataattaagtgagtttaattctattacctatattcatatatatatatatatatataataatatcaatgaaagggcgtttttcctttaagaaagtggtaatggaaaatttagtacttaattaatctcggcttgatcgctttgtgtttgagatattaaataaatgcatggtttatttatagggattaggaaaagaagacctatttaaataaaaaatacgagggaaaacagtaaatttgttatgaaaaatattaaggtcttgtttgttttgtcagaatatggt

SEQ ID NO: 14883 - DNA, 9473 bp, Cannabis sativa
  modified_base (214)..(215): a, c, t, g, unknown or other
acaaatttgttttctttttttgaaaataaaaaaaatgaaggatatcttataataaagcatcatatagtggattttttatttttccagaagccatagattaaggaaaaatcatggtacattccaagaatatgttgttagaagttgcatatgaacatgctaatgtcatatatttctctgtattattatatgaataatatagtaatatatatatatnnatatttatatatatatattagtataacttaggattcttaaattcaaacttataccctctcttttttttttttaaaaaaaaatatttaattaataatttaacatttaataaaatttaaatttagattttcataaaacatatctacttaattttagtaacactttaaaatagttataaaaattatattttaataaacaataaaataaattattaaatttaaatattataattaattaatttaacagtattaattttaactgttaactttaacaatatataacaaaatatatatgtagcatacaacttttttatatattaaaagtagtttcatatatagtgtatcactataaataaaaggaaaatctataatacacatttaaaatgatatttcgggagaccctttacgtgttttggtatttaggagagcttttcagtctaattatttttcttcataattgtgtactatacatatgttgtaattatttaataagcccacctgtaatttttgtaaaaaactctgactagtttatagtaccaaaaataaagttaaaatagttgtttatcactctcgtataagaaaaaaaagttacgcatataaaaaaatatttaaatcttactgtggtatagtttttctaaatgaaaagatctccaaaaattattctggttatggaaagctagatgtcttccggaagggcgtgcctagaagtctaacttgaccatctggaagaagtctcgtggaatgataggtgtcatctcgaagggcgttttcatatgcctatcatgtccacctagaaggattcttcaggaatgctcatcttccttcggaaaagagtttcagatggctagttgttccctcttggaatggagtctaggatagttgactccagatatccttattcctatccaagaagaccctttagcgtgtgcttcggttcttaatccgagaagcatacgctttatccagaagtactttgtcttttactggcgtagagatatttctacgaggagtttgttaagttgtaagtaacttaacaacttagcacttgcagccaccgactttaggatatatatcctggatctataaataccaccaacacttaatatttttggagagaacaagatcagacgagtttttgagaggtgattttgagagagaatgattgagaggtatagagagagaggtacggagagaaaagaaagagagagagagagagagagattattgggtttagattttgtatgaagagtcttctgtagatgaagaagattcttgggtaagagtgtaagagatatacactttgagagaatccaacaaggtgtcaatctcgactgtattggaccatgttcttacccaattaataaagaggatttcagtggtgttccaaaactgaagtagagccatagaccacatcaatctataggacttgaacaagtacacatcttggtgttgactttattattttattgctttaattgtttctagtttttagatacttcgttcatccctattttgatctctgataactgtgttaattgtaaatcttatcattgctaattgtctgttgtctaaagttttatttgatttgattttgcatattagttgtaattttcccacaaatcgagcttggtaatcgatcaagaaggtagaataaagattctttctgctataattcttgaagaacacaattaacagtgtcaacagcaagattcaaattggagaagttcgatggaatctaaaactttgcgctatggagagaaagtttgaaaggaatcctagtgcacaagaaagtctccaaaattcttggagattagaaattactggttgagaagaaacgagaagagaaagtagaaatggaggagatggcttattacatgatcaacatgtatctgtccaacagtgtgagaagagagcttgtcatagaaaagacagctaaagggatttggaacaagcttgaaaaattatatatgaggccatgatcaattgctagcaaaattaatttgctagaaagataatatagttttagaatgattttttctctttcttttgatgataatattgacatgtttgatgatattattgtaggattggctagtataaatcataaggttgatgaagaaagccagaccattattttgtggagatctctcccaatcgcatatcaaaaagtcaaagctgccatcaaatatggtagagatgtgattgcgttggaggatgttcttgccacactcaaatcgaaggattttgaattacaattggaaaaataatccaaggaggaagaagtgtatttggaaagagagagatcccccaagaaagtaagttcaaaaagtaaacaccatcactctcaatcaagatcgaagtccagagagaaggaaactcgaaagtgttacttttgtggaaagtctggtaacttgcaaatattttgcaagaagttcaaggagcacaagacttcaacaacaatcacaataaagataggaaggacaaccaacatcatcaccataagaaggattcaactggagtcacggaagatagtgacgactgctcaatggatgaagaattattctccatctcagaatcctcaatgagcagggagtggattcttaactctggatgcatgtatcacatgtgtccaagtcgagaaacattttttgatcatagatcaattgatagaggtaaatttctaatagtaaatgatcattcatgtagggtcattggaactggaaaggttaccatcaaacagtatgatggtggatttaaagtattgatgaacgtaaggaactttctagagttaagataaaacttcatattactgggtgcacttaaagatgagggttatagatacaagtccatgcaaagaatcttgagaagtaccaaagatttcctgatagtgatgaaaggggaaaagattaatggtttatatgttgtccaaggagaaactgttctagcaggagaggcgaatttggtaaaagggctagaatcgaatatgtagttgtcgcatcatagacttgggcatatcagttaacatgaccttaaagaaatgcacaaataaggtataattaaaaatttaaattcttatgccttaccatttttgtgaagcttgtgttttagggaaataacataagttgaaattcactccagcaaggcatataactaagaagagacttgaatatgtgcatgctaatctttgggggccatacaaagtgtcgactcactctggtaagcaatattttctttctatagttgatgattatagtaggtgtgtttggacctatctgctagcaactaagaatgagtgccaggaacaatttagaatttggaaaatttaggtggaaaaccaaaccgatctaaaagttaagaaccttaggatggatgatgggttagagtttattaactctgaatttgacatgttgtgtcaagagtatgggatcactaggcatagaaccgtagcgaagaccttagagcaaaattgtgttgctgaaagaataaaccgaaccctgttgaacaaagttagatatctattgttcagttccaaattagagaaactattttggagggaagctgtagctactgcaatctatcttataaatagaagcccaaattgtgttatagtcttaaagagctcttatgaaatgtggtacaatagaaccccaaacctaacacacttaagaacctttgggtgtacaacatatgtacaccaatctattgacaaattggaacctaaatcagttaagggagctagctttcctaggttatgtgtaacaccctactagattaggcgtgttattgtcattttaatacttactgtacattttgttgctaatcaacgtgtttattaaaaaaagtgatttatttaaatttttcataattaaactttaaacttggatgtataaatactttacattaactgggatccctttttaaaattacaaccattttacaaaatacttaattacaaaagttgtctcctaacgactatcaaaataaagcttgttgccccgaagattgaatactccaggtctaaccaccttgttatgtacactcttcattagatcaagctcactgttgttcagcctttgtctttcccttaccaacacaagtaaacaatatttgtgagttgacacactcagtaagaaaagcataataaaaacataaacataaaccatattataaataggtgcccatacacccaatcataaccctatctcacgtcccacgtgtactgagtctagaacattcgtatgatagtactattgaccataatattagcctatacttggcactctagtcgtaccgatgtgataatgtcaatctgtactatgccaaacatatatccatcgctattcagtgctactctatgtacactaataccgccattactgatatgttatataacaggcatttataaaatgcacgctaaacatgcaatcacgtatgatattattatactaatcttaccttgattttgaatttaggtgcgtcggtcaaccagagtagaaattgttgctcgacgatttacaggctaagtcacaacatacgtaaaattgataatgatatgctaaatcactttatggggacttaaactgaaacatagaagtttttgtgttgatatataggatgacattatcctaaatatcgataaaatgtgaaaaaatagggttctcaaattgctaaaattggtaaaccagattcccaaaatggtaaaccgattctttgggttctgccagggaaactggttaaccgtttctttgcaataaacccaaaaaacttaaaaactaacttaaaacttccccaaatcaaaccaaactctctagaacaccaaaataagccataacaaacataatacaactgaaaattgtaagaaaaccccaagctcaaactttgatctttctccctcgtccttccgagaagggtcttcaggaatagctagcctctctttgggatggagttttagttggctagttattcctcctggaaaggaagttctagatagtcgactccagttggctctatcctatccaaaagcttcttcaacaagtgtctttggtccgtgatcccgtaagctcatagttattcccgaatgcactatgacttatgctaacatggagatctcgctcgaaggagagtttgataagttagttatttcataactaacttaacaactttatttcttgcaaccattgactttaggatcttgatcctaagcctataattaccatccacttaagcattgaagaggacaaacttcaatcagtacagattgagattaagagtaagggagagaaaagattaagaggtacagggagaggtacagagaaaagagagagattgggtttgggttttgtaagaagaatcttctgtagatgaagaagattcttgagtgaaagtgtgagagttgaaatactttgagaaaactcagcagataatcaatcttgagtgtaatgtacctgttcttgctcaatcaataaagaggatttcagtggtcttctaaaactagagcagagccatagatcacatcgatctaccagacttgaactagtatatatcttgacatttatttctttattttctatctttattgtttctagttttctttactctttttacccctgtttttgtttgattattgtttgtgatttgttaatcttatcattgtcaattgtttgattttttaaaatttagttcatttaattctgcactgttagtcataatttttctacaaaaaattaagccaaactcaaaattaaacctcctcgaccttgtcattgctttagtggtctccggaagaaggttcaacaatgttgtcattttcttcatcatcatcatcatcttcgtcatgatcatcaataaaactattgatggttttgagcaattcaagagatctctggcactgctacacaacttgcaaggtcttcctcttaatgagtacacgatcgttcttagaatcattgttattaacatttactatgatcgagggtttaaagtctaagaaatcaacaacctccatcccaacttgaatgaaattttttagccccaaattagaaatcagaaaccctagtatagaaaaatttgaaaagaattagagttgcaaccttggatctaagagtagaaggttgtaatctttgtagagttatagttgtttgagtcggagccctttgcttggatctcgcagaagaaaaagaaaagaactgcggtttgatggttgaagaagaaaaaggaaaaaaagaaaaaaaaagaaaagaaaaagaaaaaattatttatttaattattatcttattttttaaattatttttataatattttaataattattacgtgtaccactaaaaatttgtcacgtgtacacatgtctacacgtggctagcagtgtcggacccatcatatctcatatttttcctttaattaatcatatgttacatgtcccagccgtatgttttaattaaaatatttttataatttaataattcaaatgatgtaatgacaatgggtaatataaaatgatgatgatatcaattttgaatgatcgggatatacaaaagagtgttataatgtcagacttctattataaaaaagaaattttaaaatatagacgtacacttaacttatcatattattaaaaaaaaattgtataaaatgttagtaatattaatatattgcttgatttattttatatgtacatagttatacattttttagtaagataaaatgatagcgagttagtgaaatatgatgaacgagtgatataaaatgatgagaataattttaaatgatcatgatatatagaagagtgttatataagaaccatatcggacttccaatttgataaatacatggcgagacaatttatacatctaatttttcatgttatttaaaaaattatattaatttcttcgcgagttgtttactagtgatcctataataataataattataatttcttcaaattaaaaagaaaataaaaattattaatgctttgttgcatgtataacctgaccagcttattaatattatgaataataatataatcatttattagacatatataaagggacgagacagaaataatcatatctttgattgattaaaatccttgtcaaattaaggaacacacatgcaacaatttgatgataaattaataataaagagaagcaaataatggtactttgcacatgatgattaattaaatttaaccaaacaaacaataatacctcagtaccaaatactaataattaacaaaaataaataaaaaagagatttctttttttttttctttggagagagagataggcagctcgacatcctctcatgacgagtccaatcctgtaccaatcaaatttgcagacctgcactacaataaaacatttctgtgagtcaaatattcatgcaaattatatatagtgacaaacaatattacactcatttattaattttgtgtttttattttcttactacttttccattaaaataaaaataaataaataatgcttgattttccgtttcttgcaattatattttcaaaagctttaaaataatcattagatcccaaaaaaacaaaaacaacttgcacttttgttatcaagaactaatgcttctttccctagactgacttaattaattaacctcttgttcaacatatccatctttatcccaaaaaaattaatcaaccatatttatttatgtatagctagctataggttagcatataacaatattctttctaattcgtactaccaacttcacataattattaaaactagtttgacttcagaataagtcaacacacaacactatataaattaattagccaattctcttacaattataaagtacatatcactgcttgtcaaaatcaaaggagttttcacatgcataattaatgaaataaatatacattatatatatatagagagagagttgtacgtacttagattgtaataatctagagactgcaagtgaatcctttaggaggagtctttccacaagtgacaaggagctgaagagcaagaggaacatatagattcaagttaagaaccttaagtttcaaagtggtacacaaacaaacagctgcctcaagctcaacaagcccttgtagaacagggcagcactggttcacaacagggtcacccaatccaatatgaacaagcccacccaaaaggtccacacacgcaccaagcttcaaagtatcaatgggacaagtctcactgctgctagacttgggtggaggacaaggcttatcacctttccctgggctcgaaggagggctgccgccaccaccgataaccggaatgggaggaagaaggggtgtgactggtgggagtagtggagtaactggagggaccttaactggagggagagggagtttgggtacaactggtgggagagtggtcactggagggagagggagtttgggcacaactggtgggagagtggttactggtgggagagggagtttgggtacaactggtgtgattatgggagttactggaggaactttaaccggagggaaaattggacccttgggagatggcttaactggggtaccttttcctcctccttttcctttacctccttttgaagggggtttgccacagtagttgcatcccaaaatgggagtggctgaggaaatgaagagcatggaaatgagaagcaaagctgaaagctttgaggaatccattgtgtgtgttttctctctttctctttttttgggttttaataaagagagtgagagtgagagaaagagaggtaaagagtttgaagtgcaaagagggtcttatatagaaatagtagtgtgagtgatgagaaataataatgagaatgatgaagaggagtgaaagagaacaaaaaaacaagaaaatgaggactactactgatcactaagcaacatcacgtgaacatggggtaaacctagcaagaaaggcagctgtgcaatttttttttatgtttgataagtccaaattttgctagttggcaactatgtatatactatatgtatataccgtggatataattaactatactacttctatatatatttatgtatatatatttctaacttcgatggataatattaataatattcgtgttacatgcatgtttttgacgattaatttgtcattggcctctcgagtataaatacgtactattatattaattaatgatctatacatctatggttacatatgactagtctcaatatttcacgtcgttaaattatcaagttaaataacaatgagtgatatatatatatgatataattaatacaat

SEQ ID NO: 14884 - DNA, 5394 bp, Cannabis sativa
tattcagagtttacagtattctaacactttccccatggccctattaggttgaataattctgatttttcttaatgtgggggttgttgtgacgattcatgcaaaataaatgatgttagtatttagctgtttaattatgtcccagcttgcagttacatttttgtttcataattatgatatttactttggttactggttgtgtttggtcgcatgtgttttaacgaaaacaaataataatagaagtaaaataaaattttttgtaaatatatttattttctaaaaccaaaaaaatttctaagttttagtcaaaatcttattagattgttcatgttggggaggtgccaaattggcacgtgcattgctatctaaaacactcaaactataataagataaaatattttgattataatattaaaaatttaattttaaattttgatatttacagtgagtttagatattctatattaagactttatttaataatttttttcatttattttaagatgctattttttctttaatttttgctacataatatttactttaaattttacaaaacacatatattgttcttttgaattttctaaaaataaataataaatattaaagttatatattgttatgatttattataaattatttcttcacattaaggataattacgttataattgtgttattattgcaattaacgtattttttattattaataccaatgtagatatcataattttatatatacaactatgctttactaaccaaatacaatgatacaaaaattactttaataaaacgaatcattcatataatcatacttttaaattaattgtagaattttcttaaaaaaacaaaaacacaaaaccttttacgtggctcagtacgtaactttcatctagtatatatataaaccttaattatttatcattacactttttgggatattacatgaaaataacacaagaaaacaccatttaaatcacaaataaatttaataatatgtgagacaactaaattgctagaaaatgacctaacacatatgaagaaagacagaaagaatgaaagaaaatggcagcctagtattaagctgtgaaatatcagatttatttatcaacacaagttctgattaagttataaagttatgtttataacggtagtcaggaccattcagtctatccacggtcaaatgttgttatattaagtcttttctagttccgtttgcggccagacttcatttgcttcctggtattagatgaggaaggctgcttcgaaggtactggcaatacagttcctcctttgatgccatctgtatccttcatgctcttgagcgctttctgggcttcaagatagacactgaggtccctaatctgtgaaaccaccatcaaatgtgttgtgtaaatagctttctctaaagttacaaagagtgacagtaataaaaattgaagttttaaagatacattgaattgaattattacctgttcttccatatcatgtatcttttcatccctcaactctagttcggcagcttccctattagtgaatagtgacaaagtagaaaagatttaactggttagattttacttcacaacattatgacaggttttaatacaagagagtagtcatatctggtctataagtaatgccacctttcttccaaatccttgagcttcttgcgcaaaacttcttggtctttgataagatttcgattaatcttaggagacaaaacaaacaaaagataaagccagtataacagaataagagcctgactaacattttgaaaaggaaaaaacaatcaaatgaagatcggtaagagtttagggactaaaagagaatatagacagcttacatctgcaacagtatttttttcctctgtgcacttttccatttgatttaggatgtcctgcattttggaagtcactgccctgtctactgcttcataaattgtattgtccagtttacttttggcttctgttagtagagattcataatgctgaaaaaaaaaatagcaaaggaaagtttactgagggaaagggaaatacaatatacacaatcatcaaaataagtaacaggtcaatatgacaggaacagtactcacttgtctttgattctcaagctgattagcaaggagatggttatattcatccacaatctgttgtcaagtaggtaatctaaatatcagtacatgtcatgagaaagggaaaagtgataaacacttaatgaaaaatgagagcaaatgagtgttataggttctcttctaactaacaggttaaaataggaaatgtaaaaagctccagttttcatacgaaatacatactacatccactttgctgctatagagtgctccactaaagccagagtcctcgctacatgtgcagctgccacaatctccttcagatgacaagcagcgagagttcatttcaccaaacttgccatcagtttttgattggttaagtcggtgaacataaatatcaccaacataatcccagatttgttgtgttgttaagtcaagagaatagcagtgctctgtatccttccaatgcctgattgcatgtccttccttgtaccttcaaatatagcaataaatatcagcaactataaattcatgagaatcaaatgtaataatgtcaagctcctatgagtaatttacaaactcttgaaacatgcaaaaaatagctagtattaatttgtaccttccacatccgacgaaaccacatatcacacaaacccacagattctctgatgtcccacaaacagagcaagttggtccattatcctgctgctgacagtattggcaaacctgatcacatacaaccagaaaatttcattggcaatgtttcaaatattcacttataatgatgacaaacaatatcaatatgttttcaaggagtcaaggaccaacgcaaagagtacaaattaaagaactgtgatacattagtcttgagaaaagtaaattaattgcagttctgtctaaaagaatcaaatacttgaagaatgtaatccataaaacctggtcatccatatcgaagatttccaagaaattaagaaacaaaggttcagatttcggaaaaataagtttgatctcaaccttggtttatgcttgcaacgaaaaacactcgaagatggaattgttcaataacagataagtgaaaagaggagctccagttaactttacacatccattccataaagaaatataaataaagagtatagcgatgtaattatggtcaatagtcagagtcagatattaataaaagcagtatccattccatgtcctttctcttacaaaaggcagaataccctgataagaaaagtacaggggaatagcacacttttgggagcccaaaccaagaaaggtgccaaagaaaccagccaccatccttgaacggcaataacaatccctattgaggtggagttcaataatcaaaaactgacatatcatgtgaccaaagtttttggcaagcacatgctagatagccgcacaaaaacattgagatgaatcagggccgggcagctaaggcgaattaggccagcgcctagggcctacccagcctcggggccaaaaaaatattttctttttaaaaattatatatattttagtagttttcaaaaataccacatattttaactgaagggcttaataatttttatttatgtaaggccgacccaatctcagggccggccttgagatgaatgatgcagtcattgcaggcaaccaacagatatctctatttacaaaatagatgtctaattataacttttaatgagaaccgagaacctgctcaccgggcaagataagtcagtccactttgaagtgcaatggcattggaaagaatgatcacaaagggtactcagtattccactagtgtctgaatccaatctctctaacaattaccaaaagaaatgtttataagtatcaatccactagtctgcagaaaataaacaagtctacatttttttcctcaatagcaaaaatatgtaaaagaaatgctagacatcaggtgctaagccagtaaggaaaaataggtaattcttttgtaactcaccaaggcaaacagggcatgttggtaactcagcggacccatctggtggtgtcccagctatctcagctgattctgtgtaatccaccgaatgcagaaacagaatgtgacaaacctcagcctaaacaaaattcaaccgttaaaaaccaaggattcaactggttaaatcaaaacaacacagcctccacaaaaaacataagagaagataaccaacctctccgggtgagaatttcttcccattgagactgcaataaaatccatcagacgtcacctgattcataagcctaattataacgctgtatcgatcatccatcccatcgtttctgattaatgaaaaaacaattatcttaatctcgaattatcaaattatagattagaaccacagtgataagcaacatgcaaatcttctctaaccaaatcaacccagttaagagtttagatcaagaaaacgaaacaccataacaaaaatcatttcttgattatctttcttacctctcgaaattacccggaatttaaaaaaaaaatgtccaaaatcaataatacttcaccttatgaagacaagctcagtgatatgatcgattcgagagccacaaaatcggatgaaatcttcaaaggagaagtaattggggacggcaatgacgaagatggtagtggacttggagctagggtttggtaacgaagaatgagctatactccgaaacagatgcgttacacctctcctttcgctatacttggaaacagcagtattgggattcgattgagatttcttggtgttgatagtattagtagtatgaggagatgtataaacttgtgaaaactccaaatcctcaaaggaaagagggtggccggcatcaaccgagtggactcggacggaaaacatggttttctttttgctctgactagctaagcaactcagttggaaattgagagggagagttgtggagaagaaaaggaagaaataaatcaatttatatgccaaaataaataaataaataaataaataaaaagaagcagcattcgcgggaaatcgacggtttctttcaggtaggcatggcaaaataggacttttccgcgagtccagtccctcccaacgggttggggccgacccgctgataactctatagtatagagttatttgtagtgcttttaaattaaaatgatcacgagaaagagtaataaaagtgtgtttgtttgattaactttaattaacttttatctttattttctatttagtaagttagtttttaagtcttgtaactattattgtgtttgtgtggccacgtaattacatagtaacggtgtaattagaggtaattgggaggcctcaattactctctccaattctcatacccctatgagaattg

SEQ ID NO: 14885 - DNA, 4294 bp, Cannabis sativa
  modified_base (2945)..(2949): a, c, t, g, unknown or other
cattgttgagtctgatgttgaattggatgattctgatgttgtggagcccgataatgagcccccgcaaaaggtgaacaacagaaatattagttatcttcttcttcttcttcatttcgagaacttgctttatttactatttaactgcagatgggagatctaactgttgaggttacggaagagatgcaagatgcggcacaagatgcaaaatcaaaggctatgaatgctatttctgaaggcatgccatccactttatatgattagaattatcattttctgttttttgtttcttaaataattgttttccctttcaggcaagttggatgaagccattgatcacataacacaagcaataacattgaatccgaaatctgcaatattttatgcaactagaggtaattttgttataaacccggaatatatttcttctttcctttgtgttgaagtttaaccattttcttaagagccttattatcttcttgttttcagcaagtatctttgtcaaactaaagaaaccgaacgcagctattcgggatgctaatgcagctttagaggttggttatgtcttctgtttgtatgtgttttggagaagaataaatttagttaactatgatgcataagttatatgctttgttatatagatcaacccagactctgctaaaggatataaaataagaggtatggcaagggcattgttgggtcattgggaagaagctgctagagatttgcatgtagcatccaatattgatttcgatgaggagattgattttgcacttaaaaaggtaattttgctcttttgaagatgaaatctttaccgaaagctgttacttgattgtgtagttaaactttccagatcgaacctaatgctcggaaaattgaagagcataggagaaaatacgaacgtttgaggaaagcaaaggaggcgagaaaagccgagcgtgagaagcagagacaatttgaagcccaagtgagtagattaaaaattttaaatgggtgtttgattgtactagctaatctgtttcattttaatatttgctgaaaaaaaggttaaaaacttggaatgttaagtcaaggtcatagagggaaatcttgttatcctgaaaatccaaagctgctgatttttgatcctttgttttgacattgcatagttctgaattatgttcttgtatactagaataagagtgttaatatctattctaatgttattgctttattttatacaggctcaagaagcgttgtctgctctcaaggacggtatgatgttcgatctctctctctctctttggtttttttcgtaattcttttgtggtgaatgataccctcgaaacgccattgttacaacagtagcagagttcgaggaaacaccatcaaactaaaaccaatcgcaagaattaaactaaacttaattagaaactaagcaagaataaaacttagctcgagaatgaatgaatcgtgaatctttattgataagaatagttagtagtatacaattgaacacctctaaaaattatacctcaaaagattgaggttcaaacctcaattacattcaatctcacactgaagaacacttgatcaaatacaagtgtcatataacaatctctctctagacttagctctgaattctgaattatgagcattggagatgcctgagagagttgagacatacctatttataggtgttggtgaggttctgcttaagttggtgtcaaagccaattgttataactaacaacagtttttttctattttaactggtaagagtcgagatgaaattactgtcttgacatagatttagtgagtttaatcccaacatgttttcatattgtttaaatgtatgcggttttatttttcactctatttattctcgttggtggtgcctctttactttaaattggttgctctgtggtaaatcctatcgtctagttttctgttcggggtttcttttcgtatagtaattttcaagttccgattgtcatgtcccgtctgttatggcatgactgttactaaagttccaacttttcttggcatgactgttatggtgactagatatagttcatgacttttcgaaattcccttgtttaattttcggctttatttttaatcaaacaggggaagttatcggtatacattccataagtgaaatggagacaaagttaaattctgcttcgaagacatctcgtcttgcaatcctctatttcacagcaacatggtgtggaccgtgtcgtttcatatctcctttgtatgtcaacttagctagtaagtacacgaaagtagttttcttgaaagttgacatagacgaggcaagagacgtggctggacgatggaacataagtagtgttccgacctttttcttcataagaaatggtaaagagatagacaaggtggttggtgcagacaaaaatgcactcgaaagcaagattgcacaacacgcaggctaatcgtcggttttttttcttctcttgacccttaattctgagcttctttcattgtacatgtgaggaagttgggtccaaaaatttatatgcatatacatgtacatgtttaaagttagaaatgttttgtttttggtttgagttgagtttattgataaagtgttatatggttgatacattatgccatttttattttataacacttaaaataaatagatttctaacagtgaatgaatccacatgagcattatttatttatattaggataaatagcggcataagtattcaaagttttaaatttgtaagcgacataaatctaatgtttatttttaacggcatatgtacccagggccggccctgacttttagtgggccatagaaaaaaaaattattttgggcctttatttagaaaaaaatatggtatttttcaaaatgagtaaagaaaatggtataattttaaaaggtaaatatttttttttgggtccttgggataggtgggccctaggcacaggcctagnnnnnctatgcccagggccgggcctgtatgtacctaatgtttatcaaactgtaatttttttttagtttcgtcagtataaattttgttttgaatttattaaaagaacatttggaagtaatggatactacatgtttcttcttagactcaacgatctagaatctgggtcttatatgtgccctgtttaagacaataacagaatttgtattgacgaaattaaaaaaaaaattatagttttacaaatattcagtacttatgctgctaaaaacaaacattagatttatgacacttacaaacttaaaactttgaatattttatattaacattgttgttaagcactagtggtagtggtgctcaatactattgtgaagtgttgttttatattgttaagagtagtgtgttactatttttattaatatcacatttcactaacctgacaatcatatgctttgacttgcgttggatgccggactattcgttgaagataaaagtacatcgatcccatatgaagttttaccatgagcaaattttatccattgagaaaatataggttctatcaagatttttttttagactaccaatagcaagaatgaatggttaaggtttttacttttcataataattaaaaaaaagttaaaatatatagaatctaatatttaattatatcaatagtgatataacatttcatattagtggttgatgcttaacattttacaatcaacatagatatttcatatttttttaattttaataagtttatcgaagatatctcgtgataatagagactttctattttattttagttatttaacataactttttaatgatataattatatcgtatcttacattattagatattcttaagtaacattaaaacaagactaaattttcatgtaaatgattagcatataaatgaacactaatattgtcatacaagatactatataaaatgcaatgtagcaaacaagcatattctgtttatagctagattgatttgatcatacaattattaatttattgaaaaaaagtatatgataaataaataaatatctaatgcctaaatatattgaacacctcaaaagaggggatatacgataaaaaggtaataatgtaacatttattttatcaattcaaaaatataaatatttcttgtagtaaaatactagtaagttactatatcttcatttcctaacaattaaatgtttatgaattagatatataatgaaagcctagcaaaattcaaacccattggaaggtaagtacaaaccatattgtgtatgtatataaattgaacttttatgagaagtaacacaaactagagttactttttctgatagatttaaacacacta

SEQ ID NO: 14886 - DNA, 10999 bp, Cannabis sativa
ttaaaaaacataatacaacacaagttaaagtttaagagataaaaatcataattaacttaaattaaaatatattattaacttccgtataaataaaaaaataaataaacatgacaaatattaaaaaaatagtaaataattcagtataacaaatataacaataatacaacctcatattattattattattattcaccaatattttttttaataacattaccatctttttcatgcaaatttacaattatcttgggaataactatgcctgaaattcaatgaatcagtatggtatgaaattgctataatttttttgtgaatttttttgtgctttttttttttaaaaaaaaaaatcaatttattattaactaaaacattataaaagaaataagtataaattagtattagctgtttaattaaattatttgttgatgttctctaaacgtaaattaaattttatatatgtaatatgtcataattttctttttttttttttttttttttttttggacaaaacataatagagaaatatacatatttccaattgttaacaaaaatgtacaaagtgaaaaagaatagttaccaaaatctaaattatagcttaatgtaataaaggtccaaacgaaaagaaacttattgttattattcatattggttactattaatacatttgatttcattgcaaattctattaattaattattagttttacattacaattgtttacgtgtcttaattaggaaaatatcataaggaaattaacaaattaaaatgaatataattaatgttttgttattatataagtcaacaattcaaaatatgatgggatcaaatttctctcaatatatgtttttttttctttcttagatgatatgatagttgaccggtttatattgtaaataatatttatttatataataattgaatgttcttatgtgtataatccaataaaataatgacaacttttgtgtaaaaataataataattagaattggtaatttggtattctttgagagtttcttgagactttgacactattaaattaagtagtattaattaagataaatattgaaaattttcaaaactttatgaatttattaattaattaatttcattttaaatatgaaactgcaaattttgacactttctcttatgccttaatctaattagttaattttatcgtaaatattttacatatttagtggcatatcgtaatattcatctacatttattagtgggaataatgttcttatttatttttaatattaaaaaataaacctaataaattaattttaaaatattattttttccattagtttcaataattatcataattttacttttaatataataattttttaaatgatgcatatagtagtgacacatagataattattagcttttgcttcatattagtagcttttttttgttacttcaaagatgatataccttatataaaatcgttcatataatttttttgctatgatatttttttatatattttttttaattattgaattaaccaggtagatttcataaaggaataggagattactacaaattttttcaaaattctaaataattatatatttcatgcatctaatgttttatacacatattaagagtaatatgcggcataaatacttaatataccaataaaaaaatgacacgtagataatgacttaatatttaactattaggtacttacaaagttcaaaaaatatatctaagtttatttccgccaaaaattaaacttaagtatttatttgtaactaagaattaaacataagtatatttatgccgcaaattactccacatataaattataattaattattttaatttttttttaacatatataataaattattaaattctaatagaattatatattataataatgacataatatataggaagaaacacgttcaatgtggcaccagcagcctcaatattgatatggataaagtttttattgattgtatggaaatgatatgaattgattttgatggatctcaatcatgcaataatatattatattatattatatactacacaacttcatacacgtatgtacaaattaacttcacttaacaatgtcatcataacaataatcatcctcatgattcacatcatatatattcattaatctatctattataggactaccttttccaatttcattacaagtgtatagcatgattagcttatttaggtagcaaatcctctaaattttagtttgtttttttttttttgataaattttgaaacaattagcatttttgtttcttcaattttttacactattaaattatgaggtaatgttagagtttgggataagatgaatgcggtattttatcttaaaaccaattggtaattgaaagagtagctcattcatcttatatataataatttatttccacacattaacaatgtgagactaactctaatacgtaatggatagtagttaataaatcaatgcaaattaaatatctttcaccattttaacttcaatgattaaaaaattaaaaattaaaaatatatataaatataaattatattatatataaaaaagtcttttattattattcattcacgtaaaaatgatgattggtgtttgctttatatcaatttattaattatcattcatcacttcactcatttcacaataaaattaaataaaatataatagaaagattttattagtaaaattatattttaagtgatattattaacaagtcgaataacaccttaatagtataaaaagttttaaggataaaatactaattattctaaattttattatcactagcagtgcaagactattattaattatctcaaagcatctctaataaagtattataaaagtaatagtttacaaaccaatgatattcaaattggcagggatgtaaaaattgtattagggaataataacctaaattaaaccacaatatttgtcaaaaaataaaataaaccacaataaatattatttttttattattattatggttattcttttacaaccaattaatattattttccattttttttttcattttttttttttaaaaaaactttatatttatttatttaacattttttatatactttttgttgttattgcaccaaatatattggaccataattgtaacaattcggcaaaataaatattattagttgattttaagccaactttaataaaaattgcacaccaatagagttgtcctagcaccttctcgacatgtcgcgttgcgattggctaacaagactccctaaaagctattatattaaattatatgagacccgatgcttagttagaccaatagtaatattaacacataggaggatgctaggcaccactaatgccctttagcatttctatataaattattgatcagcaaaatggaaaagggacacatgcattaatataattgatgttaaaactggtatctaatattgtattaatgcctctctctcattaacatactacagactcgatacttaattatatcaatactaacactcctcattgtcatataccgttattagtgtaattaaatatcgaatctcatatatcttaagataatgagaattgctaaaaggcatcactggtgcttagcaccttcttcggtgtcatatcgctattggtgtaattaaatatcaaatctcatataacttaatataatagcttctaaaaaatatctctaattaatcgtaagacatcacctataggatgtgttgaacacaatagcaatgatataagataataacttttgaaaaatattgttaatcaatcataaaaacgtcacttataaaaagtactaagcactactgatgtttaataacaatgtactttctctttctcaaatttaaactagtatagtgaggtggcaaaaaattatataatatatttatatgtgtacccttagaaaagggtaatcaatacaagtgatcaatagggtgtgtgagtgagaggaagataaaagtttggattattggatgagaccaccaactctatatatatagatactatatatatttttttttcctttattatattttccctggttcatcttcgttacctattactatgggaatttgcaggaatatataatatgccagccaacttgccatgtggccaaaatgctgtaaacccataaatgttgatgccacaccacacaatctatacatatattcctatatctacatttatatatatacacagaaagtctttctaaaaaaaatatatatgattaaaatttattatttgttacatatgattgtgaagttcatatttctacatttttaaatgaataatattcgtacaaagttcaatattatgaagttgtaaaagaatagttcaaggacaatataattatactgaaataagacttttttcttttcttaattttcaaagttgtaacaagaatttcaattccaacctattaaaatttaaaaaataaatttacatatcctaaaataaaaacaattgaatcatgtatgtcagcacatttttttattatataattaacaaagaataagtattgtctgacaactttataaagattgttatttggttagctaataatgtgtcaaaatctaattataatgagtgaaagaaaaagaaaaaataaaatggtggcaaaattttgttagaaggctaaacctatctgattatatcattgttcaactgagctgtcttttttggtcaactcatgtagtaatcttgacaaacagacccaagtagtttcaggaattttgtgactaaaatgaatcattaaggctgaaattaagtctaatccaaagttatgaagctcacttttaactgccaatcggagaaacatcgctgtccagatatccggggccaaattcatagctcgtcggagagactgaaacccattaaggactctcatcaacatgtcatgttcctgaaaaagattatgagaagaatcaaatcagcacaagtgaacattattccggcttattttttcggggttgtgcggtagctcaatacgttagaaaaacatgaatgggaaacaaacctcctcgaaatttcttgctctaagtgtgtcatttagcatgcaaccaacaatttcatcatccataaaagcatcagcagcttcaattatatctcgtaacaggaaaacacgcactctctgaccctttctcgataaaatgaacagtaaaagatcttcagtggcggaaacaacagaatgcatgtcaaaagatttccatccgagacgagttcgtgtagtttcatccatatcagggggctcatcagcagatgcagaagcttgttcagatattgctgctatctgaaataagatataaatgtctgatgaatattactatacaattcgttaggattctagaataaagaaagaggagagaaacctactaggcgttctagtcggttccaccttatcgatccattgttgcgaattaaaagctccctcaaaattttcctcatatcaggattcgggtctgccagaagccttccaatcacaaaaggatatgcactctcaatgattttaaaatcaggatccagaacctttgcagtgccttctagtgatcccaatgctcttattacgagagcgtaatcaggaggaagagaaaattcaaattcatacataacatcgtataactgattcatgattccctggaaaagaataacaggaaacagtttaccataagcattaggaacatcaaacaatttttttttataaaaaaaaagactacgaggattccaaaatgctgtagttggttgcagacctggaaatcttgagaatgtctagacccatcaccaaaagtggcttgcaaggcatctgaaaccgattttatttcaactccctcaggaagaaatcccaaagaaaggaagtcatttgctaaacccagtgagtcacgattaacaaagtgcacaagctgaaaagagatagaaacttatcaacaaagttcacaagcagcgggaaaaatgaaagggatgaaaaagcaagaaaaacagtatttaaatcgattcttcacagatacattttcgtgaatatcctttgatgtttaatgaattctattagtgtaatttttaaagggcataaaaaagaaaggaaaatgaccatttttcataattgtcccagagtttttaccacttggatcagccccacacgataatgtcgtggaatatcacccatcattccaaaatcaaaatatgcaagtgagccacttttagtggctaccagatttcccggatgtggatcagcatggaaaaatcccacctcgagcagttgtctcaaagagcaatacaacccctataaagataacagaaaataaataaacaacaacgaaaatttaaagtaaatgcatcatagccagtaacaatgcctagtatgtcttaatgctcgtgctaacaaaatcattaagaaagagatgaagtattcctgcctaatacctggtcaattaaaacccttctattcaagcaggcgttcttcaggccattttcatctgtaagcttaattccatcaatccattccatagtaagcacagctctgcgggtaaggtcccaatatatttttggaactttaatacgatctcctattctatgatgaacagttcccccttctttagaatcttggtgactcgtttgggtgtcagctgcatattataatgaattgttagaaatcatcctaaatttgatttacacaatgaatccttagagtgtaaatgagtgatgcaaaaaatataataacaactcacttttttgttgttaaaaaatctactccaatagtgtgccaaattgtgatgcaaagatgtcacacataccaaaaagtgatccaaattttatcacaatatagcatgatttaaaatttgcatttattttaccattgtgttatttttaatattttattattaattttagttaacatgctcccttgcattaaatgacttgcattattattattaaattttatatttatctttacattattattgttattttataattttcaataaattattaagtgaccattaaataacatagtaaattttacatcaagatttacaattatacattaaaacacaatagtaaaagttgatgtgaaaatgtcacaaaactattttttgtgttgtaaaatatagcttaacttttcaatcttccattggagatggtcttagcatgcatggcttgcatttgagagtaaactcagtgaaagtagaaaaagctgcttcaattaaagttctagcatggaaagtacagacattttttctctttaaaacaaaagaaaactatcatcattaatttctttcctaaaacatcctaaagaaaaataagcaacctagaacagtaggaataagaaagcataagttggacatgagaaaaaagtaagtccacacaagagaagtagataaaaggtattctagcctctttaagatagaaacgttaagcacatatcttgaagaaatgatgttttagtaattggtcaactccatctatgactatgttagtgagttcgttgcattagttatattttttcagattcattaggttaatggaattaataaaactataccgaaaatcaaatgaacaaatacaatattagtgacataagaacttacaagggtataaaccgtataaagaagcaaatcgctcagcatttgttgcctcttgaatgtaatcaatttcatcaaacatatgtcttacctgtttatcaatagaaaccaagaaacattcatgagcaagattcttaagttaactaagaaagaataaaaagagggaaataaacagtccactcagtacatttgtgagaaattctacttaaaactaacacacaaaacaaaaagtgtggacctacaacactaatcttctctcacttctatgatgaaaacaattaaggcaattaggaataaacataggacataatcatattgactttcagcttcacacatgcatctgatgctataaacagagccaacataactagtattcataaatagaagaatattcctcataggaaacaaatatgcatcataagctcatctaaatagaagtagccaaacccaacctaataaaaataaagatggaataggctcaccatctcatttactgctactaatagatctttgcgggccttggcaaaacgcttcatttggccaccaatcatatgaaataacaaggcatcaagggtcaatagaagtgtcataccaggcctttgaaccttgacagcaactagctctccagtgtgcaggtgagctgcaaaacttgaagtaacaacataaaccatttagcttgcattctccaaaacaaaatatagagatcagctgaaattgtccaaaggtaaggaggtatccttgcaagtcagtccagagagcatagtgtgttttaatttccaaaaccactctctaacctttatagacctgccctaacgatgctgctgcaatgggctttgcacttatgtcagcaaaaatttcagaaattggaacaccaaattgtgtttctatggatttaattgcagtacgagtaggaaatggcggtatttgatcctggcagtggagaaaaacttcatagtgtaagaatataaaagtacaaagaatcataaacatctaaagcaagtagagataaaacaatccagcaacctgtagcttagcaagctcattgcaatatatagttggtagtatatcaggcctcgtgctcagagcttgcccaagctgtaattcaaatgacattggttaaccatgtaactttgaataataataacaaaagaacagagattaaatacttcttaataaatcaaccaaactagaactcattccattatctttacatcgctgtctttatcaaacctagaggttctctcattgtcaaatgaatcaaagaaaaataagatttcacatggagaaatgaaaaaaaaaatgataaatgctagtaactaaaagataaagtttaaatagacaactagctgaccaatcaagatcttaaacaatgagaaataatcagtgattggagcagtaattatgccttttacccaggtgtgaatgtgtattttcgattaaatggaagaataatcttgattctgacaaaattcgatcacatagtttgagagcaatcaatcatgacatatacataacagaatacaacattctagaaggaacatgaataatccccaacaatgcaagtaggttttgaaagtgattgaaaaactgatgataaaaaataattgtatcttgtaatatataaatattcacataatttcacccaaagataatgactaaccttgatgtaaaagggtcccaaccggatcaaagtttctcgaaactgcagaataatgcttatgttatgacacttgcatatcagcaatataaacagggatacaagcacaatggaaacaaatctaccaaccccattccaggaagaattacttttgtactatcagagtaaagttgaaagttgaaaccgtataaactcattttcaataatatgtgaatcagaagctagaaaaaagttacagactgtgtgacagtaacattctaacgtttcttcacattcagctgattgaaagaagagaaaccattacattcaaactaggatgagaaatcaagaatttaatcagcagtatcattagaacagttaacacacatattgaaataataaacatgacatgggcattgctattgtgcattagcatgggcatgcggtacccgatacttaattacaccctaataacgatatgacaatctaagcaatgtccttatcaaaaaaaaaaaaaaaaagaaacttggtggttagtttaccttgatggcacgtttttcaacatcttgaataaaaagttgccaaatagtgagcttaacaacatggaacgacacaatggctgctctatacaaagccaaaaatggaccaaaacggtagacagaagaaaaacttttggagctatatgtccctagagcttgtccaaactcactttctaatgattctttccgcaacttcgcatactctgcagatgttccttcaccatgaacactggtaaaaccagtagaatatctgcaccacagcaatggatttctaagcttacaaaataatatactataataattcagacaataccataaattaaaataacttacgaatgctggagtaacaagttatagggaaaccgattcaatggactcccccaaataaaaatatcatttttatatctcaatgatccacatttctgcaatatggtctctatgatgctcccatggcgcaaagctaaaattcataaacaaggttgaaagcattattatcttaaccaatgtatgaaattactaaagaatggttgcatttgtttccataaatttaaacatcctaaaaaatgaaatcctcaaattcccccacatacaacaaattgcagagtatgatatcacgatcatcatgatacagatcctaatttacattgacttatacttaattggtttatcctaaatacatctaactgatacaattcagaataacagtaaaaatcaaacaaaatattcacattgcccaaatatgtacaaataatttaattaaacatattcaagactcaatatagaaatcctacacaagtcgcaagcttccaatcagctatatttatataatcccaaattccaaattcggataaatcttcgtccccaaccaaaattcgatcaggcaaaaaaagtagttcaaaatgtatgaaatcaagaagagtacttgtagagggaaggcggcggcgatgacggttgagaatgggaagggcattcctcattgtggtcggcggaaatgaaaggaaaggggattgtagaagaagagtagtttagttcaggaaggcatagccatgggagagataattttgtatgagaagaaaggtgtttgttgaaatgcgtaaatgaagttttaattgtatgaagggaataataaaagagaaataatagagtgagtgagtgactagtgttgcgttgtgagtgtgcttggtggcccatcaaactgccacgacaggccacaccgattcgccttcaatata

SEQ ID NO: 14887 - DNA, 3625 bp, Cannabis sativa
gccgccgccggtttcgtcgactccgtcgactgtgatcggtacttgtcgagtattatctccgagaagaaatcttcacgccggcatcatcgaagaagtagctcccaaatcggagtatggcgacctcatcttgaaagtatctccgaagattgatttactttctttttactatttcttttttttgccggcgccggaatgttgactttttttttttaccggtgatgagtatgaccaaaaggatcaatcatgcaatggggccggttactttttttttttttttctcacttcgttttaatgtttgtgaggttgtttacggttttgtggataaatatatatatttttatttttactctcaaatttgttattatgatcagtttaaaattttctgtgtttgttgtttcggtcatgagatcgatttaaaataagttcttgagaaaatgcatatgccggagcaagaaggaaagagagagaaaagaaataacggttgtccttcattcatatatttaagcctaattaattaatatgtaattataagttgttaaaaaaataattataattatattaattatgcatatatatagttctcttctttatatatatctagctacttgatctaataatctgaagatgtttctgggtgggaaaagaaattaccaaaaatttcttgatgagtgtgtgtgtgtttttttacaataattttaaaatttggtttgttttatcacttttgaatctttgattgatcaaattattactctgttttgtgtttttgttaataaaatagtacacacattatatgcatggtaagtaataaatagcaaaaatataccgaaaagttgaattaagtaattattactctgttttatgtacttggggtttggtaaatattatagaacctcaaatatattcaacactttttattatatatggttaattagagacccatatatataattggcctatataattcatgattagttgattaatatgtttgatggtattcattaattgaccagcaaccaacaattacaactcatgattcaattaatttgtaattttgactataatctcttttatatatattgtccaacaaatatttaatagagcaattttattgtattgaaatttgaaattgggtcagtcagctcatattaataatatacattaaaaaaccattatgggttagttgtatgattggggcaaacgtgccatcatgctagtgttgagtaattagagaggctaatgttattgtatatatatgtattggaatccagggcatcatatttggttcttctatgcatggaaatttaatttaaatattgctgaccccattagtactttctttataattaattttataaagataaaaatatatgcatgttgacaattatatatgtctttctattgtaataattattttttcatagtgtgtagcttacgaattgagacattttattagtagcctacaaatagagagggaatatcgggcaggtaataactaaaacaactttctaatacaatattttttcgtaaaatattcatttataaataattaaaaagaaatatataggataataacacatatcattaattgcacaccattctcactctttttaattaattaattaattaattattaccaattatattattgaaaaactaacacagatatataattaaaataaaaataattatttagcttctttaataaaaatatataataaatgactaaggtattgattaattaaattttaggaaataattttgttaaagtatagtttgtagttgtacaagtatataaaaatttaataatgattttataagatttttttcatattaaactgttgttatgttgagttaaaaatcaaatcaaaacttgtgattgggttattattctttttttttttttaagaaaaaaaaaagacattattttttaacgaatattattttagagtaaatataccttctgtcaataatattgttatacgtttaatactttttttaagaaataatacgataatacatttaaattaaatacttatattttttcttttcaagtattaggtctcatcttataaaaataaacaaaatatatatatatatatatatatgttatcctaaatattatagtcaaatattatacacaatttttctcttaagaaatctatgtcaacaaaatacaagtatatgatgcttattatttttcttccatatgataaataattaattattaagtaaaaatattagaataacagcttattcatgaactaataaacttgacattttgatactatagtattaaacctcatgactgcggtaataaaattaatatttgaggacagaagcttcaaaccccttatgatttattttatttagaaataattatatatataataaaatagtataaattatcagcatataaatccaaaatttcttcccacacaaaaaaaaaaaaaaaaaacgacatcttcacgctacattgtaattttttttttttttggaataattgaaggtacatcgtattaaatgcaaacaacctggcaaatcttcttaaacgtatttcgtatataactcggtttcctcacttggattccctctttctccttctcccacttccctcaccacacacaaattcatcttatatattattttacaattttatacatatatagatataaatatagaaatatataatatatctacttataattaatatatatttgtaccataaccccctccatcggttcttgccatatttagatcctacatttccattttcatagaaacttttaatcatattttaacatatgggtgttttctctttataatttgtagcactaatcatgggattataatgtaattagttaagacattataaaggactaaaatgggagatcccaatgaactactcaagtactcattgagccttgaaaatgtattggttatgacaaaaaggatcttaattcacgggtccaatagcttaagtaaaagacataaatttatatataaactgttttggcatatcttgctatacaaattatttatattaattgtacatacttatagaaattgggatttgagtttcagtgtcagttggtcaatatggagtttattaagtctagccccaacaccaagattaataacttgaaattatatataattaattgcaccataaatcatgacagcctcagtatctaaaggagactcagtttcttttcaaagaaagagatgtcaacttaatttatttatttgagtaataatatataattaggcataatagaatggtaaaatgaaatatatgttgtccaaattatttaatatacagaaaagaaatagaagtgtataattatataaatgtggttattaattattgggaagactgagtgagccatatccttgctgtccttgttcccctggcaaactattagtagttgagaactcaatatcatcaaaagggaattcacttcatgcatgccctgtgttatctagatccatcaagccaagccagtcgtttttcttttttttttttaaaaaaaaaaaaatcaaaatatattttactattattatatattttggctaagtttgatggggatgtgagagatcaaatgggaagatcacacgtggctatatg

SEQ ID NO: 14888 - DNA, 6510 bp, Cannabis sativa
aattatactattttaattattaattcaaataaaaaactaaaatattaaataaaattaacactacgtagcttgacacgtaacaatcacctagtatatataaagtaacggttgatttcgatttattaaaccgatcattcaatgttggttttatttttataaaacttatattttattagtttattattttaaatatatctgaataatttttaataaagcttttgaatttgaccattaaggattgagtattttagaggaattaaaaagatagcataaaaaataatagaaagcaaagttttgagtattgttgctactacttttgtgtcttaagtatttagtaacaataaaatcaacaaaataaatatctatggtgcaattttcttttttaaataaatggataatagaaatatatatttgtgataagttcaatgagacagaataatatatgtatcaataaaatttagacaaatatgaaatatgacaaggataggttgaaaattactttttttttttttttttattacacattaatttaatataaatctaaaataattgaattgataaatactttttttataataaaaatacttaatatacataattcatcaagattaaagttcttagcacacataatgaggatataacctataaacttggtataaattaaaaataaaaaataaatataaaatgtaatttccttaatataatattgtagggataagaactcttattttactttgtctttaaattgtacctctatatatctatatagagtgtaccacttgtatttatagcaaataaattattttattagaagtactatagtctattaacaataagcattattgacaataatatactgtatatgatgtaatcattcgtaacacatttaaatatttcgttcaaaatataaataatttccaagcaagtagctagccatccatttcaaacaaacaaacaaaaaaaaattagtgaagatatttaggtaaaataaattatatatttttttcaagtcacaatatacattaatgacacatgtcccactctttcaacttaagagcaccaacgagaagacagaattaaacagcacaggccatagaacaggtacatatatatagtgtatttatatttaatttataaatgaaaaataactatatagtaattaattaaaatggtctcacaatatgaagaatattaatttggctaatgggatatgctatgcacttatttaaagaaaacaagcacaatgattaagtgttatttggtttgaaattttaattttgatgatcgaaacttgaattttataagtcaaatttaaataaacaataatgggtctatatatatatgaaatatattttgttcatatatatatatatatatataaataaacaaatacaattctaggagtgttatattgtacaagggcgtgggtgaatagtgcaaaatttgatataaaaaaaaatgaaggagaataagtggtgcgattgcgtatgttatgtatatataaaatacattatattatataattgttgttacgtagttagatagaattaatttaaatagtatgaggaaagggatagggcatgtcaagaacgtgttatttaaattgattttattattaatattacatacatgtcatgtatatatgcatgtatgtagccaaattatagagctcattgttatatatattatacatatatatatatatgtgcagtctcatctataaactatatatgcattaaggtgacatttggttgaggtaatgatcaatagaatagaattagaatagaaatcaattttattccaatattgatttccttcactactaccttaatagaaatgactattttaaaataaaagaaaaaaatattctaatagaatatatatttttatcaatttttttttattttaataattttcactctatttctaattatatgtgttttcaatcctttcaaccaaacacaacctaatagttctagttaaattaattcttaattgttggttcattattctcaatctctcatgtaatataatatatagaatatagaaatatatatatatatataaataaattatgtattaatttggcatatattggagaggtactaaagtaagtagttacatgttttagaaacccagcctagtattttgtaagagaaaaaaatgagtaataatgttaatttatttaatattatgaattagacacttttaatggaactagttagggttttaaactaaaataatcaagtgagccacggggtaaaatgaaattttcagtgcaaactcgtgtgaaaattaaatatatcatacataaaatacataatctattaaaattaatttaaagataaaacataatgcatatttcaacaatccgattctcagaaaccattttttctttgttctagaaaaattaagtcacaaaagtagtcaaattaaacataataataataatggatgaattagtttatgaggttttttcaacctcaatattttcaatcttgttttggtagctattggagaccatttatgtagaagattcttaaatataacctaaaagtaaaaaaggattaggaataattcaaccgatacaaaaacatattgagagaacttggataaaaaaattaaaataaaaaatagaacgtaaaagtttaaccaaatgtgaaaatagcagcaaatgttgaaaaaaagtctcttcataaaatctatatttatttattaatttcatgcaaatgatctcataagtttcggtaatttctcaaataatagtcaaataccgtaaattaattaataaattttttaatataaatatattaatatgcatgccccgggtgtgagagaaataaagaatgagctggtaagtttgaaattagagaaataataagaagtaatttacttattcttctcttatatttttaatattaattgtaataaaataaaaatgaaagaaacaacatttataattatgtcatctacaaccgacaattaataattattgtcctcgcgcgatgccgtgagacctcggtttagataacttattattattataattaaaatattaattaaaagtttcttaaaaataaagaaatgacttaaaagtgccgaacgtagagtaaaacgccatgcatgcattatatagtacatagagtaattaattttgaaaatatattaaaaacatttttctttcttattatataataacttgaatatttttttttttgagataataataacttcaatatttgttgtgaaaagaaaaaaaaaacacttcaatttgttcgaaataaacaaatttgagagtgttttttttaattagtatagattttttataaacatttttaaccttaatgagtattaaaaacatataggtgtaaatggctatataaattaataaagtatataagagcaactctaacgttgctctagaatttgagtttagtgcatatatattctctccacgatgttgtagctacagtgcatgacatatatgatatgaaactgtagctaggacatcgtttttttccttttcattattatttaatttatatgtattatttttatctataatatattgtgtgcataaattatttttttatttacaatcttaagtaaaagattattaaattttttgtatattttttttttaaaaatttacaaacattataaacattacaaatttaaacacaccaaaattaaaattacacacactaaatattcttattaatcaatagtataggcatactcaatattacacaatagatcaaacagaaaaattaatataatagtaaaaatatttcttagtgtaatttttagtgttgtggttagagtgaaaaactttttgacaccaaattttgtgctaaatttatatattaatttattaaaatctagcttaaaaatcacaattactaattatttaatggaaaaaaaataataattaacaaaacaaaataagaatttacatcttcattttgttagtataatacaaaaatatataacattttattttacaaaacaacataatgtcatggaaggttagtgcagaagaaagagtaatataaaataaaaggcaaaatatgtagagaaaaaaaaatgttgaatatggtggtaggtaggagaaaaaaatctcaatgagaaattggaaattagggaagaaaaaaaaaagaaaataaataaagacaaaaaaatctatataataaactgtatgatatggtgcagagaagaaaggacaaaaaaaattacaaaaaaatatattctatatatcctaattaaacaaaaaaaaaaattatatatatatacaacattatactttggattcccattaaatataaaatattaataaaatagtaataatattttggttaattaagtattacaaatctcaatagtgaatctgaatattccataaccagcgaagcacaacacaacgtgcaaaattttctaacacttttttacagttacgcgtgttacaaaattttttcatttagatgtaattatagtaaaattagatctcatgtcctttaaaatataaataattaattatgcttaatatatttttaatcaacaactttttgattagaaccccagcaatggagactttctacttccttttatttatttaattatttcttaaaataacaattggcgtgtctatggcggctctccaaacccttcaattttgactcttcaaaaaactcacatattgaatatttcaatttaggaactttcgtatatagaagaatatatagccatatatgatgatgagagttcatcttcagagctttcattttcaaatccataaaatctccagtactactgttctctaacaaattacataatgggtagaattatgcaactacaagagtcttcttctcggctccatagccgaaccatcaccaagctcagaatattatcagctcttttagttgtcgtaggattactcttcgttgttttctcagatggttttatgatcttcactactaattctttgaataaaaacagagacagagatatcattacttcttcttctaaggttctaataattaaatctgctattatcaaacagagtagttttcgtctttattccgtacaagacgacaatcaaaacgacgatgaaaataccaaaacgacgaagaccgtaatcaatccttttgttccaccctttaattctacagggagtgaaagaatagcttggtttcagaaaaaattgccggagctccatattttcaaatcggataaagcaagcaagaaattccacagtcgggttttacaatttttcgacccgagttgcgaagttcgggtcttcatgacgtggatttctccagcgacgtcgtttggtaaccgtgaattattgtctgttgagagtctcttcaaggcccatccaaaagggtgtttgattattctttcgagaactcttgactccgttacaggttacagaatccttaaaccactaatcgatcgtcgtttcaaggttcaacccgttacacctgacttgtcgtttttgttaaacgacactcccgcggaggcttggttaaacgacattaaaaatgggaatagagatccgggtgagattcctttggctcagaacttgtctaatcttatgagacttgctgttttgtacaaatacggcggcgtttacttagatacagatttcgtcgttttgaagcctttaaatgggttgagaaactctattggagcacagagtattgatgtggggtccaaaaactggtcgagattaaacaatgctgttttgatctttgatatgaatcatccacttctgttgaagtttttagaggaatttgcttcaacttttgatgggaataagtggggttataatggaccttacttggtctctagggtggtccgtagagtgcagacaagtcctgaacaactcaactttacaatcctatctcctatggccttttatccagtagactggactaagattggtgggctttttcagaagcccaaaaatgaggcccaatccaaatgggtgaaagccaagttgcgtcagcttagtggagagtcttatggagttcacttgtggaataaacagagcaacaaattgttgattgaagaaggtagcattattgggaagttaatctcagaccattgtatcttttgtataaatgtttatagttatagaaagaaacttttactttgataaaaactcatgaaatttcagcctcagcctcttcatcatgtacatgtacaaatacgcaaattttgagaatgttatacagtctcatttgttgatagacttttttttattcaaatttgtttgtaagttcacatgtttcccataagttcttgtaaatagagtttcatttgttcttttatgaattgttcaagagataatcaataacaatttttatataattctcttcttgtgaaatacaatcctaagctttctcaatctaaaccctttgcatctccaaaacccaaatcttggcaatctcctaaatgacctttttctagttaacttgggcttctttgctcttctattcttagagtcaa

SEQ ID NO: 14889 - DNA, 1246 bp, Cannabis sativa
ttgcacattacttgtcagtgacacagatcacatagtcatctcctaaatctagcacacatacaaacgttgggcatgataaattagagaggaaaaagaaaaagagccttgggtcacagtatcttctctgcactgtacattacaaacacacaacaatgctggagctaatgccaaagaaactaggtactccttgctgcaaccaatgaataagtcatctcttcctacgcttcggctcaacctgggcaaatgaacattttgaaaacaagatcccattacattttaagggacaaaaatagtccttaactgattctacaaaggcaatggcctaccaatagaccctggcatcaagccccatttccattattcaaaataaactattactagtaaagaagctcagtcagattagttgaataataacattcgaaaaagttaacaaagcactaccccacaaatacaaacaagtgttcaggtgagtgagttctcaccttagtctcgacagatggtgatacagggaatgcatttaaagatcttttggcatcatcatcagagttacagtcagaacacaaaaaatggtccagtttcttcgcttcttcaatggtcatacccatacaagagggatgaaacctacaaaatacaggatacagaactctattgatatccttgtacaaaaacatatatttaaataacattacctccatacgttatccaaaaacaaacattataatataagttataactactgtgacacccattttttctttaaaaatgcatgttgcagttgcaacctcaacgaatgtcccagccaacaacatgaatgggttgaaatgcatttgcatgatacacaatcattaataaagagttctgcagaagctgctatagtaatttactctatgtatcagcctatgctatggatagaaattctaatttgtacttccagttggaaaagtttttaaatttaaagatgttataaccatttgaagtttgcaaaattggaaaaatttgccaatgaagatctggaaaaatgttttgaataacaaaggtacaccaaagttgttaacagataattcaaaagtcaccttactactgctactcgaatatattatcatcaccttatctagcaacctatctaatgaaataaaggcaagttatttttaagtattggcacacttggtgcctaattgaggccaagaaacagttcaaaaaaaaaaaaaaaagagttgaggctaagaacctcaataccaagagatcc

SEQ ID NO: 14890 - DNA, 11466 bp, Cannabis sativa
cttaatgtttgttaagaattgtgttgggtttaatacatgcttggattgaatgtgcttgactagtgtggagtataaattaaaatatatatgtacatatatagctgtgttaatgattaaagacactagtacatgtgagttgcaaaaccaccacttagctaatgctcatgagaaacatttcatcatttcatgaaaaatgcaggatttgaagactaaatcatggctgaggagttggagaagccgttgcttgatcccgataattttaatagggaaggagttgatttggtaagtttttctttttcaataattccaattctatttgactacattttcaattgcatatcctataaaaaaatgttggtgcattttgttcttactaggaacgattacccttggaagaagtttttgagcaactaagaacatcgccggaaggactctcatccaatgatgctgaagcaagattgacaatctttggtcctaacatgcttgaagagaagccagtatgtactaatgtcttttttcagtttttgaaacaaagtaggcatagtcaaaaattggattaacatagtgagcaatttggctctaagtcatccaataatgtcaagttaaaaagtttattaaggaaaataagtttatccaaaattaccaaaatgaaatgctataaaggaaattggttctgtaaattgatactcatgtctcttattttctaaggcaattgattacttacatttcaggagaacaaaatattgaaatttcttagttttatgtggaatccattatcatgggtcatggaagctgctgctgtgatggcaattgcccttgctaatggtggagtgagtagatttaatgctgacatttactttctgtttattccatagttttctttacatacttaatcctcacatttcaggggcaaggtccagattggcaagattttgtagggattatctgcctactaataatcaactccacaataagttttatagaagaaaataatgctggaaatgctgcttcagccctcatggcccgtttagctccaaaaacaagagtagggtcctctttgatgaattccttagtctacgagaatatcgaattctttgttacataatcaggtcaattaacaatttttactgtaggttctcagagatggccagtggcaagagaaagatgcagcaatcctagtaccaggagatataattggtataaagcttggagatattattccagctgatgctcgcctgctagaaggggattcattaaaaattgatcaggcaagcattttattgccttttgttgagtaaccctttaaggcctagcatattccttttataattggacttatttgtagtttctttagatgagtttaagatgattggtatcacaatgtaagaatgtctaatactgttgtgtacagtcagctcttactggagagtctctaccagtcactaagagaacaggtgatgaggtgttttctggttcaacctgcaagcatggagaaattgaagctgttgttatagcaactggagttaactctttctttggaaaagcagcacatttagttgactcaacagaagttgttggacattttcagcaggtcattaataatattttgaaaaactagaaattatctatgtatggaaacctgagtacaaggcatgtaacattgctgcatcctcttctacaggtccttacctccattggaaatttctgcatttgttctatagctgtaggaatgattctggaaatcattgtcatgttccctatacagcaccgctcttacagagatggaatcaacaaccttcttgttctcttaattggaggaatacccatagctatgcctacagtgttgtctgtgacacttgctatcggttctcatagactctctcaacaggttcacccctttacaactatagtctgctgctttgatctttgttgtaatttacaactagaataactttcagttgtgtcactcagacatgggatattaatgccatggcataagtctcctgcagattccatttcactagttttccataatgatgaagtgtgaagtgttgtaatggttttatctctaatttgattagggtgccattacaaaaaggatgacagcaattgaagaaatggcaggcatggatatcctctgcagcgataaaactggaactcttaccctgaaccgcctcactgttgatagaaacctcattgaggtacacatgttaaaccatgcattatgtctactaaataaagaaatttcaaaagctaatgttgcatacatatacatttttcaggtttttcaccaaaatatggacaaagacacaattatcttgctagcagccagagcatcaaggctggaaaatcaggatgctattgatgcagccattgtcaacatgctcgccgatccaaaggaggtagggacaagaaacctgtcacttaagcactgaagtttagcaactactgttattttatggattatgaagctaaattacttgtttatttaggcccgtggaaacattacgcaagtacacttcttgccattcaatccagtggacaagcgcaccgcaattacatacatcgattctgatggtaattggcacagagccagcaaaggagctccagaacaggtatcaataagttcaaatacttttctttttcttgtatttaaattcataacatttgtagaaaaatctgaaactgttatcttttcatattataacagatcttaaatctttgccaagaaaaacatgagattgctgctaaagtgcataccataatagacaaatttgctgaaaggggattgcggtcccttggagttgcttatcaggtatgacaaaagtctaacattccattcctgaactggttatctgactctagtttgttgattggaggggcttaattgtgtgtttgttctttctactcttttaaccataatttatcttcttaggcagttccagagaaaaccaaggagggtcctggaggtccttggacattttgtggactgttgcctttgtttgaccctccaagacatgatagtgcagagaccattcgtagagcactaaaccttggagtctgtgtaaagatgattacaggtacatgattgcggcaggttctataatacagggttgtagatgcacatgtactaatttagtcaaaaaatattaagataaaagaccctgagaagaatttttagaaaacaatgatcattagttctggcttgtttacataggtgaccagttggcaatagcaaaggagactgggagaagacttgggatgggaacgaacatgtatccttcttcttcattgctagctcgtgataaaaatgaacatgaagctctcccggtggatgagctcattgaaaaggctgatggttttgcaggcgtatttcctggtatttctattatgtttttatttagtatgatatccaatggccttatacttaatacctactaattcatgtgattattgttgtgcaactttcagaacacaaatatgaaattgtgaaaaatttacaagagaagaaacatgtagtgggaatgactggagatggggtaaatgatgcacctgctttaaagaaagcagatattggaatagcagttgctgattctacagatgctgcaagaagtgctgctgatatagtcttaactgagcctggtttaagtgtgattgtcagtgcagtcttaactagccgagctatattccaacgaatgaaaaattatacagttgagtatcaatcttctcttatttacattcacattattataatattgtatagtcagtagaaattctagtctcatacacttttgttttgagcagtccgaaaatgtaattcccttgcatgacattatcttctgaactttttaaaattcagtcactgattaatcttgaacaatattgcagatatatgcagtctctataacgattaggattgtggtaagttgtgatatttaatttttgaagtgcttagtttcacttagtgaacttgagaacaaggttttagacattgatgctgctacttttaacattatcatttatgtttacacttgctgttacctgttgtagcttggcttcgtgctccttgcattgatttgggagtatgacttcccaccattcatggttttgattatagcaatactcaatgatggtaatgttcttggtcttctcttacaatacaacccttttcttttcttaataagctctttatattatttgatataaactgaaaaatagacctatctaattcgtgaaagaatgaaatttactcttatcatctagtacatgacaatttgatcatgtagtagaaagtaataatgtgtaaaattgacaataacttcataattctgtttcaaaaaatgaattatgtaaaggctagaaagctatacttaattctgtgacagaatacatcaatggattcaaaagtagatataagaaggtttttacattggccttttactggatatgccttagaactttatgaaagatcttactataatagagaaaaagctgttctatattaacaactcagaatcaaataagaactggatgacttttgtaataggaaccatcatgacaatctccaaagatcgagtaaggccctctccaaggcctgacagttggaagctcaaagagattttcgcaacaggcgttgtcattggcacatatcttgcactggtgactgtattattttactggctcataattgacaccaccttctttgaggtacattactaaacacacttaaaattcatatatttcatgagacatgatcaaaattgaatcctaatgttgaactgttttattttggctgcagacacatttccatgtaagatcattgtccagcaacagtgaagaagtctcatctgctgtgtatctgcaagtcagcataatcagccaggctcttatattcgttactcgtagtcaaagttggtctttcctagagagaccaggagctcttctgatgtgtgcttttgttattgcccaactggtacattgtcttccaaatacttataattttgtctatactgaacatatgaaattaagcttaaataatactgaatggaacttaattttgaaacttttaaaccaagcaaagttactaaacttttgtgcaatgttttaggtggctaccttaattgctgtctatgcacatatcagctttgcttacattagaggcattggatggggatggggtggagtcatatggctatatagcctcatcttttacataccccttgacattatcaagtttgcagttcggtatgctttgagtggagaagcctggaatctattatttgataaaaaggtcaggagatgtacttttattacctctgttatatacaaaattatttagttctttacgatgactttgttcttattattacttgattattttttgggggtgtatttcaatagactgcctttactactaaaaaagactatggaaaggaagaccgtgcagctaagtgggtactttctcagagaagtctccaagggttgatgtctttagatttggaaaacacaggaaggcgtaagtcttcgatgattgcagaacaggccaagcgccgagctgaaatagccaggttcttttacaaattgattcttactgcttaatgtttggatcagtctagtttgaatcttaatttttctgatacactatagcttagttttttgatcatatatgcaagtgaaaattcatttaacttctagtaaaagtataccatagttttatcatgacatcatgtcatttacctttcacagattgggagagttgcacaatctaaggggacacgtagaatcaatgatgaggcttaaaaatttggataacagtgtaatccaatcagctcatacagtatgaaacgtggagaagtttaccaatgatacaatctctaatataaagcaaggaatgctgcaagaactcatgatttttcatttttgaattctgagggaagaacccatatttagtccttttttttccctttcaattccaatttttagtcctctttcaaatttttatcataagcttcggaaatgttgtatacagaattattgttgagaaactcgcacaagaataagctttccaagagcctaggagctgaataacatagcccaaaataactcccttgtctgccttattaaaattttagtattcccctgtataaaaatattgcagtacaatgaaatatggacacatcccatctataggctatcagaaatagtaaatggtcctagagccaaccggtagccctagtataaccacgagatattatactgttatcatattatattctacctattttaatttaataattataatttaaaacaattaattactcgcaaaaacggcacctcgtggtaatgttaagcattattgtgattaatagcaaacaatggactgataaatcaaggcactgactgaacagcacaggtagaggccacatttgtgctgaacaaacatatgaatttagcatcagacattccattaagaaaccgtgatataggtacacatgtaagttatattggggtgttgtgttgtacaaaagcaaataaaacttggaattttcttatattcacccacaaaatgcatatgcaaaaccgaaaaggaaacaaaacaaggacattacccgtaacacaagcaaaatacctaaaagtgacttttgttcctcgtgacttttctttattaaggaccactggaccattctgcacatgcgagctgcaaaacagaaacctcaaagagacgacatatgaaggctgtgttcacgtcccagcctcacggagttaacataatctgttggaccatgtgctgagattccaggaagtgcaagtccgattttcctcaccactatctcaaaccacccttcgacgtagtctttcccgtacacgtatttcataatataacttcttatcaactcccatatggcattaacatacactgcaaaagcatttctcagctgaaagaaatttttgttcggttcctctttcaccttctgcacaaagaaccataaattacattaaataaaatagcccaaattaaatgaaaacatcgaagttaacatgaatgcatgaatatttacttgctcaacatagaagctgtcgtagtaaaggcagaccccaaaatggtgatacaagaacgttttgtcatcatagggcaaccgaggtacaagatcgttgcagtagaccaccctgatgtaccttgggactggactattcaaatgggattccatgattttccccagctccctgttaccaattctaggttgtccaaatgtgtagacacccaagagcttctgcattagctccatttctttgtgaagcaccagcactgtggggaacaatatggccaatgccccacctaaactgtggccggtgactacaaatttcgcgttcttgtgctcgtctagtaagcttttgagcttccttctcacagcgtagtatgctgacatttccagcatttctggttggagttgcccttcactcgtagaagatccaccttgtcctatgtcagatggttgagtgcgttttgaaacatcactgtcgtttgactctctgtgattcattagaagcttactttgaaatgttgtgacatcagttctgtttcctagacctaaagcttctatgaatcccatatgaacctttccgaaatttggtatctcataccatgaataatcaaaatcagtaatccaatcatcagcatcaaaaggttctgtgccccggaagctaatcaatatcaaatttgcatctttaggcttgtcgcagagtatgaatacttgagtggacggctccttttggaaatctatcacatgacggtgaaaattcaaaaatcaaaataaggaggaacaaatgatgcctaagccatggaatgtttgcgttaaatgattctttaatatcttcgactgtagaaaagcatattatttgttatggagatggttgtaaatcgtcttctctagtatgttgtaacttttacttgcctagttgtctcagtactctgtttttccaataaaaactaacatgaaaaggtgagggggaaagcatataaacaaggaaatactctttctaattgaatttggatggaaaaccacccacaatgaaataaataatatatttgaattttaggaagaaaacatgggtgaaagaaaaagttgagttcacaaaagaggctctaattattttatatatctactaaaataagctattctaaaagacaatatatacatgtgacaaaataagctacaacaaatcacctagccagtatatacacgtgccaacataagctattctaaaagacaaaatagaagaataaaggggattacaaaagatcatttatttacaggtaatatttggctttaacaaatacttacaattccagccgttgtaaaagtccacgaaatgcatctgttgtgaagttcagattaaccaagttagtgtctctagaaaacctcgtatagattcacttggtggccccctaaaatataaataaataaaattgaagagtgattgacaatctaacagctgaccttccagtgatggactacgacattattaaccacttgggcattctcatatgctaacttcgatgccataatgcagaggtccataagagcccgggttcctatttccacctccccatcaatttctctggctaagctttcccccttgtgaaggtctatccgcccatctaattgtccaattgtactaataaaagtctctgtgcccctcctcggcaccactacccttcctgcctcccaacacaaacgtaatcaaagaaaaaaaatcaatccaatattttccataacccttttgcctcaaatagtaagtagctctttccagaacttgggcagaataaattcttcccctaaaacaaaaatctaacataccatatagtttaatcagcattgacattgcactttccatataaaatagagcatagaaataaagtttctttatcagaaaatgaacatcttgcaatgaattgctctaaaattataaattttccaaattttgggttccggaatattaacaaacacatgatatgcacacatacatataaagaaataagtaagcaaatcaattaaaacggcgaggggagaagagtattaaagttaccacagacaatgttgcagaacaagccaatgaggttaccgttctgggaaaggagattaagaatgaaatcgagcagatatccagtccactccaagggtttcccaaataaagctatgattttcctagcaattatggaaacaacaataacccacctgttatctatgacctcgttacccaaaatgtcgtcatctgagctctccaagaacattagcccactaacaatgttacccatcaccgcgtagcgaaacaagtcaccaagtccacccttctccgggcgtacaaccacgtacctgaacccatcttcataaccgttgttttgttgtgacgtggaagccataactgctaacaactcaacccaactccctcctctggtttgactctatctctattattttattacagcgttgttcttccttttcatttttggttgatatgggaaagaaaccatttttatagataccataattctccccaaaagaaaaagaaaagagaaaagggctaacgattacgtgtaagcaggagaagccgaagtgtgcgtgcgtaagtgcgttgcagattttgattgaagtgccatatatatcattatggctttgctttggctcctattgcagatttggctttgatagtgtgaaatgacctgcatgaccttacttgcaaaaattaagactatgtttggtaggaagatacagagtacgaaggacagagatattagtagtagatgttgagaattataggtttaatctcaaaattaattagtgatgaatatgttattatatatatggctgaatactttttaattaaggttggataatgttctctaatatttctctcaaaatggtgactatttttgctcattaatttaaaatcaccttatcacatgtcgtgcaattttatttgttttatttttattcggatctcagacacctttagactatttgaatctcatgcggctaattaactatctggatatataggtgtagattgctaaggatatgactctaataacatgttaagaatcgtagagttctatctcaaaattaattgatgatgagtagagtaactatcatgttcttatatatgactcaataattcttaatccatatgggacaagagtactgcttagtacgtactatctctttgtggcgttttgtaaatttagtaatatttattaaattaaattaagtgaaatttaatatttaatcaagatatatttagttggtgttaggtattatatatgccttttattttcatattaaaaagatagtaactctcctttattcttatttaatattactcaacagaaaaaatatatagaaatattacaggtgatagcatcagttttgcatggtagcatcagttttgcatggtacctctccttttattttgttgaatatttgatattaggtataaagttgtaagaatagaaaaatattaataagtgaaattacaattttatctttttgatcataaatattgattactttttttttcgcttaacaatattaattacttttctctctctctcttactataaacaatagatatgtgtggaaatggttagccattgatgaacatgaacctgcaacagagaaggtaaaacagagagagagagagagagaagaaaggaaatgaaagagtagcaaagatagtggaaagacttgattcattgaatggaaaatgttacagcatttatactagcaatacagtggtaaaacaataacagaatcctaactgattcctacaactaactcaacaacatttaacacatgttagaaataagctccaactaactctaacaacctaacagacttaactgtcttcaacaatatgcaaccactcattccatcactcttctttatttactaatctctctcttctaccaaatatagtgcaagcaatgaaatataattagtattattttgcttgtttgttgttatgagatgatttatcataagtgtgtacaaaaatgtgaataggcaaatgtggtttaattatatgaaacaaattgtaccacttgtcaaagaagatcaaatagaatcatatatatatatagaagagaagcaaggttttgtgcccaaagcatatttgtccaagtctcgtaagaggtttttgctatactttgcttcttatgttgtgttacattgatagacttatgacatatgtcacatgaagaaagttacaaggaatattgtgctttagagaagttaagaaggttacaatattataatttgggatatatatatatgttatgattgtggataagataagagaatggagtgagtgtagtttttgtgaggtgtgtatattcgaaacattatctattatgtctgttttttatgctggtatgggtacatgtcatggcaaattgtataaattatgagt

SEQ ID NO: 14891 - DNA, 16490 bp, Cannabis sativa
aactagcaatacgtggctcggcacgtacattcacctagggtgtaaatgtatttattatattttctccttagaatcacaaacacgatttgaaagggctaaaaaaagttcttgaaaggacatttaacttgagttttgatattgcgcaatagtggttttcaaacggtttttataggtgttgttattagattaattagcgatattttttaaaaattattttttaaagttatatgaagtctttatacttaattacactttagagcactaaaaaaggtactaggcaccaagaaataataattctctaatctaagtgaaacgctctatattaacaatttaactttatatcatacaaagttatattagtacaccaaaaacatccttcaacatacaatctatgtttgtttgtatgtatatataagatatttgaacttttgtcttcccatacaaatacaatctcacagacctaactatttcagctagcatatattgtttatatttatttgagcatatatttgtaaaataatggagtatattattcaccattaattttttttttttaaataaagaataaacatatatttttgtgttataactgaaatttaaaattcaacttttcaacctatataattttgttgctaaaaattaaacaaatacaataaattaaatatcttcctcctttagtgttagaaataaaataaaaaatctatggacatgtcgattagtttagattatattttgaaataaaatataagtttgatgaataacatacatgagaatatgaaattaagatgtgaaaatgaaaccaccaattacggcaactcctaacacaaaattcagctcagttgtcacaatcactcatcaaaattgcaataaaaatatctcacagccctattttcgtaaattcatcacccaataatatctcactttctcttttttaagaagaaagaatgttctggaaactaaaatatttgaattaattaatttcaaaatcataatgaaatgaaaaccatttctaccatacacgtgtcatattccctgcaatactataccatttctgtcatctccattaagtattacgtgtcaatctatgattggtccgacctgagcttcacatgttcatacactcatattctcatgcggctcccacaccaaaaatcacgcaatattttgttttcccctcaaaactttttatttaaaaaaattaaattaatggctccttaagttgttagcgaatacattcctctaagagcgcgtgtaacaaatagaataatctggaagcctagcaaaacagtattgcgtgagaaaaacgcgccacaggaattggttaaaacggcgtcgtatgtcgacaatgatttccacaggtttcaaaaagaccacgtgttgactcgtgagagagcgagcggtcacttgcgcgtggactgttgttccttccttcctttcctcatattactgaaaataataacaaattcacaagtgggacccacaaaacgaaccagctgttacgccagcctgtacattagggcagctgcccgttctgccccaaacctttactctctctccacctatatataacacactctcaccacattcatctaaaatcgtctgcgcaattttcatatctttttgctccaaaagaaaaaatctctgaaaaccctaaatcgaaagaagcttaagctaagcattctccaatggcagcctcaacaaactcatccttgattgttctcgtggcagtgatcatcactgtcctctccgtcatcggagccgctcatgcagctgacgcaccggcacccagccctgcctctcctgcttcggcgatctcaccctcatttctcgctgctctggtcgctctcttcttcggattcgcacttagggcttgaagatgtttttaaattcgttcgatgagttggtatggatggcggcggtggtggtgtagagcggtttgggttcgtattagttcggctttcgtttagttttttttttttctttaattcgattttagagatttttatggtataatgtttggtagattgtgatggatgttatggtttttgtggttcagagtgaacattactagtattactagatatgtgagttgtggatctctgatctctttctattctatggtttgaaaatcattagtaaatattatatgttttttttgttacttttcatttctcaaattcttcctctaatgtgaatcgtgaattttccgttcgattaagcaattcagttgggctaaaatgaacaacacgaatgattaatgaaattatgacatattgtgattgtttagtggaatttgactaagatagtttctaataatgcattcttcaatagtatcactaattggcattgtatacaaatcaaacaaattaatttgtataccaatctctacaaactcaactaataaattttagaattaaataaaatataatattgaatggtaagaaagatatttgggaatttgataatgagtggcaaggtggaacttattctgtcttgtagtgcgccatggcatctacattacatttatatttaattataatatataataaattggtggcagcaccaaattcaatttctagtattgtattcaaataaagaccaatatagtatagttgtcaatgatattgtgatgtgatgatggacattccaccagcataagaggctcgtgtttctttgctataattcataatagaaacacaaacagttggctcagtaattgacccctccagctccacatgcttggttggttgttccttccttttcatttatttatttatagaatataatatataaatgtcaattacaatttcaagtattctaattaagggactcatctacatctattcttcattacatcgattacccaataacaaagcctacttataatgatgtggctaggcatcatattatatgatattaataattcatcaattttgtgggtggggtggagtgactggtttacttgctttggagttaaagtccttgtctttttctcacaaatacatgtttattcatcatatatactttgccatctttgacaagaaattaacttcataaatatatgtaattctgtaatttgctcttaacatgttgattcaaccacgcaattattagtataattatcctccttaacctctccctctctctctattcaaagttgtcattattattgttaatattttaaggttaattatgttgttcattcaaggggttaacaccaaccattggtcaaaaagaatatgcaaaaaaaaaaaacttagtgtaagacagaaaaacgaaaacagtaaacacttttctaatcagtattttatttttaaaattaaaaattaaaaatattttctaaaattatattttataaaattgtttttactttttaactttttaattaagaatttaaattttaaaaacaaaaaaaaaatattacttttaaaattatagagttttttttaatcaatatttggactacgatcccaatttagaccttgggaaccgaaccagatctaaacccaaacttagacccgcccccggtctgacccggtctcaaactcgacttaaataaaatcaacaaatgaaaatgaaatttacaaaatacatttttgttttttgtttttaaaattaaaaaataaaaatggttatagaacacatttttatttttcaaaaataaaaatttaaaaacaaaaattttacttttatttttgtgattaaaaattttaaaaacaaaagtgttatcaaacactaccttaatgattaatttgcggctaaatagactgcattttttcatccactttgatatgttaagtgcgaagatgaactttgatatttttaattaattggttcatatattatgcgctcttttactatttaatgataatctagtctctataactcaaatttatctcacatttttctttttcttaatttttttaatagtgtgaatatatctcaaaactaattaataataagaaaaataactcattcattcctactctcaaattggcatggatggcagtgtaatggtggtgtataatgtttggtagatacatatggatctctagcttttattaattttatggtttgaatatcattagtaaatattttaatttctttttttattcactatacgtaattttgttacctttaatttctcaaattctttccctaaggtaaaatcgtgaattttgctttcgatttaagcaattcagctgggctaggctaatataaatgaaaaacatcaatcaaaattattaaaaagatgattaatgaccttgtgacatgtgtgtttagtgagattggattaagattaagtaaggttcacacaattgtggttgtttagtactgccattgatataattattgtattcattcattcattcacatatgtaatttgctctgaacatgttgatccaaccacacaattattagtaggactatcctccttaacctctctatctctctattcaaagttgtcattattattgttaataatttaagttaaccttgtcgttcattcataagaaagaaatgcattacaacacaaaaacaataataataataatgcaattgcatagatagaaatcaatttagtcctggcttcaatacatggttgaaccttcggataagctttgtattatataacagccattcaaattttctctccttttcattttctttttataaaaagagaaatggacccaaacatacaaacaaataaaataaaagcaaaaaattaataataataataataagagactatattcctatttgtactgtaatagagaaaagaaaaatagtggaaaatgaaaattatatatatttataccagtggaagtttgagagatacacatatatatttatatatatatggttgaaaaggcggaatgaaatgaaccgaacacaaccgctgaaaacagtgattagagagagtccatttccttttcttttttagcctttttctttaatttgtggagttagaatagaatagaatagaataggctttctttactcagactctgactccatgtttcccattgcctttaatcctcttggtctctgcaacatcatcacattcatcatattcatataattcatattattacataattcaaatcagaaatgaaatgaaatgtaccttttttatgatcttcttctcccggacctcgtatctttctagggtcaagtcacatagccatgctcctggactaaccaactgtaaaaacaacaataacaacaaccatcattactcaaaaacaatcttcttctttcttcttctaatataagcaaaactataataaataaatctcataaattctttttgtggtccaacaatcatgcaatatcaatacaatatataaaaaaaaagattttacagaaatattgaattttgaacaaaaatttacaattttactgtgaaacacatatttttacaaaaaacaattacaatacaactgtgaaataacagtaaaaacttaacacagtacacagtatataacttacacagtattttttttttaaaaaaattatcccacagcaaaaaaaaaagtaaaaaaagttaaaatttcaccctaaaaaagacatattaagcataggcatgggggcacatttacttgagattccaaagaagaaaaaaggggcccatatcagaaatcaattaaggacacatgtggcccacccacattgtcaattccattccatataaatattcgcttcttctcgcgtgaaaaaaaggaaaattacaaagggagagggacacaaattcatattacttatattcatttaagacttttaaaattttgaaattttgccaataatttataatataaaaaacgtattcacacgtttatatgaattaaatcatacaaacaaaaaatagactaaaaaaagactgtattgtaaatttttttaatattattaatatgttttttaggttgacgtactaatattattaatattaaatatatttcaaaaaaactattaaattattagtttatatggaataaaaagaaaaaacaaataataaataaaatgttagatacatgatatgaagatggaggcgtgagtgagccccacaacaccatgttctactattctatacatatatgaacggttgaaacataaatatcaactcttttaattcaaacaaatacacataattaaaactttttatttaattaggtcccactcccaccactataaaactcaatttttaatcatgttaggttatcttattaggtacgccaaaactgacacgtgtatgtttagcttcctaagtgctctatttacatttttattttatttttaaggtattctttttaccaatttcaattttacaataattaaaaaaaacatcattgatgaaaccacacacaatgaaatgacatttttaataaatgaaaacacaggaataatatggaagaaaatggttagttactactttttattaactttttgagatttggtttatttttatttttttctgggaattttctcagaaaaaaagaaagagaaagagggcttacattgagtgtgcgttgtatgaatttagatcttttcttgggtctttgaggaagtttagaacccttgaaagcaaagaaatcttcttctttctccttattcgttaaagcaatcacaaacttcggaggccaaagagcagccgccgccagttcgccgcttcccgacgacgaaccaccaccaccaccaccacccttcttgctatcgtgcgccgtctccgaagaagctccagacttattgttgatgttgctgttatgatgatgatggtgattgttactgttctcgttgttatgatggtgatggtgatggtggtggttgttgttgttggtggtgatggtggtgatggtggtggcccctcctttcttatcgtgcgcacccctatccggtgaagtaattcccctaacaacaccaccgttgctatggcctctcatggcagttgcgctctctgagtttctgagctcaaaacaaaaaaacatataacaaaatcaacaaagggattcattcaatcaatccccaaatttaatttttcaattttcaaacaaaaattaacaattttttttttagaaaaaaaaaagaaataaataaatgtaaaattgggttgggttaattttatttattctgaaatgacggaattaacctttgggatataatatgaattgaagtggatggggtaagtgaatgaaacaagttatttagaagagaaaagtatggacaggtttttcgtggaaaatgggggaaagactcactactattctctctctctctctttctcttttggctttctctgagggaccttttgcttttcaagagatgggagttgtttgttaataccaatatttactattattattattgtgatcttttgctttatttttctttaattaaaaaggtagatattttagagagagaaaaaagaagggctaagattgtgaataacgtgcacaactgggtgtttagggtggctatgaaccgatagattaaagagtgtacctttttgaagattaagagagagagagagagaaaagaagagcatgtgatgatggttttggaatcaacggttcaaatagacagaggggtttgtaaacaaaaagagtgttgttttgggttgatggacacgtggaacccagagtttgccccattacatgtttacaagtgttgtttaccactcactactactaatacttattataatgaatgaatggatcagatgcaagtgagctgtgatcaagtgcttttcctctattacacgtcacatttatgtatatatatataattacacaaacaaactctctctctctatctccttcctagtggactctacttttttatttgacttattattaaagacaacaaacaaaacaaaaacatggaagctttatcattaaacaactaaagagatagagagaaataaaacaaacatcaaattcaaatttcaatctttatgaaaagagaaaaggtaaaatggcactactactagtactaccacagcacctaattcataatacaagaaactaaactctacctagttctacacgctagttacaaattcattcactcattcttatataaaaaagaaacctaattttcccaaagcccaactcagcttaccaggagggcctgagcctgagcctgagcctgaggtctcactttgagccaaaccaaatcaaatatatctgcacccacctcacctcacctgatcaagtgcaagtaataagctttcggcccaaaagcaaccactattttgttttttccaaatccaaaaccaaaactctcttcttatcatcaaatcaaattaaaaatagtcaacaaactatggcaatggagagtggcatctagacaggcccaaaacaaaggaaggaacaaataaaagtccaactacgtacgcaaccttatctatctctgctctgaaacatcaacaaacatgcttatgcttatcctatccacttgttttttttttcttacctcaaccaaatgtcaatcacatacattttcaattttaaacatacttaggttaggttaggttaagcaaccactgtttttctacaaatagaatctaaagtcgttacaatccttctcacacaattattaattttttatttatttaaacctactcaaatagtcaaatatctcaaaacttaagatattttccaaattcaccccacaaccccaaagcaccaaatgtttcatttcatagttttacattcatcaaattttatgcctacttttgtttttttttttttaattcaataatacccactagtttcaacaaatcattattttcttcccttattaccaaaattactaaaaaaaaaagacactgtaacattttattacacacgtgctaaaataaaaacacagatctctatgttaaaatccaattcaatcttaaaatttacaagattaagaataactttggaccccacaaaaacccattttgtaaaatgacaaaaatacccctcaattttcttctacaaaggaaacaaataaaaaagaaaggatttttacctaagaatccggtgagtagtaggcggcgaagatggcctgtgacggagatttaaataggcagaggagtccttatcggctctgacaaccctacgatccactcttacggtggtccgattaaccggagcggtggctgtggtggtgttggtggtggtagagtcgtctttgacctggaccttcatacacctgagtcttttccgatttccccactgtaatacgaaatctgaggctgaagttgttgtttgggatctgagagtattatctgaactcgctctcaatagaaccgatccatcttctccgattctttctctatctctaataatattattattattaatattattattattatgagaatggttgtggtgtctagtggagtctttgtccatttgcttttgtacacctgtaccaaccaacaaaccaaccaaacaaatacccaatttttattatttaaccaataatttctcccactaacccaccaaaaaaatacaaaaacaaaaacaagttgacccaaaactcaatttcgaatttggatttcggatttcggatttcggatgtatatgtatgatgatgaagatgacgaaaagtgaagattttgtggatcggatggatgaaaacgataaagggtaagttgtgaatgatgtttgggtggtgagaaaatgttgtgaagaagaagtaagtacccagaactacgattctcatctattttccaagcaagacgcttattatccacaccgccaaattctgatcaaactaattatagctttgctcgaactgtacttgaattctggagacaacaagaaaaaaaaaacacaaacatggattgaacattcagtacttttgttttctttctttgcttaattttctcggaaactaactaacatatttcatctacaatcaaccccccacccaaaaacaaaaaacaaaacagaaagagaaacaaatggtaacatattacggtaaaagaaaattctgaagagaaaaaggcttcggctttcgttgcaggaaatcgagaacaacgaatcaaagggggcaaaacgaaaaggggtgaaatgaagaagtgggaaaagattagattggaacctaaaagtagaagaaaggatcaatagacaataaccccattccacagagacaaagaaagagaggagctgagaattagaatacagtaagaagaagaagccatggcattacctgaaattccagatgatattgtaaattttatgtatccgaaaaagaccgaaaccaaaatccagttaagaagattatttctgtagaaaaagaagaaaccaaatcaaagagttagagctttccatttctgtaacaaagcatagaaaaagagaagagcgaaatcccattttctctgatctatgactcagagcatggatttcttacctctgttactcagatttgggcgccgccgccgctaccttcatcctcaattcagacaacaacttctccgaagagctcgagaagattgtcccaattcggagaccgaatcacttgggtccagaacgatgattaacacttgttcagattccttcaaagaaaaaagctttcaaatctcttgaaaatgtacctgtgaaatggaaattaaacaaaggcataagttaatacagggcgcaaaatctatgaaaggaagaaaagaacgacgctttaactcaagttttctcaatactgaagagaatcaacaacaattttcacaaaaacaaacagttcaattaccattaacaaaaatggtgtcagaaactactattttttgaattgtttctgtgtgagaaaaaaaacccagaaattaaaccgaatgagattatcaaattatggattattttttattaaaaagagatgagaaatccagctatggtctccaaaattaagaacctacgagactaagttttgtccctggaaagcctcagatcctcgacatttgacagttagtcctgtttggctcgtctgaaaacaagatagaaagtagaagaaaatggaaaaatggaaaattttcacagaagaaaagaaaagcacagagaaagcttcttcttcttcttcgtcttcttcttcttctgattagaacaacgaaatgctctctcaccctttcaaaccttatattatataccacccttcataaaacgccgttacattataaccgtctaactccctgcaatcctgaccctccattcttcatccaacgcttctgatctcatctctctctgtttctcccgttacgtctcttaactttgacgacgttaatcgtactaaacggaatattttacgtcgttatgttatgttatgttatgggcctccttccttccattacattccatccatccatccacagcttttgtaataattaatttaaattaaattaaattttgcttgtgtgaaatgaaattgatctaaaatagtttttttattattattattttgaataataattgttgtaaaccgggggggaaagagtggaaatagtgaagtgaactatggttaattaattgaccggggtcattggttacttaataggcgctacctcacatcaatgaatcttcaccatccatattttgtccatgtggatttgattgtttctatgtttgttttaaattaaataaattattacatgttacaataattagtgcatatatatcactaaacatgtaaatgaacattttcaactcaataacggaccaataccacataatatacaaatatgtacacatgtgtaggtttttgaacccccaatcttggtaaaaaatgccaagagctccaagagttataggtaattttattgtttgttcttgaattaccaatatttatataaaaaaaaaattacattatttaggagcctttaaaaaaccaatctagggtttcatctccatggttagggcaatgcctctatctcttcacgtgatggtgctctagttgcgagactttgcaagatgcgggttcaagggaagtacggcaattgttgagcggagttatttatttatttttgttcttagcaatcgcggaaaactttgattcgtgcttcaccgacttagatggattgagctcaatactttttttcgttggagtgtgcttagttgttgtaaagatttgtgcttgttttctttttacgctagcagtgaatagttaattttcgcttagctgtgtatttacttaatatatggcatgtggtctattgtcttttagttcagtcattatacttgtattttagttcgctttgtttgaataatggtgtttattattcttgttttatcaaaattttgttttaaccaagttaacagtatctcgtaagatattatattatttttgaatttttttaaattatgactactttttgttttaaatttttagatttgaagtttatttttgtcaacattattggaagattgtaaaactagtggaaccttggagaagttgcatgtgtcatgtagtaaggctaaccaatttaaattcaatctacttcaaaagaaaaagcttttgccatattcaaacattattttataatattctttaaaatgaaattaataataaaatttcctcagcaatgtatccatccacattatataaattgacttaattatcctgttaaaggcaaggcaccactgttgttcccacaagtatattttcttgtgaagttgatgtcttaagctattttaagaaaagcaattagaaaataatatgtaaatatatatgagtattgatcttataattatcatatttttttttattataatatgaagataaaattattgaatcaaatctcacattccaaatgtgagcaatattatgtattgaaacaaagccaaaagacatgtaataattattattactagaagtagaatttaatttacattaagcataattaggtgtatatgattgacaacacaacacatgtttgaaattatgatagaaaaagaagtgaatcactgaattgtaggactgaatgttatgacgtggatgtgatgacgtggcatgggaaagtaccaatacctatacctataccaataccatactgcaaagacattgcctctgctctcatcactttttttatttcattttttaaataataaaataaaattggatgtggggtgccccacagtaagaacgccttgagctccactccactgaatttgaatgcttcacctaacaaagttactcttttctttagaattagatatttgccaaatatattggtttagttatcatcctattccacacaaaacaaaacaaaattcaattattattattattattacttaatcggaatctaatcattcattcatgcattctaatcaccccctctcctctttcctcctcaatatataaattcaattaatattaaaagcatatgattctcttcttcataaatcaaggaacccttattattattctaattctaaacataccactactactctactaactttcctcacacctgcaacacgtgtcaacaccccattgcctcatccaatccaactctctcttctcttccttacacacaaacaaaatgcaacaaattcattccaattcacttttactatacaattctaaacaaaaacatacgtagagtttagtttagtttagtacaatattagttcatgcattattagcataagacaagtatagattgcttgaatgtgatctgtacatacaataaaagcaatcaatcagttatgtttcaacaaatcaccattcattatatatttctttcttctctctttccttcctatgcttcttcttcttcacttaagcactgaatcccttctgcagagaactccaatgggttgaaggcatgtttacgcaagcttctgcagaagcctcggccatcttcttctcgttcactccagcattacacatgtttgcaaaggacctcatgtgtttcatgccgtattgggacagagatccacagtgtgtctcaaatgtcctcacctgcattgcacataacaaggtcagactagtataacatcggttatgaagagtgaatgaatataatgatattggttggaagtagtaccagtgtcttgagacatttccaatcatcaacaagtggaagtccagaagagcgaacggcgttgagaacctctggaccattcttaattccaaacaagagctttccaacaagtttcacactctcatctaaatgcattctgtgtgacattgcttcaagaaactccttctgggctttgattttccttggtgagccttcaggagcctttcgaaactgcaaaaggtagaacaacaagaagaaaccgagtcaaaggggaaagagaatatagcataagcagacacaaaatgtgtagacaaggagtttaggatgtaaccttatcccagaaatggacgagatcagcatcacgctggttaacggcttttgtaggtggcctcaaagagttctcgtccacaaaagtaaaattgtcatttgcaggatttgtaccaatatagttgaagagactgttttcgctaagcccaacatccccatattgcatcacatgagacccataagcagaattatcactggatgtcctcttcttaacctgaaaatagtaatgccaaccaaacacaattacttcatttttgcatcatgaatgatactgaaaatactacattttagcatatagatatcaaaagcaatactacatttattcggatagcaagcttaggaaggagttctcaccaattcatattgctgatgcaaagtttctgtccgcatattgtgtacatcactgtccataatatcaagattgttaatacagcttttgaaaaatggcatcttccacttctggtattaccaaatctatctaccaatatgataacaatccaatgaaaaaacaaaataacaaatgcaaatgcttaaaatacctgtcttccatccaagcaacactgtacaaatcgcccaaacaggtttcgtattctggtgggggactgggatcctctccagggcagtaagtaccccaactgctttcatctgcattcgaagcagtggttgcatagatattcaaaccctcagggagaagaccttcgaagatacttccagattcacaagcttcaaggtaaaacacctgcaaattttaaattagtcccaacccagctaccatagaatcaaaaagcatcagagcatgcatcaaataagaattagtaacttaccaagcttttgtaggtccctaaagcatgcttcttttttaaaacttcattcagttcatcagcataaaggtaaggaacggtaggcattcctattaaagagaatataaacaaataagataagagaatttttttcatgatgcagtaaagctgattgtactaaatcaagaataaatatccacattcatacttcaaacttccaaggatactagatacagtttaacaaggttgaactcgacagcaactcgatctttcaaatatcatgctaattaacaaatttcaggaaggatgaagaacaaaagagacaaacaatatcatcacttagatctacaaccaactatgtaaatcatgtggaaacaggatctaacaaaaagaagttgaattcatagaatagagaactactaaccaagaacaccaggaccaccatgatcagagtagtagacaaagatatgatcattgggaccactatctacaaccttcccactaccccctttaatggcagttttatttccgagaatggcagcgaaaaagttcccaacagtgacatcttcaccagtataatcctgtcaacacaaaatcagccatgtcaaggatacagcacaatacaatacaacaaaacaaaccgtttatttttaaaaggaaggcagaaaaactacctttggaacacctttatagacatcacccccatgtgggtggttaataatgactccaggccttgggttctcttcattggaagctatatcatcatacataaacacaacaatgttctcatcctttaaaccacctttcttcaagagttggtaagcatgacatatgtcagcctgaaaccaaaaacccacatcacaaaatttatgcttttattaatttaagaattcaattatgaacaaattttatgggatgatgacacaatatttaaagacaacataactaacacagtgaaaccaaaaccataaatttttcacaacaatcaattcaagcttagtttaaaagcaaaatcaagctctagaatgtttaaataaacaaaccaaaaagcctagaaaaacacataaacagatttaataattcttattttattttttctaaagctaataagagaaagacccaatcatgaggtaggaagagtaaaaggtgaaacttttaagacctgatgcctgtaattccaatacccatctgaaccagcaatcagaacagcccatctggtcccgacggaatcagcatcgtcggcagcagaattagcaggtcggaaaaatctggaagcttgagagggcaatcggagaacatctccgactagttcccggctaccggaggcgattacagatagagcaagaagagataggaggagggtgacggtg

SEQ ID NO: 14892 - DNA, 7187 bp, Cannabis sativa
  modified_base (7126)..(7127): a, c, t, g, unknown or other
ataaaagttaaccaaattccagtacttttgtaaatttcttttttttttttatgcctaacaaaaacaaatgcccattatttagaatttcgaccacatgtgcaaacaattgtaattataactgtaagttgagataattttattatgggtaaaaaaataaacgaaaataatactatatccattatgcatcgtacctaaagtacttaataacattaaactcatcgaaaagaaaaagttaaatttataactatagaatacatatttccagaaactaactttatttaagaacgacaagttaagtgattaactttacctaaataatttttacattttgatttagattctttttgatttagattcgtgacgactgtgcaaacaattataatcttagctgtaagttaagttaatttcattatgcttaaaaaaataaacgaaaaaagtgttacatccattatagaccgttagaaaataaatgaaaaaaaaactatatccattacagacggtacctataatgcttactcacattaaattcatcgaaataaagttgaattaataaatatagaatacatatatccaaaaactaacttagaacgacaacttaagtaattaaatttttctaaatagtttttaatttttgatttagaagcgcaaccacgtgtgcaaacaattaccatcatatagttgtaagttaagttaattccgttatacgtaagaaaataaacaaaaaaaggtactacatccattacaaaacgttagaaaataaacgaaaaaagtactatatccattacagaccgtacctacaatgcttaccaacattaaattcaacgaaataaagttaaattaataaatatagaaaaatatttccaaaaactaactttatttaaaaacgacaactataataatctaaaggcggaatagtaaattttaaaatattgcaagattagacggaaaccctaaaaacaataacgtactagtccgtcgtataaacaatagagaggggcaataagtaaataatttctttcatggggcctaagactgcaaaatttgtaaaatcaaaggggtatgactataattttgataaaaagtcaagtcacatttttctcgtaggtcaccgtaggttacgtgagcatctttcactacaaaacaaaccaattacaagatgccacgtggacacagtgaaggacccttgcttttgttcagaagcctcgtgcacgacacgtgtcaccctatagatgcccccagaagtactctttctttctctctctaaaaaacaccacattcaaactccttctgtccctcccttttaattctctctctctctctctctctctagggtttctcacagtgaagaacaatcagctggaatttgctggtaatgatccccttcaagctttttctttgtctagttcagtatttttttacttggatcgttctgttttttgtgttattttctattgtgaaattcttgtgtttggttttctgggaattgggttgagaaaaatgagataaagattgcttttttattttgggaaaatgagaactttatgctttttctggtttaagggaatattaatgggattagggcaactgttgtgatgttaaaaatttgatctttttttggggggttttctattagttttgcagtagaagattagggctttgttaaggggaaatatgaaatcatgcaaattttttagctttgatggttactggtggaaaaattgagtgcatgcattcataataaaaaaataatttaagggttttttttttttgttttgtttaatattttgggaaaaggaccccttgaaaaaaaacttatatattatttgggtgagtaagtcttctttgtgtttattattcaagtttttaccaaagggcatgttctaaatttctaaaatggacaaatggtgtgtttattcaatcacattttattttttgtgaccaaatgtgttgatctttgtaaatggtgaagatctccacagtaaagtttactttttctatactaatttgtgtttaaaactcttaatctagttaaggctaattgacatagttcacttagtgttttggttaaggaaaaagaggcatgcaagttttaaaaagtgatgtaaataaggtttaggtttttctttttttttttttgtatgaaaatgttgtggaaggaggagatttcgaaaacatggaattgattctttgaatagttgtaaagctcgaaaacttgattagtactcttagatttacacatgaaatatgctcagttattctcattcagtagtacttgtattggcaggtgctttataaattgtattgctcagcattgtaatgtcgaaataatcaggaaaggaaaaaaagcaagcgccttttgtgatcaaccatggatcaatcagaacaagcacaacagcaacagcagcagcagccagttgtgggtatggtgacaggttcgggtcaaatgtcgtatggtccttcctcgtatcaaactgctcccatggtggcttccggtgctcctgctgtggctgtaccttccccgactcagcctcctgctaatttctctaattcatcgcaccagcttgcgttccagcaagcacagcacttccaccatcagcagcaacaacagcaacagcagcagcttcagatgttttgggctaaccaaatgcaagagatcgaacaaacaactgatttcaaaaatcacagtttaccgcttgcccgaatcaagaaaataatgaaagctgatgaggatgtgagaatgatttcggccgaggctcctgtcatattcgctaaggcttgtgaaatgttcatcctcgagctgactttgcgttcttggatccacaccgaggaaaacaaaaggagaacactacagaagaatgacattgcagctgccatttcaaggactgatgtcttcgattttcttgttgatattattcctagagatgagttgaaagaggagggactcggggtccctaaagctacccttccggtggtgggatcgccagcagacatgccatactactatgtcccgcaacagcatcctgctggaccaactgggatgatcatgggaaaacctgtcgatcaagcagcaatgtacgctgctcaacagcctagaccacctatggctttcgttccatggccgcagactcagcctcaacaacagcagcagcagcaaccacaaaccgatacttgaacctgtttagagggggtgtaatgaggagggtaccaacctgagcttgtttcggcattgttggagatgggtttaaatttgtcctttagtttgtagtgaaatcagtagtagctttttaaacattagttggagtttgtgaatttgtgatagaaaaatctcagtgggttatgacattttcatttgcaagattgtatcatttatgggcttgtgtttagtcatttaaaattaatcttgggttttgcaacctttctattttctttcctctgagcagggagagcaatttagtttaaattttgcttcagcagatgatcttataaaccccattattttagacttagagaaaatgaagactttaagataatctgaaagaagttaaatttaaagaatatactaaaattgatgactttggttaataatacaatgcaattttcaaagaaaaatggtaaataaaatctattcttttttctctgatctctttgctgatcaaaaccagctaaacaaaaattatacttgatgacatgacagaggcactgtaaagaaaatctattctgtttgctcagcttcaacttcaatttcagcttcagctgttcttttttgcctttttctctttctacttctcttgtctaataatcctttctctgctagtgtctttcgcttctgttttttccgttctttggctttctcttcaaagccatcgtccctcattttcattatcgccactcgcctggcactgtaaatctgcacatcaatgtataaaaataatgagcacatttcgaaaatgagagatgatatctttttaattgtttggtcaacatgccatcgatcgaaaagccgttcatatattttcagaacaatcaacatcaccagctttgcattcctaagtaactgaacatgacaatttaaaaatcacatctttgccaatgccatgaaaataaaagcaccaccaagatgtcaatggaaggcataaccattaaaacaaacttcctagtgagttgataattaggtgagtgataaagcacaagccttttcagcatgtacttgataacaatctacaatactcagatccatgatccaatgtctaatcaaggagggaaaaaaaagaaagaaacttagaagagacttttatgaactcttaattgaataggtaatgaattagataccataagtgaaaactaccctttttacaagacagatcaaactttacctttcttatgtcggaaagcacctcgtgttctttgcattgaaattcttctaattgtttcccaataacagcttctatttcgtgaacaaggtctacatcagtctgcaataaagcaaagtataaataataatattaatttaaaggtaaaaattgcaataaaaatcaatgactttacaaaatttcggttattctacttacttgggaaacaaagctgatagccaaccctcctctgcctgcccttgctgtacgtccaacacggtgaatgtaatctcttggaaacctggacgagagcgctgttagattttacattaaagtgcttggcaaaaacaaccccataaaagaaaagataagaatctaaacaaaaaccttggaatatcatagttgataacaagatcaactgttggaatatccaaaccacgactggcaacatcagttgcaagcaatacgggaacctttccagatttgaagcggtttaacgcagtgagcctgaggggctgtgaattgaatgaatgcattgccacagctgtttgatcaagatgctcgagtaataaactcaattgatgacaagttctgcaaccatattaaacaacaattcattgattgaaaaagcactcaaaggaaaattctaaatttcatggagcaatatcttttaatgttaaagaagatcaaagtaaatggtgaaaaaaggttcagatttttttcaaggttaaggactacctgcaagttgagacaaatatcatggcagaccgaacacccatatcttccattttagacagaatatgaaccagataaacatccttgacatcattcggtacaagaagatactgctgcttaagagtatcaactgtcttaaacccttgatattcttcataaaagtatgccttatttggagaaacctccagtagtgcctgaaggttttcagtcattgttgcagagaacaacaaagtttggcgtttctttgggatgcactgaaacaccattcttaactcctcttcaaacccaacatctaatactctatctgcttcatccaaaaccagaaactgatgcaaaaacagagtaaatacaagcagtgagttcacatataatgatgcaaaatctaaattcttctaccctctaccggccacatgagacaattaaacaactcgtttcaggaaatttgcaaaactaacaacatgaaaatgttaaattagtaaatttatatggtcgttttgtggtcagcatagtgtaatttctggtcacacaagcaaccaaaaacgttgttattttgctaataaattttttcataaggctatttttacaaaaagaaaaactcttactggtttttaaggaaaacttcgaatacatgatttccaacatcacaaagtatttgcctagatcaatacaaggttacatgagcttaaatacataaacactaaaaacttccaaaatcattcttggagacataatcagagatttctggactaaaatattttgaaccaaaaaaaaagccattttcacctttagtattaaaaccaccactttctaaggaaaacacagaataaataactcccaacaacacaaagtattagcttgattcattacagacagtatttttgtaatttttttttgttgtttttgtgtttaattttttttttttgggaaattatcccttcattcattcttagagacataatcataaatttctgaactaaaaaacaaagcttcttctttaccttagtattagagaagaccggaggaatctcagaattctcaagcaagaccttaagtctaccaggagtagcaataaccacatgaggcctttcaaccaatttcttcatctgagtaagcatatcttctccaccaacaataacagcacaacgcaagtgtacagccgaacccaatgccctaaactgctcagccaactgaaacgccaactcccttgtcggagtcaccacaagcgcgaaaaccccataaggatccgccgtcagccgatgcataatcggtagagcgaaagccgccgtctttccactaccggtctgggccaatcccaacacatcccttccggcgaggattttgggaatgcagtgagcttggaccggcgtgggtttcttcatcccgagttctttgcaggtctccactgcccattctgtgagtccgaggttcttgaaagttgtggtggtgggacttggatcggcgtctgtggacctctcgaagtgtggctctggattggaatcggcggcggtaggtttgggtttggagagaggtttagggttattggagggtttaaaaagagggaaactttcgtttacttcatcttcttcttccatggttttgatggattgagtagattgaaaattggaagaaccagaagtgaattaagtaaatgtatgtattgaatatcgattaatagttctatgaatttttcttgtatggttgaaattttctgggaaaatttacatagaaaagttttagggtttaagatttctcccgctaatgacaatacctaacctaactaagtaaaagtttcttttcttttttttttaaaaaaataaattatctaattttgttaatagcaactaactaaaataattgtctgtattttaaccagagacatctcttccaactttttttttttttgaaaataaattcttcattaccccaaatcaattacaaaggattaggcaagtcttacaacaccacaagtctcgcgcaaggggaaacaactccaatccacatagctctcaccttgttaaacaaagcgtaattggctaaagcannggcaacctcattggcctcccgatacacaaaagaaacaccaacaacagaaacatgtaacat

SEQ ID NO: 14893 - DNA, 6385 bp, Cannabis sativa
gctcattattataatcatactttacgagttgccgaaaatctcggtcaacaatatatatactatatatatgttaagaataaaatcgatttatatatatatctatatcgggggttggatatggtgtggatagtattattcccgcccccgccccatccccgatttgggtattgaaattgtctcccatcaccgccccattaaccaccaagacggggaatccccaccccattagaggcggatccccgcggtataaattttcatctctaactacaagtaaaatacgctaatcacaaaagatgagatacaataatgacaacgagtgagatacggtgatgaaaataagtgagatacaataagacaacaagtgagataaaaataataataatagttttgaatgatcgagatatgaaaataatgcattataggaaacactataatttttttctacgcaaccctatttatttatttttataaaaataatttcttttaacaaagtaaatattacatataataaatttcaaatttcttaataaataataattaataaaattgtgcatttaatttttagtatataaaataagataatatatttataatcttttttatatattataattatatttttaagtaattatttattataatattaaaaaaaattaaatcttcacagcgactatattgcctagttaattttaatagagaagacaaattaggtagtgttgaacaaacaaaagcaagacaagagatgaagactaggcgacttctttttagcctcctttctaggctgttttggttctttggcgttttcttgtaattagcctcttgttgctcaaaaataataaataaaaaataataaataaaaaataaaaataaaataatattaaaaaagtgtaacttattcagaattgtaattgtgttaagactaaaacaaacatctaatatatccattgataaaattaccattaaaagaaacataggaacccctataaccagagtagaacacatataatgtctcagcactcatagaaacatagctaattgaaacttaaaaggtgataaaatgtttaaatccacaaatattaagttaaagtaaaaaaaaaaatacctggaatgtcttaaatctcttttttgataaagaagtattgtcttaagcttaaacaacgtaccgtttcatttgaagtgtccttcaaaaaagacaaaaaccgtttgctggttcaagaacttaaaagattcacatgagcaagttgagtatggataatagaactttacagttagagcttttaaattacttttacgttgcctacaactataaacagcttttcatgagttttacaacaagtttgaatctaatcaaagcttataacagatacattcaacctaagtttttttgactaccacaaccacatagtataatcccccccgcttaacgaggtgacactgaagacattgaattgtgatgagtacaattcgcacagcaagataaaaatcccatcagtcccgattgaacaggctgcgcaatctccctttcccttctatgtaaaactttgacgaactcatctaagcttaggcatccatcgtggtttgcatcaaacaggtggaaaatgatttctaccacattgctggtcagatctatgccacaaacctaatctcacattcaaaacatcatattaaaagattgaagtaagagattttaaaatcctgaaatcccggtatagaaagaagtgtcaataattatgtgcagagtctccaaaacataagaaaggaacaagggaagacaacttacatggaaggcggcacgttggaaatcttctcttgttaaaaatccatttacttttccataactgaataaagccaaagaaaatggctgcaattttttgcgaagctcagcaaaacttttgaattcctccagtgaaatgcgcatgtctctaagatgtggcacatcgttcaacttatcagcttcatcaagcaattttttcaaatgactcatgtcagcagaagcaaccatggatagtgcaaagtccttggctgatatggttcctcgttgtttgtagtcataatgatcaaactctagtctcagtatctgcaagatacaaccacatatttggatatgagaaattttttaaatatggaatgatagtgaaaaagagagagaagtcctcctaaatcagaaaaaaaaaatattagattcagaaagtttaaatgcacaagttcaatgccaaactaataatggatttcaagcattcatatatgaaagcagatatcagaattcacaaaactgatcaccgaaaaattccatatagaagaatgctggcattcagttcacccttgtgcctaagttccaattagcttccactttcagttttaattttatttcaacaggttaaacaccatttataaccacataaggttcgatgagatctgaaaacatgcagcatcacatacgtgcacaaatactgaatgccatcttactccagctacagaaagttgtattgctcttaaacagattcacctaataatgcacgagtccttgataccaactacacacgtcatagaaaattgatgattcaaaatatagtgtcatagacataagatctcaataactaccgtgagggcactttattatgataaaaaataattttctttaagagataattaattccagaacattgccccaaaacacgtgtttcattaaagtatattattcacaaagatgaggcagaggcagaggcagaggcagaggccgttgtttgaggaaaaaggcagcagaagaggccattttgttactcttggcgcggaagagcgttgaatattttgcgcaagaaattggagttcaaagtagacacgtgaactaataagaatacgtcctaactcatttctattccagtttctctataaattgcaataacatttactgttttagggacttttttccctttcgagttatctactgtgttatttattttctactgaactcttatcaaattgtggagagatcatgtactaactttaatattggggagttttcttctcagttgtattcaaggacaccaccagttgatttagtccactgggtgtctataattaaggacagagggcttgcagtgggaagaatttcaatatttcttaaatggggaagttgatagtatttggaaaattaccatagaggagaggctagcacaactacgtaacccctctgattgttagggttccaatttcagtgagagagagagctgctgtatggaagctaaaaaaaagcagcaatgacaagaatcaaggttgaccagctgaggcagaagaacaagaccttttgaacaagcttagggatctcaaggctgagctccttttccttccagtagccaaggtcatcggcggtgccctaaacaagctctccaagattaaggttgtgaggcttttaagtttggattgctcgtgtgttgacggtgatatcacgaatgcataaggctgctgtaaagaatgtttacgagaacaagaggttcattccactcgatctccataggaagaagatcagggagatttgcagaaggcttacaaagcattagctgttcattagagactgaaagggaaaataagagagatgtctactcccctccctgtgagaaggtaggccatcaaggtctagggttttagtggaccaaaatttgcgttaaattttattctgtaacttcgggaggacttgtctcaagctaaaccaggttatatttatttttcagaaaaataataataataacttcataagaatattttctatacgaaaccaagaacattactatcatatgaaaattcaaacttctgaataatcaagggaaaggaaagagaatagcctacttcatcatgcaaatctttcatgaatttgacaaacttatcatgtttcaggcgttcagttccattttcaccaaaaaagtactccacgaggcctccattttcaaccgaaccattgctttttagcccaaatcgaagtccatccctatggtgagccccctgtctgttttgtgctcgcatcaaagccatcactttcttgaattcatccttgtctatctccctatcaccatgtgaataattcattcatcagaggacgattagatgcgtttgaattctatggaaacaatacaacagcatcatgtcatttcatctaaatacaaataaacactcaacaaaaaagtactagataccaccataatctaaacctagcaaggtcagccggttctggtttagctataatctcatcatttctagaaccagagaagacaaatggcgatagcagaagtcaaaacaatatttttttaagaacaattaagctctaagctgctcctatttgctacgttactgctgtcatggtgggtgtaggtagggagagactaatttacaacaatcttttcttggatgcactaccttcaaataacacctatatgatatcttcatataagaaatacaaataaagagtaaagactgacccattattgttgatgtcaaacattttgaatgctactgaaaagcttgattctgggagactaagcagtgttacgaaaaaaatgtacctgtagagatgttatgtattaaagtcaaaatagaaaacaccaaaaaaaaaaaaagctaagatatggaaacttactctttaaaagaaatatgaccatcattatttacatcaaatagcataaaaagttctgaagggtcacaccgtatgtctccagaacttctttcccccatcagatacccatctctgaccaggtgagattcagatggagggaaaacaggaacaactgctcgcataagatcagcaggtttcataagtatttctccttccgaagtacgacacgaagcaaaatactcaaaaaccttcaggaaaagggacacaacaacacattggcatgagatgaacacatattaaaagacctgaattcaactaaattgttcatcaatcaacgtaaaatgcaattgcacattttgtattcttagagttcataatcatccatattacagcagataacaagtacattttggaatatctcaaactaaaaattaacgtgaaatcaagttacctaaatacccaaacaagaattatcattaaatcataacacagactaactaatgatgttaataactgagaataattaagttaagcttacacacatcacatatatcattggaaataaaataccttctcaggaggacttcgcaaccttatacgcttctcatagttaaagaaaaccctcctcctatacgcttctgcaataaaaaattatatatatatatatacatacatctctatctatgagcaacgcaaacatgtatatttttacaaattaaatattgaatttaatgtaatttacctccaaaaatataactagcgctatgtgcaggcagagaaagtttctgtaacaaggaacgcggactgtgattctgcaacgtcacttctgaatctgaattgacggtagaacagtcagcgaaagccatagatgacaggttaaagaaatcgaaagcggaatcggtggacgaagacgaccaatagagaaaccctagacccgaacccgccaggatacccgaaatccatttacggaaagagccgaatgtagggatttcgttgtgactctcgatgataggagttgccggcaatggggcatgaacttggcgggaatggatccgttggatcgatgttatgcggggaatcgaaggtgcggatcttctcatggcgaggattttgagtgtgtgagctacgagtaagtagagtagaaatggacgacatttccttataaaaggttaactaccgtaccgtgtgagattaaagcttaaaacagccgcggagagtcgtttggataataggaacaaaacgctgtcgtttagaaactgccttttcttttgttataagataacggaaacgcaaaccaggggcgcacctttccccgtgtgcctttaaaaacccggaattggttgggtgggactcgcccacacgaaactaggggtcctatttttttttgaaaagaactaggggtcctatttaactaaagagaaatgataaaaggcaccagctgtgtctaatagcctcttatgtgtcaatatcgctattagttaaattaagtatcgggtctcacataatttaatataatagcttttaggaagtatcgctagccactcgcaacgcgacatgttgagaaggtgttaagcaccactaatgcctaatagcaatactcttaactaaataatagtaaatttgagtttgactaaacctaaaacgtaagcaaagcaaattgtgttatatttagaaaaataataataataataataattagcatatttgccccttgaactttcggcactacttagttttgccccttaaaatatacggctggttaaaaattctctctaaaatata

SEQ ID NO: 14894 - DNA, 3061 bp, Cannabis sativa
  modified_base (2158)..(2167): a, c, t, g, unknown or other
  modified_base (2349)..(2353): a, c, t, g, unknown or other
  modified_base (2466)..(2471): a, c, t, g, unknown or other
aaaaacaatcataacgttaaccagtcaagaactgtcatgacacttttgattagtttagattacctggaaagttggacacgaaaccacctctattctcgatgtgctctctctcaacacttggttcatggtctatggataattgtttggccttcccattcttgcatatgactgctcgagaatcgccaacgttagccacaaccagcttgtggcaatttatcaatatggctgtaactgcagttgacccccctttgcccaaatcaactgccttgttcagaatggtatcatctgttatgcggtatgctctccttactgctttcactggttctgtccagaaatcaggctagcaaaaaacagcacaagtaaagtaacagaactagactacagcatcccaaaatgaaaagattgaatgtgtaccgttgattacctctttcagaatattttcaaagagatgtgttctcaagtaaccagggatctcagagctcaaatggccatcaaatattgcaaataatcctagttcattgtcatcaacatgcttaaaccgggcaacaacataatcttccatgggatgctgtgcttttcctttcaccaagtgaaagccatgtgttacatgcttttgcagtttgctcttccctttcccagactcacaatccgatggacctaatcccactttttcctgtagaagaattgcattattctcaatatgatttttcagcagataatacttttgtacaaacaataaagagacagtgaatctagagaagctagtcattaaatgttgggatatgaacaagctatcgtactaatgtgagagtgtgaatttgcggcccaaccaggtggaagaaggggacctaactttaaatagttaaactcttcttttctttcagtacgtgcccctattttattaatgatcaattgaacttttcaaagcattttacgtatctaaaattttgtcacaaacattctcctgcactcaatgcaatgccacccgaatccacagccgcatccttcacctcaatcagctcaagattgcaattagtagagccccaaaagactgcaattaactcctaaatcttgtgccttcatatcgcagatatcattaccactaatgataatcatcagcaaaccgagaattaaaccttcgaagtaccaaagaaaatccggatcctaacatgataacatccactcttcaataattcttattgatgattattctgatcttgagaacttaataattatgccttaacgtttacaacgacagggttccatgaatgtaaatatatacaatgcaaaaggtgctgttaaaattaactccctagaaatcttatgcaacatcccaggtacgattcccataattggagtttaagaaagaatccaattgaaactagtataattagagaaacgggttttcgtatccaaaaagggaagcagaagcagtctaaggaaatggtaaaattgaggagagatccaaatcctaaaacgaaaaagaacgagtacccacgaaaggaaatagaaggaaaagcattaaaagaaaaaaaaagggcgtaccttcatcttgttaaggatttctcttccagtcatggcgtttttatatatgttacgtatgtatgtatgtattgaatgtgaagtgtaaaatagagaatgggcggggtaatgagaaacagaagagagagtaatgagaaatagagagagaagcagagaaaagagggagagacaagtgggcagtgatgaggatataaagatcgatggtgtggttgacagttgacacgagcactgtaattgccgcgttctttgccttcatctaacaagctgtcgactctacccatgacttttcctctatccatttccccctattttttttttttttactttttaataatccaatatttttgttcaataacattaataatttttttttatatatttttaaagtttttcataaaatcaaaaaacctacaagaaaattacataaaataaaataaaaataacatttaaataacatcaaaacaataacaaaaaataacatacatataaaaaaataaaaatcaacaacaaattaacaagagtacaacataaaaaaaactgtattttctgtaaataaaatcaaaaaatcataacaatatttaaaattcagtataaccgtatttttgtaatttttttnnnnnnnnnntgtatttgtaaaataatctcttttttaatatttaatgagaatatttatcgttatcttcttggaccatggagatataaaaattttactatatttagcctaaaaagtagttttgtagtaaatttacaacaaagtttaactttgtgctctaatgtacaattgcaaaattttgatgtaaaatttannnnntaattaatgttttattaaaaaaattaaatataataactttatgattaatttttttttaatatatacccaataaaaaaataatataaatgtttcataatttaatgtgatagttnnnnnnactaataaaataataaaaatgacataaatataaatgaaaaagtagtacattgattgtggtgtaaattttacatcatagcaattgtcgtactaaatttgacacaaaatttgctatgtgctaaatttacttcactttttagcacgctattggagcacattttttgttaaatgagttatattttaacttttcactacttatttacattttcattggagatgttgttaaggtaagtttggatatttgtgttaatttactacgaataaaataaataccattatatttaccctttgaaatttgattaaagtaatactgtatgtttattatatgtcgagaaatgtattcctaattcacgcgatttcgaatacaaccggtacattctaacataattattatttggacatttcacctttagtcatactttttttagttttttaattaaaggtattattagtgtttagtaccttccaacatgtaatattattgtcagtacaattaagcattaagtaccatataatttaataaaaataacttacatgaaatatcgttaaccaatcacaaaatatcacttataaatgatgtttgacactact

SEQ ID NO: 14895 - DNA, 7629 bp, Cannabis sativa
aataaaaaaaaataaaaaaatacacatatttgagatatatctacgaagaagacaaaaatgaccgaaagatatctaaagcaggcaaaagtgaaaccacatagtctgatatgaaagaaagcctttcctcgcgagggcacaaataattatctcatatgtgatgttggttttccctgcttcccaaactctccaaccacccttcttccccacccacttcaattaccttgctcctcataactgtcaaaaactgccaatttgttccttatccttacagcattctgtctctactgccaaacacagtggtgataagaacaagttgattcagtctctttgtaaacagggcaaccttaaacaagcccttcaactccttcctcacgagccaaacccaacccaactcacctacgagctcttaatcttctcctgcatacgccgtaattctctctctgatgggctcgtcgtttatcgccacctcctcgatgatgggtcggaccaagatcctttccttgccaccaaacttatcaatatgtactcggaattggactccatagatactgcgcgccaggtgtttgataatactaagaagagaactatctatgtatggaatgcaattttcagagctctgactttggcaggttatgggatagaagttttcgacttgtaccgtcagatgaattggtctggcactcgctctgataggtttacttatacgtatatattgaaagcttgtgttgcttcagagtgttcggtttctctgcttcagagaggtaaggagattcatggtcatattcttcgtcatgggtttgagtcttatgttcatattatgactactttagtggacgtgtatgctagatttgggtgtgtttcatatgcaagttacgtgtttggtgaaatgtcaactagaaatgttgtgacttggagtgctatgattgcttgttatgtgaaaaatgaaagaccttttgaagctttggagctttttagagaaatgatagccgagactggtgattcatttcccaattcagtcacaatggttagcattctgcaagcttgtggtgcgcttgctgctcttgagcaagggaagttgatccatggatacatacttagaaggggacttgattctatcatgccagttatgagcacccttctttctatgtatgcaagatgtggtaagcttgaacttgggcaacatgttttcaatcaaatggataagcgggatattgtttcctggaattcgttgatctcaagttatgggatccatggacatgggcaaaaggcaattcaagttttcaaggatatgatctcccatggagtatcaccaaatcatatatcatttattagtgttttgggggcttgtagtcatgctggtcttgttatggagggcaagaaactatttgactccatggttagagaacacgggatgtatcctagtatggagcactatgcttgtctggttgatcttcttggccgagccaatctactagatgaagcagccaaagttatagaggatatgcgaatagagccggggccaaaagtttggggtgctcttcttggctcttgcaagattcattgtaatgttgaacttgcagagagagcatgtaaaaggctatttgagttggagcctagaaatgctgggaattatgtgcttctagctgatatatatgctgaagcaggtatgtgggatgaagtaaaaagagtaaagcggctttcagaagttagaaagctacaaaaggtcccaggttgttgttgggtggaagttaaaaaaaaagtctactcattcatgtctgttgatgagtttaacccgcagagcgaactggttcatgctttgttggtgaatttgtcatcagaggtgaaggagatgggatatgtgcctcaaactcaaatcgtgctgtatgatcttgaggaggaagagaaagagcgtattctattaggccatagtgaaaaattagctgttgcatttggactaatcaatactaacagtaacagagaaactattagaatctccaagaacttgaggctatgtgaagactgtcattcttttacaaagatcatttccaagtttgcagaccgagagattgttgtccgagacgtgaatcgtttccaccattttcgagatggggcttgttcatgtggggactactggtagttctatgtttagttgttgttcaaacttgtaattatgtccttgtttaaagaaaaaaaaaaatgaaacaagacagacgttctttatatgctgtatactactttaacaaagttttgttaggctcacacgttgatttgaaatcaaagttttaatttcttactgtgatgtttatgttaccagtttttatatcataatgataaacaaatatgtgcaaaattatagcaagttcaaaaatcaaaaaagaaatgtctgagcccgggttcgaaccggggacctctagtgtgtgagactagcgtgataaccgactacaccacccagacaggtaattttacttgtaagttttcataaaacattttatatattaattaatataataataacagaataatattttcaattgggcctactactctggtctgcgttcgaaaccttcttttctccaaaaaccgttgatcgtcttccccgttccgacctcgaataccaacaggaggaaactcctgcaagtcgtatccgtctgccatggaatcacatcacgcttcgcttggcagaagaacggtacatatttgtgctctttctagaaattgttcgcattttggtatttctggtcctaaaacgatctcttatatgctgaaaactagtatttgttgttgttgttcttcttttttatttattccagcttgaagaaattcgtcaaaagcgagctgcagaaagattgagcaaaacttcgtcgggaccagatctcagcaaagtttcaaattcaaatggtttgtgcaattcaatctatgagttcttatatttgatgaataatcgttaattcttattccactttggtacagatgttatatctatgagaaaatcagagagtggaaatagaatttcggaggtaacaatttattttgcttgtagtttctgtttggttggttggaaaattgatggtatatgcggagaaaacatttgtcttcaacaattatccgattcactctgggctgaagttctttacttcgatttgaacggctgttaggaaagtgtttcattatacttagtttttgtgcatgtcaatatttaattttataaacactaataatggtgcagtcagatattggtggcttagtggctcaaataaaatacctggagaaaaggaatacagaattggaagagcagaacaagaaattgatttcaacggtagctatattttcttctccatatgtgtttatttcttgtagcgtttgaggtgattgaggaattgaagcttttgggtggtgatcaactgtatctgattgttttattcatcctaaaatttcagctccagacaaccgaggctgacaatgacacactacaaaagcgtttgaatgatcttgtaagggaaattagaaattactttgattgttgtctaattatactattttgagggtgcgaggagataatcaatccattatattagagtttaatacgttcatagcagaactgatgtaatctttcctttgtaaatttttgctgaaactgtttaggcataagctaaagggttatgggttggtgcctgaaatgagatgcttaattcataaactcagttttaacttgtaaacaatacagaaaagtaaattatttcatgggggaatttgtgtgtgaagtattttactttcttaagtaggatataatctgtgtatgattagtaaatatctaaaataattgctaggggttcttaatttttttccagagtttccactttgttgttctatgattaattaattaatttttgaatatattacaggaacaaaacactgtaccttctttgagaaaagctctgaagagtgtagctatggaaaaagatgcagctgttgtcgcaagggtaatgcactatacaccctttctttacgtaattatcatccatttatgttttagttgtgttgtttttaaagtctgatctgttagtgcaggaggacttttcagcccaacttcgcactctcaagaaacgtctaaaagaagcagaagaggaacaatatcgagtatgcagtatgctatagttcttactttgatttcttaatgctcgtcaattgtattttcttaacagttcctttgctgaataggctgaggaagatgcggcagccttgagagcagaactgaatttgatacagcaacaatctatgaatggttctcttagtggagtgacctccattgcaaatccactggatcaaatacaagtcctagaaaaggagttattgaacttgaagtcagagttacaggtacagtgcattcatggatttttttcttccttattttgcagttacaatgttttcttatttccacggctatcaaatttctagcaagagtcacatttaaggcagcaagagcgacaacgattagcagaggagcaaacccaaacttctaagctcatgttggaaaagcaagaactagaagaaaagcttgcttctatgtctaaaacagcatcaggtatctgtcaaatttttctcattagccttccttcttcttgaagaaaggatttaaaaactcgtatcatattttgtgcacctctttccaagggaaagggtaaataatcagaaataaatgttttttaattgattgtttaagatatgcccaggattttacgtgattgtatttttatctaagacttacgctcattcatgtttataacctatagcttggagttgttatttgaaaccgattttagcattttagttccactttggcataatctagtagtcattcattttgtgatttcactgaagtcagattctttaagagttctattgcttatctttttgtgagacaaaattgcacaagatgttttcacgtgtaattttttatttgtaaaattgttgaacttcgttccgtcatttacactttcttttcttttgcagaaaattctgagttagcctctaacaaagtattttcattggtgagttgttaatcaattatcatgttttagaatcttgtatatgatacccctcttctatcattttacagtttcgtgaatcttctgccattagagaaataggtcactaaaatgtattactcttttgtgttaattaactctattctccttttgaagtgtttgttctgctaaaaagattacacgatttacttggtttatgcatttaatgaaagcctagaattcttcggcatttgttcatgtttcttatttgcaggaagaaaaggagaaacttgagaagcaattgcatgacatggctgttgtaattgaaaaattggagagtagtagacaaaaacttctagtggaggtagtggtcacaaaatctttttagatacaataggatttttgtttttcaaatgtcttttgactgcaaatttgattttttcttttatataatttattataaaatataaattatggtggcagattgattctcaatcttcagagattgaaagcctttttgaggaaaactctacccttcagagttcctatcaggaagctatgggcacagcaaagcaatgggagaatcaggtattttgttaatggtttctgtttgcaaatatagggttgtgttatgctcattgctctctcccttctaatgatctgaatgaattttcttttttttttttgtttgttttttttttgcgtaactgcataacttgtgtttttctgatacttcccaggtgaaggattgtctccaacaaaatgaagagctccgtggaattctcgatgagttgagaatcaaacaggcaaagggttttgtggaaccacttgccggtgtaaatgaggctggttctcctgcatatgcggctgaaattatctccctcaaggttagttcttacttaactgctgtaagggcaagataggcaccagtccgatggatttgttgtctagaaacaagtataaatattacatacaaaatctatgttcttaccctataatttactgtgtttttcaataacaatgctggtctggtttgtggtctgccccctaatagggtcaagttgcaaaagaacagagccgagcagagaatttagctgcagatgtattgcagctctcagcccgactacagcaaaccactcaagcatataatagtcttgcacgcctgtaagtctctttctctatcgctctccactgaccgtcttagctgttatcatgtaacattgtttctgtctaattttccaggtatcagccggtgctgcggaacatagaaagcagtctaataaagatgaagcaggatggttctgtgactgtgaaatgagattagagacaattttaatatttaatattataatttgtatagatttcatgtggatctggcacacacacaagttttcttttattttttccccttcatttgtactagggcaaggcaagtgtcaaattgttgagttaaaaagcttctatagaatgaatcactgttaacactattgcaagtaacaaaattctaattctttaggtacaacaaaggttctataaattattagaagctctattttcgcattctttttaaacaagatcggataaaaaagtaagaggtgcattaaagaagttgtcttttattattgcaactgtttgtttacatgaacttcttcttgataatctggttgtattgtatctatctttttttcgggttcttctccacctgattggaaatttgaatttctctcaaacctggtcctagctgattatttatatatataattgttgctgaaataggtgattatataatacactattaaccacttggaagtgtcattaaccacttggaagtatcgttagtgtgattcattaattttttctttaaagtatttgactgcattaagactaacgccatcaataatgagtaatttaataactctctttcgtacaagctacaacctcttcaaatatttaattaacatatttgtctaccaaattatccttttaaaagcagaagatatcatcttatataactggccaacagtttgatcatcgtgattaagacatgtgcacttgcttagcatatatgtactatatctgttattcatcaatatattaatcccgtgattactgcctcataattctaattgctaatcatgagaacattgtctactttattaaggaatcttttggcttattgggaaatgcttttgaagtttttgaataattctgtggccttatctttcatacagtttgccaaaggccaaaatagatattattagctgtttttagatattaaaatacacatcgacatttgacgttttgcttggttggctagctagaccacttgtacaaatcattcaaaagatggtaaaagcgttaaaccgttttttactttaacacttgaacatacatttgttctttaatttgttggttaaaatcattatgcttgttaactaagtaatcatgataataattgaagactttatcttatctcttataataagagtcagaagaaaaatgataaaaaatataaataaaccagtgtgtggtctgctcttctctactgagaaaaaaaaagtactctcatgagcaaaatgacaagcaaaaccatttgtttctgcat

SEQ ID NO: 14896 - DNA, 9749 bp, Cannabis sativa
gtgtaagtgacatttttctgagtttaaattgcttggtattagttaactttgatgattgattcttcttcggaccttgctgctttattttatttttcttattttgattttttttagtgaaaatcttctttttgagtttagtgcccttgttaatgttagacttagtaacattatataacctgcacgtctgcagcaggttcatagtttcacagtttcatactaatttggttaaataatttttaattaattacatttaaatagcaacacctttaaaatttaagatgataacattattaggcaaccaaaaatccttattttttaaagctcaaccatttgtacagcaaagcatggattttgaaacttgacatatttaatatcctaaattgaaattcaatcaacaaaactttaccaataccttaaattttaatgtattgaactttacttgtaaaaacaagagctacaagaaaactgctcatcaaaatttattatggtatcaaaacaaaacttttactgaatcaaaatttgtaaattctaccctacaaaaaaatcaaaataaaataattgtaacttccataataaataaaaagaacttttttgttcttttttgataatgaaaaaagagaaaaaacttcattcacaatgattcctccatttttttttaatattgcacgtgtcttccaacaaatatgaaatttatagcttcaagccttttgaggggaaatacaactaaggcatttgtgagatgttaattaacacaggataatatatggatctctatcgtttaacaacacatccaagtatttagatcagattctaaagaataaagatggagtagtctgccccattcagccatccaattccttttacaaaaaccaaaatctggcttagtctgtacaaatgtagcaaaaccaactcctttttcttttattccccagttgatgcagcatttggtacttcgtcgtaggttccggtttcctcattaaatgagtacctaaatttgacaacaggataataatataagaagccactaaaacacatttggttattatgtatatgatttatgaacacaaaggcaactcataagctcaaaatcaaagcaaacacacagtgaagataagagctttgcaaaccaacaaggagttgtatcaaaaagtctgcaaagaagctttactgtaaaaaactgtgaagtttgaatttgaaccttccacattcagcacagctgttgaatgtgaatcaaccatgttcgtttacatttagtagtttgctttccaacatttgcaaaagttgatgtgcattatgatactcccactgccctttacttcctgtccctaggtgttctacctacatcagccacctaaactatttcatgacaactagaggcgcttttgaagccagcactagtcagatagtaacatgcctaaaccttgttcagtatctgcttgtacagcaagggtatgggaactaaaacacactgaaaactgagctttgacaaagtcattactttttctgcacagtcgtgacagcaaaattagacgagtaatttggttctaatttccaataggcctcaacttgaataagttgttagtgctgtaaatatgggccagactttttgacacgtgaaaccaacacgagcatgacccggcacgaaaaaatatgtgcttaggcacgatacggaacgaaaaaatatgaacttagacatgacacgacatgaaaaatatgggctttgacacaacaagacacggcacaataagcccgaaaataggacacataagcacgaatagattagctcgaaaccatgacacattaaaaagttcaataatttaaactaataacaatgataaatgtttatttattaactaaaatgatagtaatattcagattataataactattggttgtttatgtctctagcacgaccacttgatgaaatgttgaggaaagtaggacaaatggctgatactactggaaggattcttctttggataataggtactgtaactggtattcttgtgatcggtttactaggtattttcttttctagttcatattctggattaggtttgtgtgtaactattattgaaaaaaaataaaaacgtaattaaaactataaaatacacatatattttagtatttaactcatcatttatttataataaaaatgcaaatacaggtaggtctatttaaaaaaattgggccgacccaaataaagcacagcacgaaatactggacttgcaggccgtgtcaggcctaccctataaaattgttgcacgacatggtaggacacggcacggtccatatcttttatggtacggcacggctcgtattttaaaaaacccaaaaaatatgggtcgggctagcacgacaagcatgtatttacagctatttgcacatactaagaaatgtatgtattgtttgtaacggtattattagttaagaaagtaataacaagcaagaaatagaccaaaatttaaagataaaagtttgttagcgagagaaaaaacaagacacgagtgcattaccattgccctgtcgatgcataacaataaagtcctgtagatggatcataataatagcccaaaatgctgttgtagtagtatctgaagattaaaccaataatttccaattaaaagtaaataataagcagaatgaaagaaacaatgcattgcacatgaaacaatcataattaatacaacaataacaaagaacctgcagaacatgaaaaataagaaacatagatgaaaatcagggtcagacagtgaaataattgacttaattttaagcccagaagtggaataaataagacctaagagacagccaagaagcatgaaagccaatatttagaactttaatatgctaaaactcctccccacaacaacattcgttaggatccagttaataaggtcatacagattagaagaaatgttaagcgacaggtggcaagtttaaggggtagtttgtaaatacgaagtattgggacagctgcctatataatctcttacatggtttactaaagattttattaaaatagtgaggcagtgtggtaaactatcacgctttacaggtttccaggtcctttgaataacctgggttttcttgctgtaattttttcaattgtgagccatagaaatcttcattttgtgactgtttctcttttgggttcctatcaattggtgtcagagctgactctgataccaaccacttaggttgaacttacttcaaaaaggggtgcctaagtggtcaaagaccaccaactaaactaatcccacatacttaggaattgtgcgcgatcctagcacatctatagaaacatatgtattaaaataatctaaaatctttcttgaaaagaatacacaattgctaatgctagcagttaaaaaagattataggacatttaatgcattagagataccaaccctttcaatgatgtcagagagaatctcatcagcaatagaatgaatcctattctatacagaacagctatttttaatctcaagaaatgcttaacgtggtataaaaaacaaattttaataacaaactaatacaacacaaaccaattggcaatgtatcaaggggagagagagggaaagagagatacccggaagactcgtcaaacacataatcactttgtgaagtcccacctgcagcccaaaaaacaaccccaaacccaagctcagataatatatcaaattactttatcagaagatgggttgcagtagtctttttacacgcagaataaataaattcttacttccagagtcagcatttgcagcgttggatggttcatcagttccatcagaagaaggcttagcagcagcattttcatcatccccaaacatatcaaatgaatcctcagatggattaacagaccctgaagaaactattccagcatctgttaaaccagacaaaatgtccttccctgcacttccagatgggccttcacctcttaaacgagcaaggttttcatatccttctgaaataataacaatgcaagttgcaaaccacaagagtaagttgaaaaattatgtggaactttacaatagaaacgaaatcgcatgcttcaaaaatcattgatacaatttaataaaacttttgttttcacatccacattcaaatatgaatatttctggagaagctcacacacaaaacataaagactggtttagcaaatatatttcttaatcaggacgaaaaagggaccgaaaaagaaatccacaacaacagtgtactctcacccaaaactaagattatgaaaaaactaattatcgtacctgcttcacgctcgaaaacctctttcttttcactgtagacatctgtaagagggtaagtaaattcaataaacaaccaaggaagagaaaaataaagaccaagttctactccttcaaaattagtgaccattagaaaaaccgtaacagctttctactataaccattgtaaacagcataaatgcactttttttctcctatgagatttaatgcaactataaaatcatgtccattttgagatttgaaaattttaattctaaactacaaaattttccaatatatgcgtatatgtatgtaatgtatgaaaattcttaggtagaaaaatcaatttttctcccactgtggaaccattttttttgtttttgacatctatagaaattataactttttatttattttttatttttttaatatgataatgtatattataaagaagcatttcgggaaatttcaaaaagagatttcaaacagctaatctcatgcatgattattttttttagacacatgaaattgattattttgaactttgctttcaacattgaaaattattaataatttcttgaaaactgatgggatgcctgctatgaccacaatctacatcaccatataaaaataattgagttataatttgtctacaatagggacaaaagtaatgtcagagcaaaagtaatgctgctaggggcaaaattgatgccactatctaagaagctccctatatgtgtataaaatttcataaagttcacataataaagtatgaaactgtgtttgtgtttccattcagcaacaaacatagacgaaaattaacaaactaccatattctccattctccaacaacttcatggcatcttcagtcagctggtcaaatatggcctttgtttctggcgacattttatcctttttgttatttgaagttcctttcaatctcctcaaagcttgcaaaacctatcaagtgaaacaacattactctatacttagtcaatcatacaaaactaaaagttcaagtgttgttctggttcccagctaaagaaaagcatatagaatacaatatagggtatttaatgatgttacccactatagaaaacaaataatggactgagagaaaatgttgcggacaggtaaaagatgtgtttcatgaaagcaagaatgtaaatttaagaagagcaacgtattgtgcaaaaattataaataaaactagattaccgtttcgcctggctcaagtgcatctgctatgcgtcttttcatctttccaatatcacgagacgtaagctcttgaatatcgtcatcattttttattactactttaccagcgtattttggttccacttcaacactatcaagccaagcatcctgcaagaattaacatgatgaacaagtataaatatacttttctctaaactatacatataatgaacaaggatgtaactacaattcgtaaaaaggagctggccccagttcttatctaaatagtaaaactcaatagtattagtgtacacataattctgcatgaaagtaaagtaacagcaatgcacaaattgaattaaatggcggaaaaacaagaataatattaaccaagttagtataaattgagcattacgtttaatcaagtactaacgatagctaatctattttggctacattgttacattaatttagtcaagcttgcacacactttttggctcaaaaggcctacatccagagtatgaatatgcatgcatacggtatgttcgttcattcaacacagctcggttccagaatgtttaccttgatttcattttcattgacatattccacaaaatttccgtcagcatcaaaataaccttcttccctctctttctctaagttgaaaggttcaatttgaatgccatcatccacaaaatcctcgttttcctgtcaaaagacactccgcatcataggctaccctttatatttccattgatcccaataaagaagaatctggccaaatcatcttgaatcgaaaagaaaaagaaaacagcaacaaagctacaccaattcagtaaggaaacatacaaaaaatctcaaacgacctccatttctacagataaagagcttgaaactcacctcataagttacttcagctatagagatatcgttgataatacctctgttatcttcactcaaaagctccgtagtcatttgactacgacgctttgagcgttccgtagcagcctgacgagggtctgtcagcggagcgggctgaggttgaacctcgtctattactaatttcttcaccgccgcttcatctccttccttcactttcttccccttaggaaatctaaccctttttttcctgcaacaacaataaagaaaaccatcaacaaaagagaaattaaccaagaaagatgctatctctgtgaacacaaacttacatttgaggtttggttgattcttcatcgtcgtctgggaaagggcgcttgaggttaggtcgagaggaattcgccgccattaacaaattgaactgagctttcttttcaattttcaccgtttggtttggctgtgtctgtgtctgtttttgtgtactaatttcatcaaacaaggaaattggtaaactcttgttctttgtagaagaaagacaatgcagggcccactatgtcggagagtagcccattaacattgtaatgggccttattttatattggatccgtaacttgggcaaggaaattattcgaaattttacacatatattttgtgtttattaaaacttcaaaaaagattttttcaaaatgacatataaaataaaattcagccttcgttattaaattccaaaaacatttacatttacatgaaattaaaataaaaagaagaagtttatgtcttgtcttttgacatgagtgtggggctgtgaggatttagtgatttgttgtgcgtttgtttttgtttcgtttcttctgatggattctagtagtcaacaagttggtcaattgaatgatcaatacgacaatatacagttggaggaagaagaagaggagggttactctgtgatgtcgttgaggatgtaggccaacctatcgatgataggtggtgtctagttggaaagttcttaaccaaaagagtcatagattttgactccatgcagaacacgttggcttcactgtggcaacctggcaaaggtatgtttgtaaaagagttggaacctaatctttatgttttccaattctatcatgagatagatatccagagagttattgaagggagtccttggaccttcaataggttcaaattaatttttgaacgtctgaaggcagaggaagatccgaggagtgttcgtttggacatgtgggttcagctgcataatcttagaatgggattcatgactgaaaccaatgctaggaacgttggtaattatactggctcttttgttaagtccgatcccaagaattttatgggcatctggagggattacttacacattagatttactgtgaatatagagcaacccctgaagataagaattaaactaaagaggactaatgggaagtggctgtggtgccaatttaaatatgagtttgtttcaatattttgttttatatgtgggataattggtcattcagaaaagttttcccacaaattatttgaggtaccactaaagcaaattgagaagctatatggtttatggatgatggctgagccacgtcgaagaaagaaaaaaattggtgcacaatggttgcatactgaaacggagactgataagcattttttagatgagttcgagtcctcaggtgaagcaggtcatggtgtcgatactggaaatcagatatcccgtgaaataagggactttgttggcaaaaattagggtatgaatggtggcaaatttcgcaccatgcatgatggagaaaataatggcgttaatagtggaagaactggttacaaccaaaatagttagatgttgagagcgggaagagaggaaaatttgaatatacctaccttgattgtcacaaatacgaaaaggagaaggacaaataaggaaggtcatgatgttttgagtgatggtgaagaggatatgagccctcactctattgggctctcaaaaattgggtcattggtgggtcctggggtccaggcccactaaggattatgagtatccttagttgaaattgccgtgggcttgggaacccacaggctatacaattctttaaggatcttgtgatcaaaaagtggcccaagtttgtgtttttgtgtgagacacttagtaaaaaagaatctcttgaaagactcagagtttctttgggttttgaaggactccttgctatcgagggtattggaagaagtggaggtatagctcttctatggaaaattcaagcagatgtacatgttatgggtttctctagcaactatattgatgtgagtattcttaatgatgagaatgatgtttggcatctgactgggtgttatggtgagcctaatcgtactaaccgtattaaaatatggactttacttagaaattgggcggagcaatatgatcttccctgatatattataggtgatctcaataatgtggctagtcatgatgataaaaatggtggtaacccataccccaagtggctaatcgaaggctttaatcacaccctgatcgactgtaatttgtgtgatattgagttgactggttatccttttacgtgggagaaaggcaaaggcactaacaactggattgaggttcggttagacagagcccttgcaaattaaaaatggctagacatttttaactcggcaagactccttaatttggaatggtctagttcagatcattgtcctattctccttgatacctgtattggtgattttgttgctactaagaaaagatttagatttaaaaatgcttggctaagagagccaatgtgtactcagattataggaatcatctttcacatatcattaataggaaaggacagtgtgacatactattatatacaatgaatgtgcaactaggaatagaatgctcaaatcaagagaaaaggtagcttgtgaagttggatatatatatttatttatatctttttatttaaatattattataaaatctataaataaaaagatttatgcccgcgaactctagatcctgatcgttatttgctagatcttctaatagataaacttttacttatgctttctctggaacgggctaggctatagtagaacggatgccaaaatattgttcaaatctatctatttcatgtttcaaggattaaaactgttctcttcaacttgcaacctagtgagttaggtcaaaaatttattgttgcggaatggaataagttgaaattcaaagaattctatatgcctcgggttttacaaggagtaatatgcctttttaagtatttgggcatttttatttgtgcgaatagactttcaactgcataatgctcatgtatctttgagaaatggtggttcgtattagagtgtggagctcaaggaatatatcttttgttggaagagtcactcttattaattcagttctaatgtccattaattcatt

SEQ ID NO: 14897 - DNA, 5779 bp, Cannabis sativa
tttttttttattcacaaagagtgagagtaatttccactaactaagaaatgagcagtagtctgggcattgctacttccctattatcataggacacgcagttgggcaaggaatgcagcacaaagatctaagaagagaaactgtggtccctgaacccgctgcaaatcgagaagatacttctcctcccgagttttgtagagctgttaataccccacccaaaaaagcagtgacagtgttagctcatttctaaataactttttagaatagctaaataaactgtagcagaaacaactttacctgtacttcaaacttgaccacattgggtgtcttcattacaccatcagtttcgataatagtggattcatcaccaaagtaattattattaagcacagcattgttgctcatgccctcgtggtgtccagaaattccaggaatccacctacatttcatgttatagtgcccaatctttttccagcacactcgcagttcttgcagggcttttaggacttctgtcattatttcacgaggatgggctcgagactgcagaaatgaaggccaaaaaacatgagcaatatttcgtaccttaatggattcaacactaagtaatttatggataaaagcaataaagaaccaatcctgtataaggtaccgacttggagcatagcgaagcatataggcatctaaaaataaggaaaacctaatattacagaagttgacctgaagtccaagagcccattttctttcaacggggaactgtggtctcagacctgccccctgataatccatatatcctgtaagccgatgcccaacaggagaagaagcaggctcgccctgatgcattcggtaaccactatcctgttcaaataaaaagaacactacttaatatcactcccaactatgaacatatggacttgatacaatacttatggtcaataccaaacatttaaaataattaaaaaaaaaataatgctaaatgaaacataccattgtttcctgaaactcggctcccagataaccactggaaacgcggaatcgattatccaatagcagatagtaagcaacagtggcctgtgatatgcttcacacaatgagacaaacgttgcaaacaactaagagagagtggtttcaaggttcaaacctcattttgtactcgattgcgaagagattcaatcagatggttcctgtcaaatcccatcttaatcacctcctgaagaatttcttcatcaatctgtgtaagcatggcaaaaaattgaactgattatgttaataaaggccgatgttatatgaaaataaaataaaagcggcatacaagaaatcgacatggttctctatacattaaacagtaaaaggatgggctagaggaggaataaaacatagctaactttcatttggaacaaaacatgcatcagacacaaataagataattcctaactttcaattgctataaaattgacaaccacacatgcacagctacctccatatggcatatagagaagaaaaactgcaattgatatggcaacaaacctttttcgcctgttgcattgtgtctggagggggcacagctaaataacgaggaagatgagcctggaaccatggatgctggcgaatttcaggaatggacattcgcttcattggatcaacaatgagcaaccgtgggatcaagtcccttgccccaggtgataaatgactcggcagagtgtatatcccaccctagaaaacaaatatatatttatgtgagttgagtaagtgcacattcaaatactgtgaaatatagacagaagcaagacaatagacaggaaagaaaaagaaaagtgataagtgtcctggactggcctggtaagaaaagaggggaaaaaaagaaagaagacattaaatatagtaaatattacccggtcagaaaaacaaaagcatagttatcattataattttatgtattcctaactaggtatcagcaatgaataacagaatctactaccagctgtagatccgagctgaataacaataccttgattttcttaaataagttgggaatgttttcatcgtcaaagggaagtgtgccacaaagaagagcatacaatataaccccacaactccagacatctacttcaggcccagcatacaattttccagagataacctgatcaaatgacaaaaaatgttaccttggagattaattaaaggcaaaactacaaaaatatatctattacaatcagaaaatgccaaaaactacatacttctggagcagcatagtttgggcttccacaacttgtcttcagaaaatggccatcacgcattatattactcagaccaaaatcagcaatcttcacattgcatttggaatccaaaagcaaattttctggcttaagatctctatgaaccaccatatttctgtggcaatactccacgccagaaattatctgcctcaggcaaaagattggccatgtaattgtttgcgagaagaaaggagataatgtgaagtcaagtgaggaaaactaaaaggtacctgctgaaaaaagttacgggcttcgtcctcctgcaaccgacctttctccacaatatagtcaaagagttctccagacttaacatactccattaccacaaaaatgtctgaatgggtttctatgacctcatatagtcgtataatatgaggatgcataaacagtctcaatattttaatttctcttctcactgcacagaatttaaaggaaaaaataaaaaaggaaggcagtaacccactaccaaactaagcacagactgcttatcagcaatcaagcagcaataaccatatagaaagcatacaaaactaatttacttttactctctacggaagactttctttgtttgaagaaaactcttggtcatcattaaaaaaactctttaacatttaaaactccaaacagatcactcctaatagaatgaataaaaatgagtacttattagcagtgaccaactgaccataccaaaatatgattgtcgaagaaaaccatgatcttcataaaaaagaattatttttaacatttaacaataaaaaaaagaatgctcctcctgatccagtaatttaaaataagaagacattatgaccatgctagaatatgaatgtcaaataaaacggacatcacaaggacaaacaattaaccgagacataaattatcatgtagactactggccatcatcggagaaataatacaaacctttttcttccatttccatattcttaatcttccgacgattaagaatcttaatagcaactttgtgaccagtcaacgcatgctctgcaattttgaccttcccaaaggaaccaataccaagtgttttccccagcttgtaatttggtaaaaacatatccacattgccacctgctctgccagttgatccatccattttcattacctgaaattataataataattatcattaaattaaaaaaaatataagattgaatgcattcaacaacacaaacagatttggaatttaactttctggaatcttagtcagtgaatgaatctgagtctgtataaccaataaatgttagatatctactcaaaaatactcaagcatatatattcatctaaaatatattatttatctgggtttaaaataagatggaagcagcatcccaaatcccacggttttagatagaaacatctgacaacaggaaacaaatgagctcgagcaattctaaaatccaacattgtgtacctaacttagagaaaacatgcatatgaaaaagaaggccaaacagaaaaaagataaaatcgtgggcatcttcactaatctgtaactaatcaaatcgtgcaggaaaactgtcagataaatgagaatgaaatgcttaaaaaaataaagatcatccctttcacagtttcactaattatgagaaaagattcccaaaacttatatcagaatgaatagtaaaaggaaacagttcgttgattcttattctagctacctccattattaactagtacaaagtattggttcctcattcattacatgttcttattaagtttttctccgtaatttggtttctgacttcatctgcttaacagcaggactgttctaattcaccaaccagaataattttaaaaaataattaattttcggtcaaacaagctcactaagatatccaattttgtttcattaaaaaacgcttcttttttccattgaaagttaccaagaaatccaatcctgcaatttactcgctcaatcttaaaacctaaccggtccattactacaaatctgcaagcctttaactttcatttagaagaaagacataatttcacacacatcaacaaaatatgaaatttagccagacaagaaactgaatctaccttttcaaaaacagcaaaaaaataacaaattcataaaaattgcaaagcaacaaacaaagattcgacatccgatatcgtaactcaatagcaaaaaaaaaaaacgaaacagtaggagccgaaaacaagttaaataattaccgatctggaaaaataaagacgatttagggttcacggaaagaatcaaatacgaatcttaagcaaaagaacaaaaaataaaaactgaccagtaggaatttgaggaaatgagtgttatagtcgccggataaagaaaaagagcgagaagccggcgacggcgatgaggtgtcttccttgttcttcttcttcttcttcttcttcttcaagtgttgttatcagacgatcttcgaccacatcgttctcatcgtaagcttttttatatttattttaattaataaaaaatgagtgcgtatatatgggaatgggaatatatatatccgtagaaaggataacttaattccgatgtgggataatcgtaactgcttagttggcactgacgaggcgccaatcaaaataaatcaaattgtccggattcttaactatctaattaagttatattttgtgatttgataaaataaaatatctaattaataatttttacaaaatataaaatttaaaataatatttactatttgtttattatataatttcactccatggtaatttttgaaattccattttcttaaaactttctttatcaacttactctactcaaattgttcccaaaaaaaaataaataaataaccctaggcaaattttgtttaaacaattttgctatgcatccaatattaatataaccactaaattttattttaggataaactaaacttcttttaatgaaaatcaaatttttattaaacatcaatattgtttaccaaacaaattaacaaaattaattgagacattcacaaattaaggtattgtttgctaacaattatataatcaattttttaaataattaatcaaaaactgtaaacaaattacaagattttgttaagtgaaatttaaaaaaatagaaagcaaaaaggttaccgacaggccttaaacttaactcaccacctagataaaaaatagatactctaacaaaactataaaccaccccatttaatgatcatttaacaaaataaaaaatagaaaccttttgtaactgaaaaaacaaactcgtaatcattaataattacactaaatgaagaaaccattatcactaactacctaatgcttgaactaccgaaaattggtctcaactcaagagatacttgctgccattgttgttcttttaatcaagcttaaagctctcaagagaattatggtttttttttctttttttgaaagataaatttgtaataagaaattgtttgaaaatagagctttttataatatttggagtataaatatataaactccattatatatgcatattatattacatgtaaattttc

SEQ ID NO: 14898 - DNA, 6525 bp, Cannabis sativa
  modified_base (2437)..(2444): a, c, t, g, unknown or other
ttaatttgcttctaaacctctgatcgataaaccatgatgaccttcttcaaattactagctagtaataattaaaggtgcatggatcgatgtttttagaagttttgcacatttccttaattttctttcgtacaaatttgaacaaacaattacattgctctcactaaaaactacgtaagatcatatgatctagcattgtcctagggtactgaagtgtagaacgacaattatataatgagttcgtatatgtatattcagctggtctagaaatttaaaatgaattattatatattaactccatatatatataaggaattatatatatatagtatgctatcctttatttaaggagagagggatatttattcaaggcattgtcatggtggtgctatgagactactatatgtaagtctagatacttatatatattatatttaaataaatattaattgaagttagcttaattaattaagataatatatatatgtaatgaacatacctgtagccaatctgatgaatccatgcaaacttgaagagaagaagtaaaactcataaaaaagactagtaattaatcaacaaaagtatagtactagtgtaaacactagagatgatcagcaaagctctttctttttctttagtatactctcttattactagctagctacttcattttccaatctctaaaaaagcgaaagacagtagctaggaatagaggaattctgagtagtgagaaattgatgattagtttgatcagtttggctgtggattgggttggtgtgggaactataagaaaggaagaaaaaggcaataaatgggcccaaaatcctatcctagtagtagtagtactgtcagtgtcagtgtcacaccagaaacagggcatacatagatatctatatagccttacttatatattgattgaattgtatatatactatgatatgatacacacacacacaacaatattgtaagagtgagtgagtgagtgagttagtgaagtagggatagtgagtgagtgacatgacagaagcttgagaatatttgggtcttttgagaaagaaagaatacccagagaacactccaacttgtggggtcttcttattgtgggaccccatttgttctcctcctacaagcaaagcatagattcttcttctaaaatctttattatttaagggtcctctccaaacccaaagtggtggtggggtcttctttcttgccaattgcattaccatatatacatattgtttttcttttagtttaatttattactttgctgctctatgacatatttttgttttttgtctcatgtactagattgaaagatattagatatctaaaaacattaatcagcacaaaagacccttctagatcagtttttttctcgtttctttttctcttttcaacaatttataataacttcttctaccaagagagatgccctattatatacatattatacatatgatatatcttaaatatatataggtgtcggtgacaacaaaagtaaagaaatcatgaattgaagtccacatgttttgtgctctttattttacagtttcactgccaattacgaaagcaaattattatatggaatctaatacaatccatgacactttcaatcttattatcaaagttgtgaaactacaaattacactttaatagtacttaagtcccaaagggaactagagatcgtcttaccaaacaaatataagtatgatttttttttttttttaaaaaaaaagtcattttaattattatttgtgtttgttatgaaaatattggcatcgatcggaccaataattaatgagtaataactcatagacgtaatgaagtaaaaccatgtatataaagtcactttttagcttgatatatatttgatcaacttgtttttctaacttaactttattattttgcaactaagttaaccttccataagtcagttcttatatgcaaacttatgtcatatattaaattcatcagtcaatcgatgaaaactttttttgttttgtatttttcttaacattgaagaaggcgaatttggatttgtgactttattaataaagaaatcgagatataatatatccattgattaaatggttcaatttgccaaaatactaattttgtgtaaccaaaaacccacaattataaacatatattacctagctactcaatagagaaatgttaaaaagtaccataaatgtttagcaccttagatcatctccaatgaaagatataaatattgtgctaaatttggcacaaaaaataaacaaactttatatttagcacaatatatatttgctatgttgctccaatgtacaataatattttaaaaggtatattggtttaaaaagcaaagtatcattaataacaaacaataaattaaatatttaagtgccgtttgataatacttttattttctaattttttaatcacaatatgaaannnnnnnntttgtttttgaaaaataaaaatgctttttgtaactacttttcttttttaattttaaaaacagaaaacaaaagtgtgttctgcaaagtttatttttatttttattttttaattttatttaagtctggtgtaagttcggggttgaattcgggttcgggtcagaggacgggttcagcaccagggccttgggaagggatttgggtccgagtctagttagaatccaaatattgattaagaaaaaaaaaactgtttaaaaatattgaaagtgatttttttttttgttcaaaatttggattatcaattaaaaattgaaaagtgacaacttttttatataatatgtttttgaaaaaatatttttacttttccaattttaaaaacagaaaactaattaaaaaaatgttaccaaatgccaccttaaaaaattactaattaatggcaatattgtaaataaaatatatgtattaaagtatttcattaataattaatgacaaaagtgtaattaaaaaagtagtatttattgtgtgctaaatttgacacaaagctatattttgtgtcaaatttggcccaatttttagcatgtgttaaatttggcacaatttatagcacaccattggagaagctttttattatgaagtgctaaaaaattacaatacaccacttatttagtactccattagaaatgcttttaaatatataatatgacaattgatattaaatattgagttttatatagtttaatataataaattttatagagtatatattgctaactaattgtgaagcaccccttatatatatggtaacaatactctaccaattaaataatatagactatttactcacacatacctcattttcttagcccccaacaaaagatattcaataattatatttatataccatcataacaaatgatttataatagaaaatctttttaaacttttaatgaaatcatatcaaagaaacatactacatcagataggtatactctaaattgcttgtttacataaaagtttctttaaaattacaattcatgttctacgtacatatacgacacaacatactatctacacaatagtataattaatctcaacaacacaattaaagataaaaaaaataatatgtgtaatttattatatatatatctagtacttaattactcttataactattcattatatatcctataaattttatttttatttgtgggttatattatatatttaaaatgaataaactattaaaaaattaatgaaagtaaagtttttacgttgtattgtaaaaaatttatgcatgctttattataaaaatttaaataaaaaaaaaatggaaaggggtattagctagagtataaatatccctgtgtggggatggtcaatggcatgagtagacacactaaaaagaaggtagatttgctttatttcactttaaggcatgctgtatatcaattttccaagccactaaaagtgacttgagaagactcactcactgatcgcaatatataatcaattaatacttactttctttgtttttgaagaataattaattaatacttaattatacgatgggtttatgtttacaaataatatattcatattttgctcaataaaaaacataaagttctctgaattagggagacatttactcactctatctatcataaagattaaaattaatgatttccatatatttatatgccaacatatattggagaacacatgtaacaaaacccaaagaaattttaacaagtttgcactcacaactagagaaaaaatttagctgcgggtaccggtacctaccctgaatggggcagtaaatactcactttagtagtttatgaagtagggataggaaataattttatatactggaagcgagtttagagtagaatcataagtgataccactcactctatatccagcctcagtttatagtttttgtataattttctaaatatttatttgtataatcgtattaaaattaaagactacaatgttgattaataatttgtcttataatatgtttcccaaaaaaaatatttcttatatataataatttattttttaatatagtgttgcattcattaatttcgatctttaatatttttctttaatttgttattaaagacaaacttagcgtcaatatatatagtaaattatgtttctgacttattatttatcttttataatttataaaatatcaactataaataatatttgttaaataaaatatttatatatcaaatacaagaattcttttaattttgatttcaaattacattacattattttattaatattattttttaatttttatgagtacttaatgggtttcattactcaatgcatgggaattccagggggacgaagggcataaatggggagcggggataggattggaggcgtgcatttactacttattactcacccaattttcatccttaactacaccattatgtacatttatattattatatattaatgatacgtgaaaacaaaatacaaatatacatctaattttaaataaatataattgtttgaaaaaatttatcttctttgtgagtaatattttgtgcacatatatcaaccccttaacacacctaataattattcaaaccaaataaaattaaaatagcaatatgcttaaatcttaattttcaataatcaaatttaatttaaattagaggagttttatttgcacttatacccaaatattaaaaataataataataataaaataagcttaaataatttttttaaaatcactcttaattttttttttttaaaaaaaaaatatacattattattttgtgttaattttaatacttattttaattttattttcaaagttttttaatcatgtatatattttttttaataaaatttcaataaattttttattttatttttttcataatatttaaaatataattgtaagaatatgaatgaaaaaaaaaaaaaaaaaactgatattattaaacttatatatcttatgagttttaaaaacatcatacattcataggacaatattttataattaaagtaatagtgtcacatgacactcacgtctcccatggattcagtttggatgtgtttgtagaaaatgtattttcattgtgcaaaataattaatcattacacatagaaaaaataatattttttactaataaatattaaaaaaaaattaatacacaaaactcttgaattactttttataattttccaaaaccacacactgaaattgtacaaatgataatgttaataccatcatcctcaaatttctacatggtggtctcacttcagagcttatgttatgttttattatgggttgcttcataaagacacgagaaacatcacgtcgaaaacaaagacacgagaaacataacttgaactaaagacaaaataaaaacaataggaaatgagagataatgtctcataatattatgcaacccgaataaattgggaataataaacacttttttaccttttccttttcttatcatatactgcagtatgtattgttctttttttgtcacattcactcaattatcctcaaattatatctaactactaaaattttgtcataacttttaccaaaattattaaatataaatatgaaaaagcaggttgaaaagaaaatttattttaattatgatttcaaatgatgcgtcaattaattaaaacaactttggacaacagatgttattcatccaattcaaaggagttgatcactttgacatgaagaatatttttgtgactttccttttggaaaattttgccatggatttgaattcaataaaaagcaccaaagaaattgaagttagaagagcgccaaccttagtgggccagacgacattgtaaaatagatgacccctacatccctttgaaatttaaagttcaaacacctatatgcaatgcaagtgtcaacaagaaagcaaaacaacagattctataagttaccctcaaagcaataatcttatttcattttatatttaaaacattaaaaaacaaaaagtgttgtgtgaagtttcaagaactgttgagacagttattttagttttgagttagttgggaattagttgtgtt

SEQ ID NO: 14899 - DNA, 9133 bp, Cannabis sativa
tttcatatatatatatatattgattatataataataataatattataactattactttttattaatcacacatttaataattatcacaaatttatagtaactttctttttgtttggaaagatttagagtggtttttatttttagtaatttaaattatataatttatatctatttatattatattcatataactgtaaaatattaaaaggtggagtgacattctctatatctaatttttttaaatagctacatctatttttctattttctttacgttatagtttttttttttctacttattcatattatttcaatttaatgtaatcaatcaactaattaaattatactttataatattaaggatacaaacgttcgtgttttataaaacttctcaacaataattttgttcataaattatgaaacattcttaaaaccaattatgaaaccaaaggcccatcttaaaattaattgtttctatctatttgcaaatgttgagaatgttcaaagaactttaaagttaacatgtaataatattaatattgtacatattgaatcaaatagttaattgtgttaaaatttatattgatatatataattttatattaaatattgatgctgtgatttttataaaaaaaaatagttaatagtatatttttagttgtgtatgtaataatattatattattattacaccatgtaacatttaggatgtgtatatatgtgctctctttaggagattaaatccttttctttttcaacttatttctaattatgaaaatttgtgtcgattactgtttttataataataataatagtaattgatagttataataatcataatgaacttatattattgttcctataaattgtataaaaaatgtggtcgaacccgcgcgaagcgcgacttagtcccctaattttctaataaagtaatgatttaagggagtatagaatttgcatagtcatgagtttacaaacatagaaatctaacatctttagcatgattttctttttaatttactgacttcataactgttcaaaagtaaggggattaagttccctttaatcattacccttgtttattgtcttaatctaacattattttccagttgacaatcaaatttttttcctgagggattaaatttttatacatttatcctaaaactcctattcaaaacacataagatattaataagagaatttagagataataagtctcacattaagacctattaattgtacagtctcattatgaaataaaaattttacttataaaataaggaccgaccaattgtacggtctcacagtagaatatttcgtcttaatttacctcggaatttttagatttggttctcatatcatgcttacatacagggcagcatgttccccacttattcagccatgactccacacagcttgaatgaaattccgcaaggtgcattcaagtatgtgtcaataatcctaaatgaaaaatcttattattccaataatgaccattattccataacgaaacaaaacaaaaaacaaattttttttttttgttaaaaataaagaaataaataaatgaaaaatattttaaaaaaatgaaaatcattaccttgaatcacttggggctcctgctagttagggcaccagatagatgaaggggcacaaggggctcgggggtctgctccttatggtgcctgagagagaaagggcacggggtcggtctgctggttagggccgagttttttggttcaaaaattaaaaaaaaatataagggaaaaggatgaatctcagaaggggtttgggtctggttctttccacacctgctggttatggcgtctgagagagaaaggggacagggggtttgctggttagggccgagtttttttcttaataaattaaaaaaatatatgggaaagatgattcacggaagggggtttatggtctggttctttgcacgtctgcgacaaacaggacgagacgatgaataattaagggctaagagattaagagtggatttttagttttttaatatgactatatggggatgggcattgtgtgtatgcaaaagtgtgtaccgacaagctatgtgcatcgctaaagccacgtgtttgacacatggctttaacgactcacatagtgtgtcagtacacacttctgcatagacgtaatgcgcgtctctatcggccatagttttttttattgaataaaattataaattttgggttttagtatttagtgaccctctatatttttagtgaccaacattctgggtgacaaacaccgatcatttagagtctaattgtacgggtcactaaaaatctctcctaactctttagtgacccacacttttatgttgggatcccacttttaaaaattatattcatattcaaaataaactttacaaacatgtggcacagcgactacaaaatgaagcccaagtcgtcccgagatcgaactctccaggttaaaccatcttgacatgtacaatcatccccaagctcttgacttactggtgcttagccttagcctttccttcacctacacatataacaatatctgtcagtcaacagactcagtaagaaaaccatatagcatataatatatcaccaactagtatttaggtgctcatacacctatccacaaggctaaatagatcatcaagaatatttttaacagaagtacaacctttgtacatggactatgtaccgctattgtactagtgttagtagggctgaaccgtaccccgagtactactgagtgttgaaccatatgcaatacgtacttaaccgtactagtgttggtaacatcggatcgtaccctttgaacatcatatattgtaccaatgtactcaatacccttaccgtactagtgttggttgcatatgaatcacctaaacaacatgcatataataaacatacacatatacatgtatatattctatgctagtcgtaccttgtttctaaattcaagtgtgtcagtcgacctgaatggaaaattatgcgctcgacagaggccctatgtcataatcatataaacccgtaaacaacttgctaataccttttcgggaatttaaacaaaaaactagaagtttttctatcgataaatagcattaaaataccctaaaaattgaggaatcatcaaaaactaaggccctagaaacttcccaaatcggtaaactagattcccaaatggaaaactggtttctagggtcctgcttagagaaaaggttaaccggttctaggaactagcaaaacttgtttatcggttcactgcaggagaccctaaaaacatctaatctcacctaaattttccccaaattcaacaaaactttccagaacacctataataacacccaacaactaattccaagcagtagcgatagcataaacacacagaaacacaaatcaccattgttgagccaagtttgagtttcaaactcaaatatgctaaaaaacccatcaaaccagcaaaactagccgaaattaatctcaatcaacttaatttaacccaaaaaatataatcctaagctcaaataagctaaacagaacctaatcccaaacttgcatatataaaacagaagaaaaaccttaaaacttacataaaagcttgacaaaataaaattagggttttaccttggattaaattccttgaattcagctagattactctagaaatcttgaagaagttgggttgaatccctgctggttctcttgtggctgaaaaattagagagagagagcaagagttcagttttttgctcttacactatgttttgtttttaattacttaactttttacctaacataaacaatgataaacctaagttaactctatccaaaaaaaatcagctaccacttagtggaataatccacttgacactaaattaaaatgtcaaaatctccctttttaatgcttaagtagtagaatgacataggggtaaaaaggtccaacattgaaaccccacctaatccttatattccaaaatcaattgtatgattgtccccttaaataaaaggttctaagttcacctatgtgactctaatggccattcgttgtattttctattgtcatcgagctaaaattataaaaattattaatttcacttatgacataaaaaatacacttagagtttaataaaatctccataattaagaaattataactgtaatgcctcttttctgaaaatgagacccacatcatatatatatatattcaaatataactattcaataacaatagttaatgctaattgccccactagtttatattttaatcatgcagccattacaattatccctctattaaaaggatttcgtcctcgaaatctaacctaaatgacttttgatattaagctctcatgccagactctaactcctaggtggagaataccttgaccaatgttgtggtcttgttctgaagaacctttttctcctatcgaggatttaaatttgttgttcctcatacgataaatctaactgtagttctagggcttggtaactaaagacatgagtcgggtctaacacatatttcctcaacattgaaatatgaaaaccatttgccacaactaataatgttggtggcaaggctagtcgatacgctacctccccgaccttctcgagtatctggaacagacctatgaacctagggcttaatttgccctgctttccaaaacgatttacacccttcattggtgagactcatagaaaaacatgtactcccacttgaaattctatgtctctgcgtttgtaattagaataacatttcttcatgcattgtgaagtaagcatctgagccttaatcttgtccattgcttcattggtccttcgaactaactcagaactcaaatacttcctttccctgatctcgtcccaataaattggggagcgatatttcctaccttacaatatttcatagggagccatccctattgttttttgattgttatttttataggataattctattagaggcaagtatttactacatgaatccttaaaatccatgtcacagactcgtaataagtcctctagtatctgtattcttctctcggactgtctattggtctgagggtgaaaagttatactaaactttagctttgtaccaatagctctatgaagacttaaccaaaattttgatgtaagctttggatctctatctaaaatgatagatttcagaactccatggagacgaactatttctttcttatataattccgcatattggtccattgtatatgttatttttacttgcagaaagtgtgatgacttttttaaacggtcgagtatgagtcattctgaatcatacattcctgtggttctgagcaaaccaaccacgaagtccatcgtaatatccttccacttccattcaggaagagctaatggttgaagtaaccttaccagtttttgatgttctgccttaatttgatgacatgttaagcacttggatatgtattccactacatctcttttcattccgcaccaccaataatagggtttcagatcttggtggtacccagatgtaataagcaaggtgtagtatgagcctcatcaagtatttctttcccaagctcactactgctcggaacacaaactttagcattctaaattaacattccattgttggaggctgagacatccttagcccaactagctaacatctcctctatagtcttgactaactcagagtcttcaaattgcacctctcttatttttactaacaagtctgactgaactgtcagattatacagtttcctacaacgaactcaataccaactctaaccatatctgaagccagctaaggtgagaactatatagtactaaaaacctgcccgagaccttttttgcttaaaaaatctgccaccagatttgctttcctagggtgatacaaaatctcacagtcataatccttgactagctctaaccaccgcctatgcatcatattcaaatctttctgagtaaataagtacttgaggatcttgtggtcagtatagatgtcgcacttctccccatataggtaatatcaccatatttttagggcaaaaacagcaccaacaagctctaaatcatgtgtcggataacgctgcttatattccttcaattatcgagaagcataagtaatgactctatcagcttgcatcaaaatgcaccccagaccttgtctggatgcatcacaatagactacaaacttttctcaatcttatggcaaagttagcactggagccgtgatcaatcgctgcttcaactcttggaggcttgtttcacgcttattagaccatatgaagtgttgattctttttagtcaattttgtgagtggcattgaaatcttaaaaaattgttccatgaaactttggtaatatcctagcaatccaagcaaacttcaaatctcagtaactgtacttggcctcagctaatttttaattgattctattttcccttgatcaaccataattttgtccattttcatgatacaccctaggaaggacacttttgacaacaagagttcacactttttgaactttgcatacaacttatgagctttgagtcatcgcaaaaccatttgatggtgctgctcatgcttcgcttctctctaggagtatacaaagatgttatcgataaatactacaacacaattgtcgaggaatccttgaacaccctgttcataagatccataaagttcgtcaaagaatttatcaatcaaaatgacatcactgggaactcttagtgaccatacctattccaaaatgccatcttcgagatgtcttcctcccgaattctcaactgatggtaacccaaacacaagttaatcttggagaaagtagttttaccctgaagttgatcaaataagtcatcaattctggtcagtggatacttattcttgattgtcagcttgttcaattctcgataatcaataaacatataaagggatccatctttcttttttcacatacaaaatctgagctccccaagacgacaaactgggtcgggtaaatgctagatccagcatccctgaagttatttttttagctccttgagttctactggagccttctaataagtggcctttgaaataggctctgccctaggtgccatgtcaataatgaaatctatctgctgctgtggtggcaatcctagtaactccttgggaaatacatctagaaattcttttacaattttgacatgcttaggcccaaatgttttggatatgctagagtaaatcacaactgctaaaaatcctacacatccactgtgcaataaatctttagccctaaaaattgaaatgattggaatctgggaacgctaaacagacctgacataaagaaaaggttcctcactctctagttgaaaggttaccatctttcgtttacaattaatacttgtggaatacttggataggaagtccattctaagtgtaatattgaactcatttaaatctagctctaccaaataaacactcaacaccctattctcaactcttattggcacatacctaacttaccttttggagatagctaactctctgctaggtagtagcattccaaatccttcctctaaaatatcactgggcctatccaactgattaatcactctcgacgctacatatgaatgtgtagccccagaatcaaatagaattgtaaaatagaagttgttaacaagaatctaacctagaactattgaagcactggctgcaacatctgcttgagcaatagcaaatactcgtgctagagcggtctttgcttcttgctttggttcttctttctttagttgagggcaatctttcttcaggtgcccaaccaaacaaaactagaaactggctttccagttacattccacatggcgatgtttcttacaatgaaggcactcaagcttagaataaccctcacatccacctctaccttggttcccacagaacctcttactctgacatgagcttcctgatgtcgaaaaagtattcctcttttaatcaatgttggaatcaccaccatccctaccataataagaaaaaggtagagtggtggtcccactaacacttggagtctctcagggctcctaatgaaattccactacaccctcagctcaaagagccttctcaaccatcttagcataagttgttgtgtcatttgtggtgataatgagatcatgtctaatcttcacattcaaacctaccaagtatttatccttcttgctaaactctgtaggtactattccattactaacatattctcaccctgaaccagatcaataaattgtctccacttagcactacggacagcttcattataatattaagcgttgaacaaatctcaaaactcttcataggtcactgtagtgatgtctcgggcaagtgacaccaaatcccaccacacgatagtgccctcctggaactaaaacggggcacaggtcacccgatcattctcagtgacaaccataaagttcaagattctctcaattactgtcagccactgctcgactttcataatatgtggacctcctagaaaaactagaggcccttgtttatgaaatctctcatacaaaggctccatacggttaccaacaataagttattttgctggcactgctggaacctaagccgccggcacttgctgtggaggtactgtaggaggaccctgctatttcagcctctaagtttcttcatcttgctcgttaattttggtttgtatttatgcaaacctttgctcccaatcctgaggagcttgtggtggattttcatgaccacccctttgaaaccttccatggcctttgtagcgtccatgaggacacgaaggattctgacctccccgactacctctggtctcgaccatattacatggactccttgtgtttttcttgcgtccatattataggacttagcctgcaaagccataagtctggtaggtccgacatcgatcacttatattcaaatactgcatttaaggattttacgcaacacctttaaataactaaaattttactaacatggttcctataatgtttttttaaacccataacttactaaccaagtataggcttactgaactgtgagtcaagcttatctctgacgatgattgtacatgtcttgaagatcttcgatgaacaacctagcagctttgataccaaaattgtaacgccctaatgctaaggcacgctacagt

SEQ ID NO: 14900 - DNA, 16959 bp, Cannabis sativa
tgttttcttaagatagggtcggtccgggttgcgctgtttgggttataatatgtccaggccgtgtccgacccacaaccagcgggttatgaatttttcaaaccatgtggacttcggcccaaaattatacaggttgttcggcccattttcggtgtgggttggccgggttcgtctgcccaccgggttacatgctcagccctagttacaactcctttgctagaagattttctctgacattattccaacaaagggtcgtcttggattatccaagggagaccaattcttatgtaggttttgtcattctagtgaggaatcaactctacacctcttttgcaattgtcatgttgtctggggcatctagtttagaagcctgtggggtcttcgagtcgatagtcttaactggaacaatcttacggagtttggcgagtggtggtgtggattatcagatgacaacctatctttgtttgcagcttgtgtctgtgatacgacttggagatggcgaaatgacatgatacacaaagaaagggtctgcattttagaagagatatctatgtggattgcatgcgtaaatatagtgagttccaattgactcactattctatttatatggatatcccttctgagttgggtggggagaaacctcaccaacaggtgcacgaagataccagattcagggtggacgcctcagtggttagggaggaggctggctttgcagcagttcttatcatgggtaatcagttggccgattatatcattgcaactaactttggtagggtctacagtgtccttgaaggggaattgcagggcatccttatggcccttcaaatggcctcggaggcaggtttcaagatggtgagaattgaatcagattctaaggctgctgctactgctttccaggcgggttctattcccttatgctgaagcatttttcctctgttttctaaatgccttaagttatgtaaggagattgtaaatattgaagtgtcctacattcctcgtgatcaaaatgtagttgctgacaaattagccgagtgggctagagttaattcttcgaattgtatgagactttttagcgaagtggctccttctgtggcctctaacttgttgtagttttggtttgtctttcaataaaagtctgtacttatccaaaaaaaaagaagttatgttcgtgccttctgaacttgtaccgtattaaaaaaatactacttggttgtacttacgaataataataataataataataataataaagaattaatgtaagtaatatggttcttataaatagtaaatatagtgcaagaaaacagcataaaattttttaattgaaaatttgtgttatattacaattaagttgatattttggtgaaacttaattaatggcattttatttatcaacttaaaatcatataacatatttagatcatatgagaaatggaatggaagcatggaaccttgatgcaatggttccaagttccaactaattttccaataattttgagcaatatgatctttgtgtggaattttccatatattttctttgtgtggaattttaatgagttcttacaaactattattagagagatgtaatactgtagtgtgtatggcttgcgggggatattagattgcgtgtgtacatgtgtaaattgtaataaaatcagaaattaacgatttgtttttagaaaaaatgaaagagacttttgtaaattgtaatgataaagaaatataaaaattatgtattttttttttttgaaaatataaaaattatgtatttgtacatataaaaaaatatgtaaataacgtacgttgattatttaataattattagatcagctagatgattgacacacaacataatatgcataaatatatataatggacaatcatttgaagaaattaattaaactggacacacttgacagtatgatattccaataataaaatcaaattagttagtacacagcagtagttgtattatgatatacattccaatatattacatattggactaaattataatattagagagatgagagatataaatcatataattactgatttatatatatatatttttttgctaaccactgataatttatattgttgaagaatttcaactgaaagtgatcatatacagctgtggagcaataaaaagtcacatttttttgagataggaatataattaacggcttgaattgaattgtttagatggtatatatgtgaatatatattatataacatgccaaatttttaaccaataaaagtctcacatcaacaacctgccactactctactcctcttctacacgcctattctatttctattgtattgatattatattctctcatttataaacaattactattcctttcccaccgattatccaacccaaccccatgtgttttcttcataataagaatgcacaattctaattctcaaccctacctacaaaatatatattacatatgtcttatatacttctctttatatttgcagaattatattccctcaagcatttaattaatacttatttttacatctataaaatatgaagctcattgatcacactctattattcctcctcctcaccctaaaaataataaaaagagaagaaaaattcatgtattattattaagctaattagatttttgtttttaaatttaaacatgtattaaataatgttctcgaataatttttttttatattattaaaattattagatttaaaaattttagtgcaatttaatttaattttattagtatgtaattatttatatatcaaatcataactctaaattttaatatgtattaaattgtatcttctaaattttaataggtttgttaataaaattgaacgtaaatatagttcagaaaaaaattttaataatctaaaaatttaagagttcaatttaataaatgtaaatgtccgaaaaaaaaaaaaaaaagaattttttcccgtaaaattattttagtgtatacgaaataatggtcaaaatcaaatatgcatgcattaataataataataataataaatagttttttttcgtagtcatattgaagcaactctcttaaaggaaatatataataatccgaaaataagagtaggatcattgtcgaagcaactaaccaatcataattattcctaaaatcaaaccaaacacagccctttccaattctattactatatgatggagtagactagtggacaggtcatcaaacagcgcgtgggaccatattgccacgtaggacgacggaagcatatttgggtacgacaaaatttgccagccggcaatgccagctgtgtcccttttctcaagacacgtggcatatccagctcagccgtttctaattaaccttcaaaagtcaaagagaaacttaaaaaaaaaaattgaaatttaagttaatttttacgaaaatactgtcacatagaaattttttcaaaaatattatatttttataaaacactagtaaaacacaaagcagaacaactcaaaacaacagtagaacactagtaaaatatcagtagaacaccagtgtaaacttaacacagtatactgcagtatgaaacttataaaaaaatatagtaaaaaagtaaaaaattccgctttttgtaaaaaaataacaaaagttagtatattatgtaaattttccattataaatggggatgtgggccgctattcattcctcacctcatctcctctgctctgctgacccaccaactattcaaaccccattttagttgagaattagagtgagttcattttttaatcaaaatatatagaacacccatatttctacactcaaattatacaactatatataaagactgaagtttatctctatattttcaaaaaaaaaaaaaaaaaaaagttacacaactgtaatttttttaaaagacacttttatcatataataacgtgtatttaatttttactagatataggactataatattttcaattgtgtcattaaaattagttatatatcatgaaaagtcagcatataaattaagagtatatttttctttacaattatattaagaataattatataagatacaatgttttttggtaaaatatttatatttttacgttcaacgaatttttttttttatatatttttatgattttttaaaaaataacacgaaaataatataaaatcaacaagaaatttacataaaaataacattaaaataagatcaaaataacaaaaaaaatagcatacagataacaaaaaatcaacaagattacaacaaaaagaccgtattttctgtaaataaaataaaataaaatcgtaaaaatatttaaatatttaaaattttataaaaccgtatttttgtaatttttatatttttttgaaacaatcccattatattacttgtttttattattttttttttggttaattaggcagagattggaatcacaattagttcaattgcatggattggattttgagtaatttgctgggttggctaagatttgcaaaatgtgatactgtcattaacttatccatttagtctttagagacagaggaaacagccaaagttgcagttaagctttttctttgctcttataaattttataaattagtgacctcagcctaatggttttcccaagtaacaatattctcttattgcatttgttctgtcttggcccaaatcagtatataaccgttccttattatgtgcaacaaatagtataaaacatacatatagttatctgaagtttaaatgaatgagaatagatcaggacttttatattataataataagtatgtggtatatttcctttaaacgtaaatatctccaaaagttgttctagttatgaaaagttagatgtcatctggagggcgtttttggaaatctaatttgttcatccagaaatagctagtatcgtgaaataatggatgtcatccagaagagcgttcccggaagtctaacttatccatccgaagagagtcttgtagaaagatagatgtcgtccataagggcgttcccagaagtctatcctgtccactccggaagaagtcttcaagaaatctaatcttcctttggaaaggagttccgaatggctagttgtttcttctggaggggagttccggatagtcgactccagatgttgcctttcctatctgggaaatcccgtaagcgtacactttagtctttctttgaggaaacgtatgtctcatctggaagcactttatcttatgctgacgtagaaatactgttacaagaaatttgttaagtttgttaagtcgtaactaacttaacaacttaacacttgtagccaccgattttaggatctatatcctagatctataaataccaccgacacctatcatttttagaaggatgagatcagacgagtttcaggaggtaatcttaagagagaaagattgagaagtatagagaaaagagagattgggtttggattttatataaaaaatcttctgtagatgaagaaaattctttagtaagagtgtgagagataaatactttggaagcatctaacagataattgatctgtattgtaccatattcttgcttaatcagtaagaaaatttagtgatattccaaaactagagtagaaccataattatttgttgattaaagtttaaacaatttgattttgcactttaattagtataattttcccacaaggcatatataataactttattttcaaagctgttttttttaaacaatgttctttagcaaaatgatagtgatattttttaaattactattaatcagcaccaccttgaagatagtataattattaaattaaaatatatgcgatctaatattaaattagaccgataaagatatgacacttaatccacttttagcattaatctttccgagttcaaaccgtgattcccattataataattaaacttacgtataacatttggttccctcttattataaagggttaattaatgttagtgtactttcatatgtacagcccagagcagaaaggctcttaattgcagaagcatacaatattactactggacactatttcgtatatatatgtgagtatttttttgtctttttggtgaaagaggagagctagcactagtctttagtagctttcatgtagttcgctcacacttgtgtgatgtaaatgtaaactttgtaatcagcgaacatgacatatgagatgatcatgagagtctaaattctaaaaaacacacatatattatccaacttattatcgtttcattaccattttcttttaatataaaaaaagtaagctcatcacaatcagtcaatcatgaataatgattttgacagatataaatatataacaagttaagcgcgttatgtattattctaatttattttggttattaatgatagaataagagtgtaatttacatttcataagaaagcaataataatatataacagtatatgcaaagacataataatgagtagtaaagtaattgatgttgtatatatattttttgttttgtaaatgaagaacattatgactttgcacttgtataaatatatatttggtcaaaagaggcatgaacgcaaaaagaaaagttagtagagatacaaaataaaagcaaaaataatgaaaaaggtcacaaattaaagaataatataagacaagaaactacgtagaagaacgtaaactgtaaaaggaagaagcgcaagacacacgccacgctacgccacgcaaattacggtctaagattttcccttattcaacaagttacacggtcttattgttaagcttaacttcgtcggtaggctttttctgttcgtgtgtaaattataaatatgcatataatgtttcagataaaaaaaataattagaaatgaaaaagatattttaagcttttatgaccaccaaatagtgggaccctaatccacggggatcaggaaacatcggttatatattaaattttgtgtggacccttaataagtgggacctcaccaagaaccgtcagataatcataagacgctctcccaaggtggaccccacactattccatggctgatggtttctttgtcccatccatacatgaagctgtgcctgtgctcgtgtagatatatatatatatatatatatataaataaatatataaacttatatataggttcgagctcatgacatgttctaagttctaacaaccatattatatggcattgcgtttattatttccaattatgtgaagttatttctttttacatccttttgttatggaattggaacttatatctttttattaccacataaagtaagagattttgtacttgttgtaaaataatgtagtatatatgtgtgtgtgtgtgaaagaagtatgtactgatactaataagtacttcaactaccacgaatctaatggcttagaaacttactttgccatgcattgttgtctcgctctccttgtttggtacaaaactaaaaaaaaaatcagggggacttgtggtagtggattgttgtagttttagtcataaatctatggtagggtttgagaggaaaggggttttagatctttgtaggttgttagtccttgttgtgggacgttaatatttgcaactaaaatctaagtgatacaccattgttgagggtctcaaatatgtatgaaccactatcatggtattggtaggattgggaaatcaaagtgagacgaaaagattttttgtgagattgcataattgtaagacagtgggggccagtgaatgccgaagagccccatgaccgaaaggctgtcccaatttcctcatctctgtttttcacccaggagtgaaaaaagagaaagaaactagtaactaataattaataaatggtaagaaaatcatttcaaaaaaaaaagaaaagaaaatttgttgtgagaagatttgagtacaaaatcatgagatgagatattgggctgatagtaacgagacgatccatccaaatagtggtccacaaacaaacacaactggcttagtgatgccatgtggtgttctctcatcttatcaagaattcggtaccctaaaatagataagatgccccccttctttatgtaaaaggacctctaaggtaatcctgtaatgccaatatgtcaaacccttaaaaaccttaattattattgtttgcatttacgttccgttttactttagctttgagttgttacatcaccaaaagatgaagctcaagttccagcagagcacacacaaaaaaagggaaaaatcacaactcttcagaagtccaacttagagttctctcctactagaatcgatacgtttcccaatatatgtaattaaagacccttggctaccgttttttctttttacttcaatagattaatcaaatgctattcttttcaaagactaacaagtaacaacaaagtcttcaaatcccatttaaaataacggaaagtcaaaacattcaaccggggaaacaggccaactacccggttattagaaaatgtgtcataaacaaaaatttaatcataagcggctaaaaatcgtattctatgctgattagaaattagaatctaaaattccgtgtttaaaaaaagattagaatctaaaaaaattccctctgccagagggatacgcaataaagtagactgtggtcggcaatggctttatggttcagtgaacatgaaagccatcgaaaacttttcttaacttttagctatttttataaataaaaaccctgcaacttcttatctcgtgaaagcagctgaaaagggttagggaatggcctgaaataataattttcattttcccctatttcgctaaattgtcggcatgtgagaacaaacgacacaaataattgaacctaaccatgacaaagttagattcgcaataaacgcgtttgtagcatatagttatccacaagcctaacgaaagcaaataataaaaattaaaaagatagcagcattgccaactcggtttccatacctgacctctattaaagaaaaagattaaaaagaaacaaaagttaaatataaatccaccacttatattattaagagtatctttttccttaactccttttcatgaattatccgacattttctgttcttgcctagaataatgtttattagagagaaaaaactatatgattggtcatgattggaacattctttaataatgattaacagagtaagttaaacaaataaagcaaaataaattgatagaaaataaaagtatcagatgtataatgagagatgaactggttgtcattctaacaaacccaatagtataaataaatatatttatatccctaatcctcctaactacatattatatgaaattgtatatcacattaaagaagtttgcaattccaacggtaaagtaatactgtactaagttatcgagattttgtttacctacaaaatcaacaggctattggaagcatcagtggtaccttcgaaggtcttttatcgactctttatatgccaacctaatataatggtgtatggtggagttcgattaaaaaaagaaatccttttaaggatttattgccacactttttcatagatgtatacactccaagcaaatttttttttcctttttctcatctgtaaaagtgtatagggtcacgcgaaactactgctataaaaagatatttgagaagctttcattggtgtgcaaaaaaagaagttacgagtcaactctgcagacaaaaaaaagagttgaaaaaaaattcagttgagggttaattgtagatcataaaataaaaccagagtcaaacaacataataataataattataataataatatattgggttttagttcaaacaagtgacactggttttctagatactgtaggtagacagaatcagatattgaagtaacagactcaaaaaaaaaatatgaaactggaggaaagcaacccagtgtattgagctccagcaatgcatgggccatgtgttgatacatttaaatcattttgggtgtactgatgacaaaaatcaattcaataatacagtgactgcaatattttataaatagatggtagctgatggttagttgaattcatcagttagaagggaccaagttgtatgaatcaagtctaaatgtcaaaaccagctccagcagacatacaggatcaaataccaccaaccaaaattttgtaggagtaaaatgagtacataaacacaaataatagactcaatatatttattgtgttaaatcatataagttgagcctgtaaaagtattagtgctgcttggttagccgatataggtgaaagaactgttgcatcaaaattcagcagaaccactttgatttgtcttaaatcatttgaaaggcataaaatttccttctttataagggtaccagtgaatctaacgaaggttggttaatttttatttcgagtttagactccagacttttcacatagctactatgcgtaaaactagtgagaagatacaaatggtttgtaaacaaaatgcacgtcttgagataatagtaagccctttcaaaaaaaaaaaatatatatatatatatatataaaagtaagaaaaagaacaaaaatgtgaatctgtgatcacaacaaaaaagcagcagctatcgacaacataggacattgagcagaaatgaaaaataaactaaagtagtaacaaacatttttctcaccagaaggtaggcgtataatagctggagctatagcttgtcctgttgaactggtaatttatcctaaacactgatatctcaaccataaaaaataagtaaaaatggagaaaaaggaggaaaaaaagaagatcaaaacaatcaacaccagttgactcttacacaaaattaaatattgaatagatgataatgcatatacgatatggaaactgtcatatatggcactgcacatatggtattcatagtcgaaaacaaatatggtattttacatgaatcaagtactgcacaaagaaatgcattaagtgtagaaactgtcatacacgaatataatacttgatggaccaagaaaagtatctagacaatattcaccaggaaaacatgcacggtagacaaataaataattcaggaaatttgagcatacgaaaattattttccagatgaattaaaatctggatccttgttaaagacaggatgcttgacttctgaaaatgaaagaatttgacttttaaaataaggtgaatataatgacagtaccgtgacaaagtatcaaaagcaatgaccagaatagcaacaagaaccaacactcacttacgctcttaagggaaaaaaacaaaattcaaaagagccattgaatccaggggataccttcatacttttggcgaaacatcaccttaggatggcgaggtgttttcatcctttgcttccaattcttctggtaaagtgctctcatctttaacttccaattttactggtgaagtgttctcatcctgtgctcccaattcttcttcatccgccttacttacaaaaacaacaccatttgaggaactagaatcctcttcaacgacagcttcttgcccatcattttcctcattccccgcaatctcctggagagaataaagatgcaaacaaaactccaaaatcttatccagggatagaaatgagagaatctcaaattttaactacagcgaacagtgatgtaaggtgactaacattgatcataacaaagaacattttatttacgaatatagcatcctgatcagccaaatgcacacccaaatttacataaaaaatatttaacagtttatgagaaagtatgtgcaggcaagttgtatgtgtatacagaagctttccgctcgtgaatattaaaaagataaataaaaaaatagtgtgatgtttgagatggcccagttttgtgatatactatcataatagaatattagcataattatatctatgtataaaacaatggccctatgggttagtaaaaaaaacatggtcctatggattcaggatgatgagaagtgaccagaggtataacaatatttctctattgtcggttaaagaattttagctacagtacaaaaatctctgtaagaggttagcatttcgtacctcatgaacatgttgtccattttcagttggatctttgttttcatcaatttgcatgctcttaaaattctcaaggaggttggtggttgatttttgagcatagatcgggtacagttcagcaggaggataattgcacctggaaattgtatccatggcaatccactatcacgaacaaataaatgaagactagacagcataaacggtttatcttagtgcatacaactttgaacatctatcatgcacaataaaagatcatagagaaaaaacaaaagtcaaatacctattttttccagtttctgcttcaagggaaagagaaacttcccagtcgtcaaacaaattagggtattcttcaggatcagctaatgactcagcagctttcttattgacctgcattcattagcaagtacactaaatcataaattcattggttcaatgtgtggaactgaaaaaatggaatgatccacaatgtttttatatttcagttcgtaccacttttggtcctgtgcatgtctcagtgacatgatccaaaatctttagtaatgaataaagtatgcagaagtctaaccttgtttaggtcatctctccaaattgtgactatctctgacaccttgcttggaaggtaagatcttgccattaaagcagcttctggtattcggttactgcaaggaggaagtcaatactttaaagcctttattaatttgaatatggtcattatgcagattattcagaatcatccacaatagaaatttagaataggaggattggtacttaaatgtggtcaaaaaagaggccaatggggatgtcaatttcttaaattaataataacaataatataaaaacagagtgctacatgcagtgtggaagtatacctgtctatcagcagttggatgcactcttccaattttcccagcatgaataaacaaaggaatgccacattgttctttccttgctctttggcaagggaaacaagttttagtataccttgagcatctccaatagaagagtagaaaagcaacaacccactcaaatccattccatgcaatagacaagtttcagccaattcaaactgtacaaacgattaaggcacaggagattattggtaaagaaagaaatacacaagctactgctgatgtttattcatgacagccatatgatgcatgaaaattaattcaagtgaacaaacagtaaaaacataatagaacgtaaaattgcaaaaagttggtgatataacctgattatttgcaatcgatgctgcaacttgcaacaatatagtacctcaaaatagcaaatagctcacttgcttttgtaaaaacgaaatgaaatatgataactaaaaagtagacaatttatcctaccaataatcagtttgacctgccaaagtaacttgtcaccatgttctggcagaaagaggtcaaagtcatgaaaatacaattctatagtaaatatgctcctagaattcctacaataatttttttctccatttcaaatttttggtcctggtggttcgatctggagacctttggccccaaggtttttgattctatgggcctaccagcactttccaacactcctccttacctctagaccacccgttggggtttgaaatcctataataattatttagtggtcctaatattgcagtataatagacacctcatttttttatagacataaaattcattagtgtaatgacttgaaaatgaaagaacactttttaaattgaaatgtaaatcctcaaaaatgcaattatgtttcaacttgacatcgagaaatgattgaaagtaggtcaccatcagaaatttcgaaaccatagaactctttgtactaccagcttcaggatacaatattcatgttaaagaaagaagtgtctcttgtgcatgagtaatgactaagtgacaatgcgaactaattaaatatttttaaacaaaatagatatagatgcagaatcaaagtggaagctttactcttgtgccaaaggctcatatgaaaggggagaccatattaattactgctcataaaaagtaaaggaaagagaatacctgcccactggacatagctaattctcccagctgcttccacttggattcactttgggctttggtagcaatttcctgaaagccaaacaagataatgaacttgtaaacaatagaacttagatgtagttgttgtgaggaaaactttaccacagttgctcattagagaaaagttccactactgaacaatctggcattgaaaataaagactctacctttgcaatctcaagtctcccaagctgtatagccagatcaaatttgtaatcaggatctgtagccacttctagtgcatcttccaacatccctcgagattccaaaaaacgagcaacactaagaagcaaaaatatagtatcagttgcatttcagaatgctttctatcaagacataggataaatgtcagttcagtggacatattcatcaggataaacttgggttgtttctgcccctcgggaatgttatagggcttcagttctacactgaaatttgtgcaaatgaatatttgctagttgggatcaaagttgctccatgcaaacaaaaattagaagtctcttcagttggcatccaaagtccaaactaggcgtcaaaccatattatggggccatgcatattggtcagactagaaatatatactaaccaactagctgaagtaataattaccagcagaaattttacaatataaagccgactcctgtaaactaccaaaagaaacatttagaaaaataggcaaaatggaaaataatgctgaatttatttattacagtggagcttccttttcacaggacatgaggtcgtactttagcatactacgtgtacatgattctgcataataatttgcctatgcaaacaggtgtttccttacctattgaattgttctggaggaatagttggtaaaatttgatttgcgcgatctagatctccacgcatcacaagagttttgtattcaatcaagctgagaagtaaagtgtatcccatgacactacaaaataaaaagctcagattaaaccttgaagttaatcttgagaagtcaaatgtttctagaacagataacaataaacactcacttgaagtctttatcaataagataaactcgactttgattgggcagataacctaacaagtacataggtcggtccaggtggaacaaagttgtcacctaaaatatcacattaaaatgatttagcaattgttttgtaatcacaaccagcactaaataaagatgttgctgaatttaaagcttgttcacctctccgccgacacagtaattaagtcgccaagaagagttggtgtagatgaaacaatcgccaacccaaattcctgttctggcacgatcatttacttcatgaagaagctcaaaagcatcctcgacaccttgttcatcaactgaacttccactatcaaaatatgatgatacaacatctcgctgccaaatagaccatttagttaaatgtgggaccccaacctcaaggcacttcaatattcaaaaagctaaaacatattagtgagtccaaatagcaaagaagtgatcttacattgtattttagtacatagaatgatgaatcactaactattgccaccaaatcaccactatcagcccaataaacattctagaacggtaggaaaaaaaatcagaagtaaaaattagtgaacatgatgatataggcgataaacaactgacatatatatgaaattgttcatactttcacattaacatcaatccgcctgatcaatctgcattcaatccagtcgtaaaagcagatgaagtcattagagcacattgctagtaacgttcccccgtacacgtgttcacataagaatgtaggtcgaatacttttcttctcctaaaaatgccatttcagtaaagctccattaataaataaattgttaaacatccaataccaaaaattgaagcaatctcagatttcaatcatctttggcatcatgcattcagcagggtcaaacctggaatgtcttgctaaataatttgatccttgttgtactttctctaactgcatattctccttctgatgaccaggcaaattccagtgctgagccaaaggatctatttctccaagctaaggctgtatatataatgtactcgccatctccacaaacaacaacaaacctcccattgggattgtgttttaagctctgcaccaaacaaaattataacacgctatttggtatgattgcaaaatatgtgaaactagaaactgactttacattgtattattacaagctaaaccattatagcatgcagactataaaactaatcatctcattttatgttgattgggtactcaaaaattacataggacgtattagaccagaccaataagtaaatagctagagttatagtagttaagacagcaaatacaattagtatgaatgaacaattacgtcagtccattgttataataattgatcatcaacaaccaaacacctgccttaaaaaaacatacacctagaaaccatggatgataagatgatggtagaagctcaagatatagagggataaagggcaaaattaatccctctttctcaaatattcttgagtggatactttaatagaaacctaggtaggaaagaataattgtcatacgagtgtacaaactttcaaagataaaagctaatatcttaaattcgtcaatattcccgtagaaagggaatgcagtaagaattgatccaatttacagtggaatgctctctttcatattttgacaagaaaaatcattaatatgattgcaaaaaaacaaaaaaagactggaagattaagggtggaaaatcaggaaaaaaaaacgtaaaaaatgaaatggttattccacccattttatatacggacacttccattagaggtaaaaatagttattacaattgaatggctgctctcatgcattttaataaccaaacaaagggacttttttcttccattccataaaaaaaaaaaaaaaa

SEQ ID NO: 14901 - DNA, 4999 bp, Cannabis sativa
  modified_base (47)..(66): a, c, t, g, unknown or other
  modified_base (2629)..(2643): a, c, t, g, unknown or other
  modified_base (2726)..(2733): a, c, t, g, unknown or other
gcagtatgaaacttataaaaattacagtaaaaaagtaaaaaataccnnnnnnnnnnnnnnnnnnnnaaaaatagcaaaagttagtatatcatgtaaatttttcttttgtaaaggccaatgctacaatgtgactaaataaatattaatcaaaatttttggttgtgactaaaaaaatattagctacaattttttgttgtgactaaagaaatattagtcacaatttttttttggctaaatatatttaggttgtgactaaaaaaatattagtgacaataaaaattatgactaaataaatattaatgacaataaatgttgtcaacaaagaaaaataatttgtggctaaatggtggttgtaactaattgttgtgacatttagtcacaaagattagttgtgactaaaagtaacttttagtaacaatattatttttattgtgactaaaacttttaactacatactttttagtcacgacaccgttacaagaaaaagttgtgactaaaacttttagccacaacatttttcatatttagccacaacttttgttgtgattaaaaacgaagttttttgtagtgctacaacattagtagttttgtaaaggccaatgctacaacaatgatactttgctcaaacatgatgcagtgacatcaatatatagtttattctttaattagaacgtgttacattcttgtatgtctaatatagttaagttgagcgaaatgtgttactctcacacattcaatataatcaagttgaatatggaacgtgttaggctgacacgtttaatttagctaaagcttttttcttgactaatgttaagagtagtttaattagttgtagttggttatttttctgtcattagtttgttattttgtacaatcattttccattatttctgttaggttttcctcttgtatattcaagctatataatgctctttcctcattgtattttcttcaacaattaataaaaggattgcttttgctctgtttcttccttcttcttcttgttctctgttctctgttttgtaatatggtatcagagccccgtttttagtttgcttccatggctcgttggggagctcaaactcggagttcagctggagagagaaatggatctgataacaccaacagattctctgttcttgaagccaatgatcgaccacctggagagaatcctcgaaacgccttctacatttccagtggagatcaagctgtggtgaatcttgttcctaaaattcttactggatgtgaaaattacagcacttggagacgctcgatgatagttgctttagctgcgaggaacaagatcaagttggttgatggacaattgccagaacctgacaaggatgatgaagattatgacatctggttcagatgtaatagcctggtgatttcgtggattcttcatgctgtttccggtgagattgctaatagcgtcatgtatttggataatgctgcaagaatctggacagagctgcaggaaagattttatcagaaaaacaagaagagaaaggagtagagaacaggaagtgtggtgtgcttcagaggtttgggttcttaggtttgtcatcggttgtgtaagagggagagagaagttaagtttagggtcacatggataatgggaaggagaagaggaacctcttcgaaggttcaaataacaaaataagaaaaaaagaaaggaaaaatgaaaaattgatgaaaatgaaattacttatttttattttttttttactttttttaaaaaataaattatttaattttatttaaatattaaaaattaggtagaccaattaaaatataacatgtgtacacttgagtacacatagatagacttatttgacatttaaggataatttactaacaaaagggtaaataacataagtgaaatttagagaattttactactaaaaaatcaatttataaagttaaaagtggcaaattatacaatttaatagaggaaattggaaatgaagtaatgtttgtgaacataggaatggttgtgatgtagatctttatcatacattgggacttgacaagtgctgtttataaatgtcgtctgacaaagatagcacaacttgtttccacataaaataatatatttttattattattttgggtgtgctacttttatgtgaacaacactgccgtacaaagttgtataaactgatttcaacacatttttgttatgtccatatataaataaacaacacactcaatacctatctatctatctagattgattcataataataatggctttcactgagtgccacaaataaggctatgacaactctcttacgtctctcttccttttattttatttgctttctacattaatttttgtctccaagtgatttgttttctcagaaaacactgttcacgtttaataaatatatatataagaaaatcaaccaaattgcatgactcacgtttaaacaaatgaatcaaaatagatcgggtttaggtggcacaatatgatttgcggacctaagaataggaggggcaaactcaggtaaaagagtaatagctgctttgaaatatattaaacttgataactttctaactacaattttaaatagggtttttttcatttttattaagaaaatgttttatactttaaaacagttttttnnnnnnnnnnnnnnnttacgaaattttatatagaaattcctattgcaactagcgctgcaacctaaattgcaacgaaaaatcgtatagaaacccctatnnnnnnnngcgctgcaaccactttaaaaacctaaaccgtaaattttaaccgtaaattttaaaaaaaaaattaaaaaaacagtatatggggtaattccgtttttaaatattagttatattatttcaaaaaaaaatatttatcaattttttttatatttattgaattgttaataaataaaatattttaaaaattaaaataaaaatataaatataaatttaaaatttaaatatagaaaaactattaaaaatatttaaaattaggtacaaaattatttatactataagtaatataaaataaaatagattagtaatttaaattttaatttatattaggtgtatataaattttttaaatatttttagtagatatttattatgaaatttaaattatatatcataaatattttaaattaatatctattaaacctaattaactcgaataatttttattttttatatgttaattataaaaaataaaaaaaattatttaattgattaatggtaaaattaatttatgtcacgtgattaaaattattataatataaggcaaaaactatattttatctatgtaaattgaggaaaaaaaagtttaaagtcattattaccgtatctcacttgtagttgtcactatgttcaaagttattttcatcactatatcttttttttgtaattgtcactacattcaaagctattatcaaatccgttgtgattaccatatctcacttgtagttattactatgttcaaagtcgtcataatcaccgtatttcacttgtagtcgtcactacattcaaagtcacaattctcagtactacatctcacttataatcgaaactgcatttaatatgaatgtcattaacaaagaacattattaaaatcaatagaagaatgaaattaataaaatcgtttgaagcaatattttgattatatataaatattaaaataaataagatattttactttcataaatatagttaggactcatatttatatatttaaataaatatataatttaacaaaatacataaataaaaaaacttattagaaacaaacgtcaaaagtaattaaaaaaaatatacatatattaaaaaaccaattaaagttaaatatcaaattatacaaattgtaaaaataaaaaaaattaaatataaaaattcatcgttagtaatacacactacaagactttagctaaaatttttatgttaataagattgaaaacatatattgcattttaattgcgctgaaattaaaaagtttaattaattacaggaccctatataattgattcaattatacacactacaactagtctcaaattaatttaggacgatcgacttatcaaatttatttaaaaaaaaagatgatatagtatatactatgaatcatcattacaaaactcaaatgcctcataagtccatcgagctgcaaatggagtggttgcgtacttaaccgtaccaacatcgtctttagagagaacattaataatgaagggctacatattctgcctcagacacgacccatcacgagggcttcgattagtctctcattctaaggactcatctttatagatgtcccacaatttatttatcaacatcttaatatcatctctctgcatattctcctctttacacctccatggctttgaaccaacactatcaatatagtcatatgtaatgtgtaatattgaaattaaagactaaagaccaaatttttgaaaggttcaaaaatgtatttaaataaatattaaaggtaaaagttttgttaatcatcttaacgtatctttggcttcatatatcgttgatcatcctccaaaaacataactaaaaatttctttagaatgtataataaagcataataaatcaacctatcatgcctttataatatatagttataagtgagatagagatggagagagagaataaatggaaatttattgataatattgaaaaaaaaaaaataataattaagatgactcatacaatgttgataaatttataggtttaggattaattataaggtttaagtatataattaaaaaaatatataaaattaataattttttttagaaacatatagcttatcataaatagacaataattattattttttatataatatacaataattaaagtgtcacgtcaccattttataattctcttatatctattctatataaaatgtgactatgtaacggagttattagtttaacgatgttttttaggtttttacgttaattttaacagaatatcttattacttaactgtaacgccccgatatt

SEQ ID NO: 14902 - DNA, 7877 bp, Cannabis sativa
taaaattctattatttatttaaaataaaaaaaaaattacaataaatatatatttttttttgctaatttacaaaataacaaaataattatgtgtatatatatatgtatatatatacagtagaactcaaccatctcccgcttcaatcctggtcttatctttgtccgtacaactctgtatgatctggtctctctcgactccgttgaatctcaggtgaccatctctttttcttcttcaaattcctttgttttcagctaatttccccttttcaattttgtttatataaacataattttatctgtattttgatttgtttttggtatctgatgatgatctagggttttcgatcttcagctcttcgagctatggttagattcgattaaacccccaaaaaatcaaacaaagtacttcctcgactagaaacccttaaacccccaaataaagtttctatttctgtaaaattgggtcctccgatcaacacgattcgccatcaggttagcttctgttactaatttatgtgtgtgttttgatctgtgaagatatttataaattgaaacgtagttgattagtggatatgtaattgtttgatcagattgagtttgttgggatcattgggtgttgttattgaatttggtggaagcattcaaagtttgatacttttttggatatatttaagtggaaaacaaaatccaatcttgttgtgatgaaaattatttagcttgattcattttcctcttagaaactaagtcacattttcctcgtaggtttaagttttattttagtaataattagtttctcaagtggcatttgaaagatagtagatttcttttgtttacttactttgctaagttgttaattgataacttaatcccatttctggggtttttgtataatgacagggaaattagaaagcaagcattgattgaagttcatttcagttcagataaggttttcagttcatttcaaggcattaggggaaaaacaatgttaggctcaggaaataatttaaataggagtactgcaccatcctctaatgtgccaccattgcctcaatgtttgccattggagcctattacgttgggaaatccaaaatatcctcgcccaggagagttaagacgcgctctaggtgttcccagtacttctgagaatcattctttcggtgcttctcatcctaaagcaccgcctccagctggaaaggatgaaataaagcactttaaagaaactgtgctagatggctctaagaaggccaggtacattttattcacactctattgtccggctactacttttacatggcgctgtttttaacagaatttacgtagtggcataatgatggctattatagccgtagctaaattgggcattcatacgtttatgtaatatgtaagctttgaattacatgaaattaaaaaaatgtaaaatgaaaaataagaaataagaaattaataatcttagaattataagaattaacacataatgttaattcattataattaagcacacaaagttcaaaaaactgaatggaaacttgggaaatacaaagcctaggatatatttagacaggatagaagaaaagctattagttttcgcttctattactggttttattatttgtatttgtttatcaaggtctaattgttttaagctcagtagctcacaatttcttttgtttttgggtacttggggagggagaatttgagcttggaatctcttctctttgaagagaagtgtattaccaatagattgtgcttatgactaccacaaaatttattaataacctaaccatgttattccaagatgaatttcaaaacagaccaaataaaaactttctcaattgaaattcacacctaaggtgttgtctggtttgaagtatgacaacaagggaatgtgggatggaaatgagagtacaataaaatttaatgagtaaaaaaaattattgtgcattgacctttttattctatcaatgtagttttaaatgtcttaaattggaccaaacacaatgaaatggaaatgaatctactgcacaatactgcttttttcaattaattttttttattcaagtaaaattttattccatgtctatgactattctcgttgccctctatgtccttatttttattactcttaatggaaaaacacctaggtgggttttgaaattttatacatgggccgccttggttagttaaggctcgggtttcaagcaattagtccaatgtaggttttgatatgttcttgtctaccatttttgtctttcttatctctctgcaccataggaaagaaaaggatgtcataatagggtactacaggcacatactaccataaaataatctatccttataaatcttcataaaatgaaaaagaaaatataaattaataataatctagcaaatgaagatgcatgagtaatcaagtggttggaccctaggttgagaaaataataatgattagactatgctagcttgaaaattattctattattaagtttgaattgactgtatagttattttttttttaatttttaattttggaaaaaaataatattgtatgtttttagtggaattattaacttattatatcacaaaaaagattgtgttttttgattttatctttcaagtaaaattccctgttttaacctaatattttccctttccatatatattatttaaaaattagggatagagtgaaaatgtttcatgaatcactattcaaattggataagtacaaagaagcattaacctcgaagaagcggcaaagaagcgaacttttatcgagtgagaggtccagcggaataaatttgataaagggtgggagccagattcatcgaacttctcacgacaccattgtgcaaagaatggaagacagaacaaagaatggcatgttgaataaacgcattcggacatcggttgcagatcaacgggtgagtactcaaagtacatgttgttcttgaaattatcatgtttaaatctttagggctttctattcactctcaaaatgttatcaggcggaaaatcggccaagtattaactcaaggcagcaaatgttcgctgataaggatggggctacccttcagcctgccagtgggagctctggaagaattgaagaaaagactcgcagattgcttgccgggggtgaaggtttggatcaaaagataaaaaagaaacgctctgtgggatctgtaggtagcagacttatcaatgctgatcgggatataaaacgggctgctcattcaaagctgactgctgaggctaaattacgatcttgcgatactcatggtttcaggtattgcatttttacatatctaactgattcattattgaaagaaataaaatgattaattattgatttctcacatttttcaaagttaaaggctttggtcgattatctttcctagatcttgtcaaagattggggaatttttttgcattgaaaatgtttttttttttttttttgttcctttgttcttgtctgttgtttttaggtttggttattgtaatttatgacatttgtttttttttttttaaatctgacatatctttacaatcagaggacttaaatttctattatacagcttctcaaatgggaggagagaaaatctgatgctagagacattgttgttgatttttttctttttctggtagatataattttattattgagaaagctgttggttttggaaaactcaaaatgatagctgttaagtggaattgtgtgatgacagctaccgagtgtgggttatttgtctggaaagagatagtcggatctttagaaggaaaagaattggatgcagctctccctgagaaaatgtcaaaattttggcttctcttcgggcttctgcagggaaggaaaggatattcccctttcctaagacttcgtttaaaataaggaaaaacattgtcataaaaaaaagtgagaaaaagatagcggaaaatattttctcaaatattgtaatttaaattttttttcttctcattttaaataaatttataaaaaaaaatctaaaaattttataacatgacaccaaattgaactctcatatcttcaaaaagagaaagcttttttttcttttttctgttggagaatccaaacaagataaataaaattctttcgacttcattttttttccttcccaaggttagcggatccatctagattgagtttttgtttttgttaggtgatctgttatagttttctttggaaagatatcttatctttcttgctgtaatctcattttcaatcaataaaatctttgatttctataaattacatcttataaaagatgtcgatttcaatttgtgaacatataaagtctgcataccttctgcctacttttttatgccttccaatagtttacattttcgaacttaattatttgtatggagtaaatgaaggaaaacctcattaagttctgtaaatttcagattgaaatcttcagctggaattggtggaatcaacaagttagatagctcatatgagccgagtaattcagattccagtacagttcacaagagtgagcacgagagtcccacactttcaagggatcgaatgcccgttttagagcagcagaacagttttaaaggaagcaataagtaagccatccttgtcattactcactattatcattataacaatagatgggctgtgtttaattgaattgaaccttttgttgttgaaacttgaaggctgtcgaataatgcttgtgttctatattacaatttgtttttcctagtaattgcaattgggtttataaattgtttgctgttctgtttttcaggcccaacatgcaacaaaataactctgtagccagtcctggtccagttccgaaaggaaaggtttccaaggtacaacggattagttctgttatggctctagattcagctcctggtgctcgtccatctgtacctttccaaggatgcgaacagccaactgttttaggtaaagctgcagtgtcgggtattgctgttaatcagaaacgccaagtatctgtaggctcacctatacatcctatgactcagtgggttggtcagagacctcataaaaactcacgtgcaaggcgaacaaacttagtttctcctgtttcaaaccatgttgaaactcagatttcatctcaaggatttggtacttctgaatttagtacaagaacttcctcgattggaaccactggatctgtgctggttagtgatgtagataacattagcccaaaattcaaaggcgaaactgagaatgctacatcattatatgggttttctgaaagtgaagaatcaggagctggggaaaatatgttgaaagagaggaaaattaacagcggggaagcttcaatgaacacctctcataaagttggaggttttgtaatgcctatgaagaagaataaacttctagctaatgaaggtggatatggtttgcaaagacctggaagaaatggaagaggaccgtctttgtcaagaccaggaattcctccagtgaaagagaagtcaaagaagctgctagcaacagaggctattcaagatggggtgctctctcctgagaaaagtagaaggtatttcctccctccaactaattgaatagctatggataattatggctcatgtacttactgtaactttcctgtttgtttcttggtctttcagtaaaactggtcgtccaccatcaaaaaagctgaaagagcgcaagagtctgactcgtcttcgaccaatgctatctaatggcagctcagattgcacaggtaggaaagaactatcatgtggcaaagcacaaaaaaaatgctgcaactattctattttataacttaaaattgagctgccctttcgtttgtggcataagggactaatgtaaaactgtttgttcagtgatcattggtcaagaatgtggcatgttcttttgatttgctcactttgatgaacaccttttttcttttatataaaaaaagtattttgtaattttctctggcacatctggtgcactgcattttgtgtagatttgatcttttcctggttgttagaatgactgcttaaaatttttatgtacattgttttccaggtgaatctgatgatgatcacgaagaactttattcagctgccaagtttgctcgtaatgctagcagtacgcctctgaactatctatatgcataatatgattattcaggaacacaacatatctgctgcagtcctttttacactttcataatttcttttgtaggtcatgcctgttctagtgcattttggaagaacatggaatgcatttttgcatctataagctcagaggatgcatcctacttgaaacaacaggtattaactgtcatgtgataatctcgggtccccacttttttcttattttggaaaagtgttcagtttgagaataatttattctttctcgatattttgtcagctaaatgttgcagaggagcttgagaagagtttgtctcccatgtttgtcgacgaatttaaagttttggtattgactacacttaaatacatgtgctttctttcttttcttctttcacattcattcgattttctgctgtactataatataatttaaacaagtataatttgacatgaatggatgtttctatactttaatcatcaataccattttttctttcttaacgaaatggttttagtggaagttgtatgagctgggtaatgctgactatctgttcatattttgcagggtgtttcaaatttctctgggaacagatttgatgctgtgtgtggaaaatctgagaggagaagatttgataaggtcactccattgtaccaaagagttctttctgctttgatagaagaagacgaaggtgatgatttttttcaccagagtgaaggaaaaatcacctatttgcaatacgctagtgatgattctcattgtggctcgtgtaaccaaattgacatggaatccaaagataaggacagaatcgaaagtgaagtagagtcaaatcttggttttcagtcgcagagaaacggctttatggaccgactttcttgtgatagtagtgctgcaactaacacattaagtaaccgaggctattcgagttctttacatagcaatgaacaatatcatggagactatgaccttttacattctgatgcggttcatgttagtgaaataagttcgaacaatttcggtcaactacaatctcgagatatggaagcttctggctttcctccatctgactgccagtatcagtcaatgtccatcaatgacaagatcctcttggagcttcagagtattggtctatatccagagataatggtaccctttcactttcttcgatagatttatttgttatttttaatttatggcaatttatatttctaatcatgtttctgtatcacttgccttgttgcagcccgatttggcagagggagaggaagttattaatgatgatataatggaactcaaggaacaacttcatgaacaggttgatttttcgaactttataatttatgatattttagttcagtgtgattgatttcttttgttcattagccatatgtcacttatcacatactgtcttattatgttgttgactaataggttgctagaaagaagagaaacattgggataatagataaagctgttcagaaagggagagatgtggaaagacggtacaattcacaatgcttttgatgtttcattaatacttaaatattcccactcatgcttctgtttacacgcatttcttttctttttattctgttttaaaatagccagtaacatgattgtatcatacgcaggaaaatcgaacaagttgcaatggacaaactgatcgaaatggcctacagaaaacgaacggtaattgctttaatcctctacttattagtccttttgtttatgctatgtgttgtgaggtttggtttcgataatgttgtcagttgtttggctgat

SEQ ID NO: 14903 - DNA, 7160 bp, Cannabis sativa
atatatatataaaaaaaagaaatgcagtgtaagtgatctacagtgcacggcatatatgccatgcactcactgtagacaaaacttgaaaatggtggcacaattacagtcttcttggaacaaaatcacggcatatataagattttgccgtgtccttagacttgctcttaatgctttggcatggatttttagtgttgaggcactcctttaaattttgtaatttctttatctcaagagctccaatcgtgcaccaaaatttttgaatttttttctcgaattaatttctaggtactcttgcctagagagttgaattgtttaacctttttctcatatattttttttttttcaatattttcaagtgttcttatcccatagttgatttgtttgatatttttctcatatattttttcaatatttttcatttttttaattttaaacttgcaaaataatagctatcaaaaatataaaattgcacaaaataaaaataaaatttatttaaaaacacagtaaaattaacttaaaaatagtactaataataaccaaataagccttatttgtgcctaacaataatactgaagctcttaaactattttacaattgagataatattcgtgatttagttatcactgtgcaaatagcaatgttcaagttcaaggtgctcacacgtgacacatgtcaattccagatattatccttcctactagtactaggtagtatttcattacccacaacaaaaaaactaaactatggcgaacaagggtgagctggtctgcgtcactggagccagtggctgcattggctcctggctcgtcactcttctcctccaccgtggttactccattaacgccgccgtcaaagatctaagttaatattattacttcttttttattatgttttttttttgtacccatcaattttcacctgaaaaatatctctcttgtttgtcttaatcatttttgtggcagacgatgaaactgagaccaagcatcttcaagcattagaaggagctcagacccgtcttcgcctcttccagctcgatctcctcgactacagctccatcgccgctgccgttcatggctgctccggtgtcttccaccttgcctccccatgcatcgtcgacgaagtccatgaaccagaggttggtcgctctcaagtgctcacaattttttttttgtttgtttttttattgacgaatttttggtgcagaaagagctattggacccggcggtcaaaggaacgattaacgttctgacagcggccaaggaggctggagttgggcgagtggtggtcacttcctctatctcctccattgctccaaaccctaactggccctccgacgttgcgatgaatgaggatggttggactgaccttgactactgcaagcagaagaaagtgagttttttgttttccccctttttctcttacttgagcctaaaaattacaatgccaagaatgttgctttactaattgattttgttgggtgagttaatagctgtggtatccgatgtcgaaaactctggctgagaaagctgcgtgggaatttgccaaggagaaaggattagatgtggttgtggtgaacccgggtacggtgatgggacctattatttcaccaaagcttaatgctagtatgatcatgctcttgcgccttctccagggtaatatgttctcttgacacatttgtcttaaagactttcttcaactttgaaccaatttgatgctgtgttactgttaagatgagtctaataatgaagatcaaactgtgccttgtttacaaattcattgtaatgaactgtcataggaaatatataaggtgggtgggtgtttcctttttcattcattgcgtatttagttacattgatacacaattggaaaagaaggaaagaactagtaccaatataccatatatgaagaattaacaagtaacatcaataaggtttggtgaaagatttaatcacggtaatatatctgtatttttcgtatgttgcctgtccaatagcatggtcatgattcatgactcatgccacttacaagttaacaaggaggcaaccccggattttcaattcatcatatttcagttgtaaattttctatgttttataaggttctacttccaccagaaagagtaaggctgtattgatatacacatatatttgaagttccttttgaaaaggttgtaaataataataatgatatttgcttctttgcaggttgcactgaaacttatttggacttctttattgggtctgtacattttaaagatgtagctttggctcatattttggtgtatgagaacaagtcagcaagtggaaggcacttgtgtttagaagccctatcacattatggtgatttagcggcaaaggttgctgaactttacccagagtttaagttgcccaggtaacaagttttaaagacctgacaaatgaatttgcaaagctataatagaaacaatatttaggagtcaggacactgcatttcatatatgactatagtgtcctaccccaggaacaaatttctaattacgcatgttaaaagcagcagtactatttgctcttgtatgctggctttgaaaatctaaacctgttaccgtgacacttgaattggtgttgaattgtgtcatcttggtggaacttcatattgctgaatgtgttgtaaatggtttaatgttcagaagtttcttaatgaagctattttatcttccttattttgtagtctcccaagggatactcaacctgggctgttgagggcaaacaatgcagcaaagaagctgattgacatgggattacagttcataccaatggagcaaattatcaaggattctgtagagagtttaaagagcaagggttttcttacttaaaccaagctgcatctgagcgttggctttcagaacaataacaaatctaaataaaagctacagaggactattgttttaccagttaactgcattatagaagtggtgagttgatgtaatctaaataaaagctggtcttgtacgaggacaattattttgccagttaactgccataatcttcacactcgcattagtattatatgcagttgaagaaaaaggtggctattaaactgtagtagggacatttttctttctgttgcttccacaggaaaagagtgtctttaattttttgagttatgagtaattttgcactttttgtttttctgaagttaggaatctatgattagttactgcatagttctatcttgtctgaacttgttttcatactatcagtggtaggtagaattgtttatcaacttacatttttcataccaagtgaaattgatgacttacaaaacaaacattcccacaggaaaactcgaaaagattgtaaaacttgggctcactccatacaactttaggccggtttcaatatcactgtttcttatattattgtacttaattctaatttgggtagtttagacaaacaaatgttacgcaggcattgatataggtgatgatttatagatatagctcaaaaaaacatattgtatttagtcaataatctcacttttctggtaattaattttaacttattaattttgatatgtactaaattatgtcttaaactttttaagctgttattttttttttaaattattgaaattattaaatttaatgatttcggtctaattttatttaattttactaatttagctattgtttatgtattaaattatgttatctgaactttaatatctactaaatcatgctttttaaattttaatatatattaaattatatttaaattttcatttactaagatttttttaataaaattaaataaaaatctttaaatttaaaaatctcattagtttgaagtacatgtaaaattaaattagtgtactaattaaatgtgattgttacaaattagtcaatcactaataatagtaaattcaattaatacaagtattttcctccttttaatttagcaaattgttgttgcagacgtggttgatgatgatgatatggacagagatatttttcattttggcaacaaacgtaacaatgcattgttcaagaatttatggttttgacacgttagcttactctgaatcttggcaaattttctggacaagtgcattttagcttgaaaattaataacaaactgggaaattgagtggtgtaaggataatccacgactttattaattggcaccaaataaaataaaataaaagcaaaactcgatggattcgaaatctaagactagcttactagtcttaataaagatcatcctggtattcacaagctgtttgatcccagtattagcttcttccaatcataatgagaaattagtgtcagtggacttatactatgagaccctttgtcctgactgcggagatttcatactcaatcatctggttaagcttttccacaccaaactcatctctctggttcatctcaatttagtcccttacggtaacgccagacttggatccaaccacaccatctcttgccaggtatattattctattcaattcaaccatataatatgtatacatatattttttttaatataaatggatagtcttgacttgtagcttttaaagattcagtatttttctttttgttgctttttttggtccacagagcttcttcttcaccttgatcagaataaagggtacaattcattattcacccataagagaagacaaattactttccgacccctttaatttttaattttggttttgggtttcttccatggcgttttctcgaagaacaattgctcttctgtctcttatctctctatacctcttcctgttcgtttcgcttcaacccacttcgattttggcttccaaagctagagttttgccttcaaattctgagaaagtgtcgttgggattgtactacgagtctctttgtccttatagtgcaaatttcatagtgaattacctggtcaagatctttgaagatgaccttctctctatcgttgatcttaaactctttccttggggaaacgccaagattagaggcaacagtaccgtcgtttgtcaggtctgatcacccctatgttttctttccattaatcctattttgtattaaaactcattatttacaagaaatgcttataattgagttataaaaatttatggtaatctgcagctgggttatagaaatcttcaaagattagttgtttcacctctacccctctgcttctctatgactattctcagttttcatttcattgcaaaaaatagctacggtgctgtaaataaatgtcttttgcaattgcattaatattttagacttcagagtgtttttttaagtgagtaatactaagtggttcttttattgttgcagcatggtccctatgaatgcttattaaacaccgtggaggcatgtgcaattgatgcctggcctgagttggtgagttgagaagacaagtatcatattagtaattcaacaatgttgataaaacaactatagaatcttcattttttttgatgttgttttgattggtttaatgggaagtagtagctcataaacaagaatgctaacctttttatttggaatcttttacatctatgcagaacaagcattttccttttatctattgcattgaggctttggtgcaagagcgcaagtatcttcagtgggaaacttgttatgagaaattgggcttggatccaaaacatgtcaatgagtgctacaagagcgaggctggtaaagaggttagttttctaatcctttctataatgtattcttgttaccttgtaaaaaccatcctcttcataagattatttgttggaagaacatgtggcaaaatccatggtttggtcactaaggaacaccatgtttgacctctttatggatcgtttgtcatgacattatactgaaaatcattataccaagatgttttttccctgctgaattacacaatgctaggctccatgtgtgtatgtgttcttcatattcttcttcaagctatctctgctgcctaatagtaatgttaaggattttgtttctgaaataaataatttggtctattatctttattcagcttgaattgcaatatggagctgaaacagatgcccttcaacctcctcatagatatgtgccttgggtagtcgttgatggccagccactttatgaggtttgtttctcacaatcttcttgttgtcctagtaagatttttaaatgtcagtctatttttttttttttgttctctaatgattcataggttcaaaagactacttaattgggcccttgtaaaataacagtactaatactactactactattggtttaggactatgaaaacttcctgagctacatctgcaaggcttataagggcccagctgtgccgatatcttgcagtgagttatcactaagaaatttcgatgtggtaggagcaaagccaggccattttgtgagctacaaagatcaagagaaagggctagccttatgggcaagaataagatcagccatggcatcatggatgagccagatgaatatggtggccctggaatagaacgaagagctctgaatcagtgtctgtagtaagttgtcacagctatttggctatgtgctaattgttcagactttgtaatctctagctaaggtactattagttggtgagctaataattactcctgtgtgtgtgtgtgggtatgaactaaaacaaataatgacaagaatggtgaatatggtgataatacttgtactaattaataggctgtgttgctccagttttaagtattttcttacgtgaaggcattccaaattaaggcactctattcgaagtgaattgtggaatttaaaattggaatcaaattcaaccactcataatacttaacctaaataaataatttcttgtagcattaacgagggaaaataaggaaagaggttgtactcaaatttgtagtggcactatactcactgtaccaaaaatcactgatctcgtgtaagtgtgctaattgagtcgaacctaatttctcctagagagcccaagccaaatcacctgtccctagttcctgtcccactctctgtcccaaccagtaatattttgccacctcaattaaaatttcacccatacatttaaccatcctctctagaagctaactccgtttgtttggttttttaatataatattatttttagttaaaaaaaaatatcatcactactccgtctctcttatgatcatctaactttca

SEQ ID NO: 14904 - DNA, 4314 bp, Cannabis sativa
atgtaaaatatatttttgtaatatgataatatttaaaaatattatttacaaattgtaattttttttttgttagggcctactttttaaaattagaacatggcatctaaaatatttgagacgacactgacaataaccctaactcaccatatataaaatttgaggatggtaaccctaattcaaaataacatatttaggataaccttaactcacaacacaagtaattagggggctaaaataagtttcaacattggtcagggaaacaagttaacaaactcaaaacctttatcttctttagtaagtaaactagtgaaggtatgcaaatagggattaaggatttattggttattgaagggctggaggaaaatatgacatatttgaggctccctttgtttagatatagataaaaggatgcatacttcagtttccttttggataaccttacctctaagcttccaggttagaagaaaaaactctttcaaaggctgggcatgcttctttaataaggtatgttggactttccctgcatgtgtattccatgcaaactaccaaactctccaataggcttgttacaaaaatagattacatggtgcgagatttctagtggagttttgagaagggggacaaaggcttataccttaaggcttgggataagttgtgcctttccaagtctcgaggaagtccgggttttttcaagactagtaagatgagccaggcttttctagcaaagtgggattggaacctattgattgctagcaaatctctttgctacaaggttgtggaagtaaaataccttaagggaaataagctcctcaattgccattataagatctcagactcttgattttggaagaatattattaaagctagtgatattcttaagaaaagagcgtgtaaattggtggttgatggaaaatacactaaaatttgggaagatccttgagtgactcatggaatttttttttacccgaaacctaatggggtgccaactcttgggctaaacaaagtagttgatctttcgatgaaaaatagagattgggatcttcagaaattttcctttctttttgaccaagaaataattggtgctatcttaaaagggggtagagcctcgacatggggtcatgactattgaatctagaccaaggagaccaatagttgattctctagtaaatcgacgtatttagttcaagctcttcaaaggccccccagtgtgatgtccccttctctttggaataggtcttgaagtagtagaatccttgaacgacataagatcctttggtagagtatcttctctaatgatgtcctcatttgttcaatattgagcaagagaatgcatatcaatgacactcagtgccctgtctgtggtggtaatgaagaatcaatggagcatctctttctccactacaattcgaaatatcaactgagaagatcatccccgtcgagtatttaacttgtttctgagattgggattcagatgtgggactggatcgaattcatatggggttttggcaaaggaggaatcaatgctgaggaggtttttttttatgtttctattgttgtggacaccatttgaagagctcaaaatgataaggtacacaataataatctgagtaacattaaatattacattgactcaattacttacagttatgcagattacatagttttccttcctcatcctacttctgctttggtggagaggtggtctcctcccccttaagactaggtcaaattgaactgtgatgttaaagtgggggtggatcatggatgacatgtaccacggtagtttctagaaaccatatcagtgcaggagtttgggtggctactaagagattgcacttttctaaccctttttgtggcaagattgtggattgttgcttggctctcgatacagcgtcgggaaagatttataagtttgtaattgtggaaagcgattctagtatgatcatcaacactctcaaagaagtgagctctagatgggagattgattattatactagtcattgtaaaatattgtctttcctttttgttggttgtttgctttcttatattgtaaggacttgtaattttttgatccataatgtaattaattggacatttacccacaactagtatgatatattagatattctctatatttatgaacatctcttttaatgaccgttatgaacattttaaattaaaaacaaaatatctaatttaataagtaatcttgagttgttcaatttttttgtaagaataaataaataatattgagcaccatcaaacgcataaaatatctattcatgtgaattgtgatgtttaataacaagactattttatacttgagtgagacacacattcataacatacaaagtcaaatttgaagtctataaaccttttgtcttaggcataatatcaccattttagtttaaaatattattttgatgacttagtctcttattcgagtcattgttttatagttaacatttaaaacttgaaaaggataggtaggccagcaatgtggaaaatagtgtaagaggaaaagaaatgtcatcctcatccgtacacatttgtcaaaataaaattatatcatgtggtaaatttgtcaaaaattgacaaaatataacgaatttttcttctctttctaaatttacactcaaattatttgagattttcttttctttcaactgagagtaattttattaaattctcaaaaattcataaaaaacataaatgtgtatttttatttaatttttttttaataaaagtggattttttttttttgacaaaaaggatcatataatgcaaatttttttaggattattttagtagtttagataattttagaaactatgtgtgagttatagaggttttaaacatgacattgcataataaactagctgagaaattctaaaagatatcagtggtctttagtattctctaatatatattggtacaattacgtatgtgtcctatataatttaaaataataatttttataaaatattactaaccaatcacaagataacacatctacacaatgtcttattgtaatactccaagctaatctaagattaaaataagaaaaatacctttaccattgttcaagctattccaacatacacaatgagttgttttcgtctacctaagaagactattaatagtatccatagtatggctgcacggttttggtggggatcatcggaaaaggatgctaagattcattggtgtaagtggtccgttatgtgcaaacacaaggagcaaggtggtttaggatttcgagatttgggtctattcaatcaagctctcctagctaagcaaatttggaggtgtataaggtttccaaattctttgtgtagcaaggttttgaaagttagttactatccttatagtggggtgttggaggcaaaatgtgggaatcatgcttcctttgtttggcgaagcttggtttggggaaaaaagattgttcagaagggatatcgttggcgaattggtaatggaaactcggttcgggtccttgaggacccgtggctacctcgacctctcacattcaaaatatatgacaaaccgcctttaccggatcaactttatgtcattgatttgaaggaacccaatggagcttgggataaggagtttgttagagctgtcttcaatccaacagatgcggatctcattctaagtatgcctacgtcggagtgggatattgaggataaaatcttatggcactatagtaaagatggtgagtactcggtgcgtagtggttatcgtatggcggctgctttgcaggtacgggatgtacaatcggatactgaagccactgagaaatggtggaagcttctttggaaactcaaaatccccccaaaggttaagcactttgtttggaagatggctcattcttggattccaactaatgcggcgcttgctcaccgtaacatttaagttgagccttactgtagtcgatgttctaatggtgattatgaaactgtttttcatgcactttggaactgtcgggtgaaccgtgaggtgtggacttctgcttgtttctatgggaagattcaaagattggggagggaggatgtgttagctttcctgatgtgaatctcggccacttttacaaaggatgagcttgaatttttcttggttctttcatggaatctctggtatgttcgcaactctgttactcatgggggtcataaaccccaagctagtgctattttggaatggtgcagtaagtacctcagtgagtttcgacaaagtaatgcacccaaatgtgatcgggctcgtagggagactgcttgttggctaccaccagccacagaggaattcaaaattaat

SEQ ID NO: 14905 - DNA, 9416 bp, Cannabis sativa
ctcgaaatatgaatataatatatagtacttaattttacacaaaattttaaataaatattatgattgctagtgtggttcaatacacaataacattctaagatgcaaattagtaaaaaaaaaaattaaatattttaatgatcattactaaattaaatttttaagaaataattaatgacaatattataattaaaaatgtgaatcaaaacctattattaattattaatggaaaatttgtaataaaaaattgcatttgttgtgtgtcaaatttaacacacttttatattttatttaaatttagcacaattttcaaatatactaatgttttcacaagatttatcacattattgaagaactaatttttttaaaaagtactaaaatataacactatacaactattttaatatctcattggagatattcttatatggctctattggatatacactaacacaaaaaaaaaaaaaaaggaaaaaaaaagagtaaagagagagtatattctctagtaaatagaatattcactttattattaaattagtttattgaatcttaacaattatattatttttgtattctactaattatttattataaattaattaacggtaatactttaaataactataactaaaaaaatatatctcactaaattgaaatagtatgtttctattatgaaataaactttatattattacaagagaattacatgtagcttaaaaaaaatacatgaaataaaatgaaagcaaattactatacacaagtttgattatagtatatacaaaatttcgcaaaatatatattaatattgcctaaaattttttattatatttttttatgtaaaattataataaaatttaaattcatgttaatatttgttttaagaagaaagtaattatgaagagaaattgataataatctatgttgaccacaccatctaaaggtggagtctttccaatataaaatgatcaatcaagtacaatcaaagtatgaaatggtgagcacatggggtgagagttcttctcatatattagttgttgttgtgttgtttttgttgttgttcaaataaaaaaaattaattataataataaaaaataatatttcatttcatttcatctctatttgacttttgaggctaaaaactcaaaagtgtttaatccttattctctcatagaaaacctcttatggtaaggctagaatgaaggaggaggaggaagaggctacccctacactactacaatctaatcctcaaatcacaacacaacaatgcaaaagaaaagaaaaacaaaacaaaaaagattcattttttcatataatggaatggacactctcttctctctctccacgaataagaatttgaaaaacattattataattaaaaaaagaaagtaaattttagaaatttatatatattaaaaaaaaaaggcaaagccaaaaggaaaggtggagagtccacaataattggcatcaaatgcttatggggattcgcactgttgctgaattccaagatctgcaataatcatcaattattcttttttattgaaaaaaaaaacataacatttataatttaaataaaaaaataaataaaaatttgaagcttttttttttttttggttttctcagcttccccattggaggagctcaactaagctctttaagctatctgtttgtctttctttgggggagagaggcggaaagtgatagtgattaacaaaaacaatcgtaccatagtccattaaaacatatatatttgagcttgacatcttctcccaacacagaaaaacaaaacaaaaaaatcaattttttttttgagaataaagatatacaaaaacttggcagccaattagggcttcgtcggaaagttggttgcaccaagggaaaagagaaaagaaagttaagggtttgttttagctttatctctatcactcttccactaccactggtacctgtttttggtgcgtgtaaggtttgtttttgtttttctcagccatttttggagtttcttcggttttctatggaggtggttcggacacggatgaaatggggttttgaatttttcgggtttaatctctgaaaagttgggttcttttgaggtttttggtagtttttggcggtgggttgtgcttattttgtattgggtgttttttaaattttcttttgggtttgattctttggagctttgaaattcaggggaattaagaaggaaagggatgttttatcaggtggtggtagttgtgctgaaattttaaatttttgttatggtggtgtggggtttaactattgttgaaccatggaatctttggttcttttgcgctaaagcttgaaggttttggttttggagctgataagagttcttgattggttgagggttttgaaggttgtgtgagtttgggaaagttttggtaccacttttttcagaggtttcttttcaaacttttggataggagggagagctgggattaagctgatttggataacttattcatttctttgaagggagttgagaattgcttaatggtgggggttatggtttattagagattctggggagaaatttgttttgggaaagaaaatggcaactgagtcaaacgcagggtatcactgtgaggaaacattcagttctgctttgaatcgacacgcaatctcttttcagtctggggccattaacagcacctgtgagatgcttcccatggggaatttttatgctgtgaatagcagtgcagcagcaacaccagcaggcatggtgttctctgggagtagttctagcatcattagtaacaatcctgtgattagtcaagctggcagttcttctagtggctctcttcttcttgattcagtgccggggctcaagcatgacgcggggttggctgttgaatggtctgtggaggagcagtgcaagttggagagaggccttgtcgagtaggtcattcagaacacgttcttttgaattggatatgtatagatttacttgtgtatacttaggattttgatgcttatgagttactagttgtggttatgtgaattaagcagaatgtttattgatcttatagaggctttttgctagtgtgtctgtttgtgttagtcttgcacatatggcgatttaaaggattttaaaggagcttttggaattaataatttcgcgtactctttgttcttgatatactaatatgcaaattcattcttgttaggcttcaatgcattatgattttgctgtagtttttgttttagttgcagctctacttatttaccaaatcttgttagttgctcattgatgttttagcaagttcatttaagttatttcttgttccaaagttaaatatttatattctttttctattttttatttgtagatatgctagtgaaccgagcataatgaagtacatcaagattgctgccattttgcgagataaaactgttcgtgatgttgctttgaggtgtaggtggatgatggtaaggtttcaatttcaactccttcagtcatgcattctgagttactttaactgattcagacattttaaaccgtaatttgatgctgaattttgtgtggccttttcgaaatgctaaaatgcagttatcttagtgtagtatgtttaggtgaggtctgtagaatattgattttcaaatagtgattaatattaacatgcaaactgactagtttgctgttgctatgttaaaatcgcgcagaagtgcttgctcgttacgtctattaccaataaagattagagaaaatgctttatttgttatcacagtgtgtgctgtagcaatgattactaatccatatattttggcgatatcatctagttttgtatttatagatgtgtaacagttatttatgacaatgcttatgaacatgatgcatgttagaccatacaaagtaacaaagttattatggtttttgagtttggtgtaatttatgtaaaaatttcagaggaagcggaggaaaccggatgaccttattttggggaagaaattgaataatagaaaggtatgtttttgtaacttgtaaatgaaagtgcacattaattgtttcatgttatgatctattcaacattaagtctttcctttttgttgtagatcttgttttgttcgtcattgctaccttttacgacagcttatactcttaccttctgtagatatactttaattaatgccaaaacgtttttctctccatcttataaaaaaggaaaaggtaccttgataactgtcttaagcagccattgttggggcattctgaatatgcttctgtttttgtgttatgcagttttgggtaacaaaccatctgttctaaatatatttgcatatcgctttattgcctcagcgaattgtcttgtgtgtctatcttaattggtttggctgtatctgtaagtaatagtttggcaagatgcaatattaaactttcagccatagtaattttgtgatgctcggtaagtacttcaagctcaccaatttggatgtagattgaagcaatatgttctaatttgatggtttagaattttagagggtacatatgagctctatatcataataacatttaggatatttatgccatgtctgtcgaaaagtgttcaaccaaaagtacattgtaaagaaaagaataggcaaacatttaattccaaaagcagatttttatgttttcttaagtttcatgagtcggaaatatttctgtaataaactgtttcgtggacgtttgttttttagtttctttgcttggggttcttacaatgttaattgaaaatcgtttagatagaactcatctgcagaagattagcctatgagagaagggtgcccaagtagttctaaaacaccaaccaattacacgatgtgtcatcctatcaatacactcctctgtagagttgatgtcctcggtggcacatattgggcttactttgggtcgcgccctttctatagttctctccttctagggtgacactagagggtgttggctctaatacaattagttacaaccacttgtatagaaatcacttacaaaagattagcctctatgaaaggagggtgttcaagtggttataaaccacctaccaattccatacttagttatcctaacaattactctttcaaaattgtatttccaaaaacttgtgtatttgtttatttgtatttcatacaaggagacaactgttatggaatcggttatatttaattccaaaacataaaagccttaattaatgaagtaatactaaaatatgcaaaaccaatcagatattttgtatggactatttatggctctgcaagagtgagaaattaaatctctttctcctaagaaaaccttaaatgacattctaattgttactaatccctttcaacatcttagacataaattttgagtagtgtcacaatagccctaatattttgcagactttagccctaatattcatgcaccgagttcctaatgacatctcaaatggagtttgaggaccttataggaaaggtattttaattttgaaagtttacaactctttgttatcaactgtatagtttttaagaagataggctgcttaaccttaaattgattttgtttgggctttgatgagttggataagtagttaggctcgttgtttacttgtcgtgcttgaattgttagcttttgtaggatcatcaagagagtaatgctagagaaaacacacacataatgtactcgatgctgattatgtcagcttggagtcgatttaccaaaatacattagagaccttaaggaagaaattaaaaacaaagctaacaaggcagaaggaactgctaacactacaaaagaattttacatgaaataattgttcactgatggtactccagtttattattgagaattgttgcgcctattaagaattagaatcccgcttgtgatgggaggaagtgcctttgtgatcaaattgtggggtatgcatgtcttgttaggggttgatgttcgtgactactatctattcattccccgaaaaaaatcccatcttacattttttggggatattgtggtactccatttttcgattattgcaaaattagtgtcctacattataatacacttgccttgagagagtagataaaattgaaatgttaagcactttactttcggttatctgacaacatggattacttgcaaatttgtgcaatgtaaacctgtagttctacgatcattaactaccatatttttatctcctgtggttagtttctatcttccaagatgaatttataccccttgatttgatgtagatataaaagttgcacaaattttgtttcaacttaattttccttgagtcatgaacagcatagatgatattcttgttttgatttatttaatcatattatgtctttaggatctattgttgattgaagaaccagtattctaaagatcatgcttcttcaggataagcttgtggaatcatcttcaaagccaagtatagtctctgttccatctttcgacatgactggatatccttttatgatgaatcatatgggccagaatggatgcttgcctttcgaaggttagatattgtttttatgtgtttttctatgcatatatatttataccgatggcgtattttactatcataattattctctaattcctatttgcttaatagaatttctaatgattacttatgggtattattaagcaacccatattggggttattattcattgaaaatgcatgtctttcggtatcaaaacacatttttaagtcatggcatgcttagtacaccattgtacaatatacgattgttctgaactacttcttctttgttagtctcaggaatgagtagcacagccaagcatctattggaacaaaatgctcaaactcttagtcaaatcacaactaatctctccgcttacaaggtaaacacaatgcacctaattctcccgatgattctttttattagttaatatgctcgagatgttgaaatgaaaaattaaagcggtgtgtttcaaagtggttccttaccattttaatttttgttggtctgtatgtgcatgaaattgatctattggggagtcttgcattcaagtttagtatggttataagcatatttttgtccctataatatttaagtttgactatttggtccatgagttttttgtgctgacctattttgttttacaattttggcacatttggtcccttaattattaaggaaaaatttacctaatggaccaaaaatttaaaaaaaaattacaaaaatatatcaacacagaaatttttttatttttactctttgaatttttctattacaaaaatacattttcagtaaaaataataaaccgttgtttttgctgttttatagcttatttgtagttgtattatagttctcataatattatttttctggttattttatagttgatttatagttgtcgtgatgttgatttttcgttattttttagttgtttttatactttttgctagcaaagtttatttttgtaataaaaaattttaggctgtaaaattataaataaaacataaaagaagggtatttttaaaaattttccttatttaagttgtaacatttttgtccccaaatatgctacttctttacaaaagagacgaaattgatgatgatggctataattttcttcactgaataaactcctcttggggaataaaatgtcaaaaatattctaacatagaattctcatattcttaaatttttgtctctagcatatatcaataattaaaaattgacaagtgactttattgaggagaatttcttctttttggaaaaaactgcctttccataacaagtgaaggtacttgtcaatttttagttagtggaagatattagagatagaaaattgggtcaaaatattgattcgttggatgcatttgtactgatttcttgatttattagttatgaatcttgtgttggtgtttgttttaccatgttatgttgttctgcatgtgtttgattctatgaagaaaaaaagcacagccattattagttttgtcgaaaatatatcaaattcagaggataaattgttaagattgaaaagagaaaaagattattaacatagaaatctaacaatgccaaaaacagtatattttcgggtaaaattaaagatgttgatagtggacattgttttgaggcctgacatcttattgaattttgaaacagttacaggacaacattgatctcttctgttgtacgaggaacaacttaaattccatcctgaatgagtatgcaattgaatttttacacattttcttaaacaaaattataacattaggctgaaccccttttgttatacatctgttcttttgcataatcttattagtttaatctctataaaatcttatcttttctattattgcagcatgagacatatgcctggcataatgagccagatgcctccgcttcctgtatcgattaacgaggatcttgcaaatagtattttgcctaatacaatttaggtaagttctcattgtgaatgactcacaccgaacacttcatatcgtgttaacgcacactagtagtactaaatgcttatcaagaaaaccgaagggtcaagggagagttgtgagaagggggaaagactcggtgatgtctttcgccatttttcatgtaggctttatttttgaactacaaattctaagtatttcttttcataatcgcgcgcctctcgcgcctatgttgttgcaatgcaacatcaattatatgcatttctttggatgttaaatctatatccttgtgaaaataataataataataatcttttgtctagaaattcataggtccggatccgccggcatatattttttcttttctgtggttgattttgcatttgggttgtctttaggttcttctcattggttcttgtgatgttgggtgaatatgaataataatgcacaacaaatttggatgtaaagaattgatttattaccaatacaagaagacaaatggatgaccttgatgggagtgtacctaatagttgagcttctctcagtgtacttgtaagatctcttttaattttaatttatttttatggtttaaatcttttgagggagtaaaggaaaaagagtctgtggtgaggactcaggagccttttaattatagcttaatttgaaaacattttacattatggacttttgactgcttcccataaaatcttgggcatcaaattagtcttttggagttggtgttttctgggttttttgtactgtttctgaagataaatgtactcttgttatataaataaaaatatattgtgcagaaaatgagtgatgaacatgtttttgtgtttctatttcactttttcttgtttattatatattctagtggaaattgctggtgtgacatgtgttgtttccatggtttaatgatgtatataattgcctttatttatttatttttttttgctccaaaatcttaagttatatatttttgtccttttttagttattatatgtagaagtacaat

SEQ ID NO: 14906 - DNA, 13001 bp, Cannabis sativa
ttacattgaaacagagttttatttagggcataaaacccaacactatagcagatctgacctgtagcgatctggatagtaattccctcgatataatacaactaaaaggggagtagttcattacccgttatcacaagggaactgaacctctataacaaatcctattgtctattaatttttattcttatttgtgcacacacatggcaagcatcagatctacacgatcccgctctcggttgatcactttttgaggtcaataatttggtgctctaattgagagcgtggatatcgtgatctgatcgaacgcaatggcgaacacaagaagaactcctatcgcaccatctacatcttcggctctccctcaagacccacagattgtagatgcagacacttgggttccagtcacaacttgaatccccatgaatactgtagatgtggtgaatcccatcactacaacaggcgcaacaagtctggctaccgcagttggccaacctgacgcgagcatcccagtggatccaagtggcaggctcatgcctctaggagtagatcaaccattggcacctcgcattgaaggaatgacccaggggcgatagcccttagaacaacaactcgacctgctggagagacagacccagaagtgggcgagccaacaattggggagcctcaccttgacctaggagaagaccttgagttggccagacttggggaagctgtaggtcatgcaggcctaactgaagaaccacgcgctgctgattgcgatgtattcactttgtagaaatgtgaattcttgagatggatggatgaccaggagtacatccttcaatctctccaagcagaattagatcgccgcaaccgggaggccaatgatctaataagacagttcaattagacaagcgatagaagaggccaggatcttataagggatccacatcaaaaaagactgccgacaagttcctcatgaactaggacggatcttcccctatctaagggaggatagacctttgctcaaaaggttaaacgttgagaatagccagatcttaagaaccagcagcttaggggggtgactagggatctctggctcaacagcaacccccattatgtagccactggccggctagccatcagtaggagtacctatagctggccagggtacaacacttcctcccctatgggagcgaggtgcacaaaaatcaatctttgactgacaaggacaaaaagcaggtggaaacaccaaaaatggtaattctagaagtgagaccgatcacttcaagcatctagatccaccaaacttgaacaactggtgtgatctacttccaaccaacataatgcggataccagtctgaggagtcacgggcggccagaccctgccctttgcaagtctggctggccatggaaaagtattgggtggccataccttgtccaatgcatgtctggctgaccaagcataataaccaggtgtaagcatggccagcctacgccaactcccctacttgggaatggtcttccaaggactatagggcatggctaatcttcacaattaactctcccacaatatggccagccagcccctgtctcttcaagatctgcaacctcccctaggagggccaatcaatcaagtccccacagcaacagatccttcagtgcaagcacagttgaaccaactcaagcacatgatctatagcatagcttgcccgaagcctttagatctcgaacttgatcaattgaggggatcaccattctcgacatatataaatgccctaccactactgaattcaaaatatgagtatggaagatgtatactggacgagaggacctgctggctcacatcaaatacttcgaaatgtagctagacctccaaaaggtcactagtgatgtgtattgtagcatattccaagccacagtatcggagacagcccaatggtggtactttaaactcaccccgagaagattcaactcctgggatgagttctcacaaaaattatacacataactgtcatccttgatacttgtaccatcacaactagaaaaccttatcgaagtcaaacatcgacaaggggaacttaagaattattatattaaaagatttatggtcgaggctaccaaagtcaaaggccttactaaagaaggccgatatatggccatactggggcgcattctccaactaaacgacttcttgaaagatatcaggggtatccaccaacaacatgaaggagttcctcgatagagcaggcgactttattaaacttgaagaagccatacaatagggccatgcggggcatgtcaatagcaggtagtcacaagggacccatcagcctcatgaccaaccaggcgcacatgttggcaatagtaatgctgcccagacctctagtggtaaaatactagaaataagcacatcaccaatagctcttggaggaatgatggcaaaaagtggaagtttaaaacttctcccacgccacagaagaacatggaggagaagtaaaatttcttcaccctcctaacagaaaaacccgagaccatcttcatggccactcagggaacggtcccatatcgaaagccatttccaattagaagggagatgggcaagagggacatgtcaatgttctgtagatatcattacgacttcggtcatgacactaatgagtgtcaaaatctgaagagggagattgagtacctgataaggcataacaatccccacctgcgtggttatgtgtaagacgactagacctaggtggaaagaggccaaaatggagatccgatgccaccacccatggcaggacatttaagggtcataataggcagaccccacattgcttgtgaaactagcaaagctagggagggctcagacactctatcacgatcccaaaagtaaagtcctaggtgtcgaagaccagagctctaagcaatagaagcccatagagcccatgatctcctttggtgaaaaagatgcagcaccgaccagttcttgcataatgatcccttactgtgcaaatcgggaataagaccgtggctagatgtatggtggacgacggagccacctccaacattcttttcaaatcaatatattgcaaacatggggctccaactcaccatcctgggcctttgctaccaagtgttgtatggcttttttggccaaggcatcgtacctatcaggtatatcagattacccctcacaattggagaaaatccaaccacaaggacactgatggcgcagttcatcatgataaatgttccttcgacattcattgccatgattggccgactgcccctcaacgacctgaaagcggtgacgtctatcaacaacttgtgccttaaattcccaacaagccatagagtggcatgtgtgaggggagaccaacagtctgcccgtcactgttataacttgggcttatctaaggccaaaaaggagaatatgcctgccagaagtctagaaggtgtgccctacaagggaaaatgaagtctaggccaaggcggggacacaaacatagatcctcgctttggggacccaacaaaaagcttcaaacctgtagaagagttagaagaggtggaagttgatcccactcatccaataagaagactgaagattggtaagggtttggctcaagaaatcaagcgagtcttgatagaatttttaagggcaaacttggacctgtttgcatggtcacatggagatatgttcggaattaacatctctgtgataacccatgcactcaacaatgatcctagccatcaagcctgttcaacaaaaaaggcggttgttggataaggagtgtgcccaggtactcaaggatgatgtcgaatgactaagggccaatgacttcataacataagcattctaccctcagtgggtgtccaatcaagtgttggtacctaaacccaacaagaagtgaagagtctgcattcacttcaccaacctgaacaaagcatgtctagaggattgctttccactgcccgaaattgaccagctagtggatgccacgacttaccatgaagtcctgagttttatggatgcatattcaggttacaattagataatgatgtgtccacatgattaggagcacaccagcttcatgatagatctaggcctatactactacaataaagccatgccatttgggctaaaaaatacagggtccacttatcaaaggctggtgaacatgatgtccccaaatatcatcagccgcgacataaaggtttatgtggacaacatgctcgtcaagtccaaaaacgttaggggcatgtggaggacctaggcgagtgcttcaaaatcctttgctgctacaacatgaagctcaactcccacaattgctcttttggcgtaagctaaagaaaattccttggcttcatgtcaatgccaagggaatagaagtaaatctagacaagatccaagcccttttggacatgaagtcgcccataaatatcaaggaagtacaaagcctaataggacgcattacagcactaagcagatttgtgtccaagtctaccgacaaatgcgtacccttgttccacattctcaaagttaataaaacattcgagtggatagaggaatgtgaaaatgcattctaggagctgaagaagcaattggcctagacactggtgttgtctaaagccctagacaatgaagagacagacgagtatctagcagtcacaaagaacgttgtgagtgatgtcctcacaagaaaagaaggcagtgtaccgcaccatgtatacttgcttttagcttctagaaagataaggccctacatcaaggcataccccataaatgtgtacaccgattaaccactgcgacaggctttgtagaaacctgaagcattaggctgactactcaaatgggtcatagagcttggccagttcgagatcacataccaattaagaatagccacaaagggtcaagccattacagacttcgctgagtgcaccaactcaactcttgagcctcctcaagactcaggagaaaagtaaaagctagagaaaaagagagagcaacaacaacaacaaaatcccgaagatttaacatggaaactctaagttgatgaaagttgcactgaccaattattcaatgtaggcattgaccttaaaacaccttggagcaaaaactacatgaagcaatcaaattcagcttcaaagccttgaacaacaaggctgaatacaaagccttgatagctggcctcaagttggcacatgaagtacgggctgaccacctggaaatattcagtgattctcaactagttgttaatcaagccctgggtgaatacacaactcgaggatatagaatggtggcctatttgagaaaaatcaaaagacttgttaagtcacctcaaaggctacatgatcaagcagatccccaaagagcagaatgccacaacagatgcacttgcccgcctagcaagcagtaccatagttgacaaagcaaacatggtgcccatccagttcctagaagaacccaacattgtagtcccagaagaggtcgacatgttgaatgacatgccaacatggatgacacctatcgcagttacctctaaaccagagccttgcaaaaagacaaaaatgatgctagaaaactaagaagaaaagttgctaggtacctgatcctatacaacataatgtacatattgaaattccctatgcctctcctgaggtgcatcaacaaagtcgaagttgaacaatatatgatagaagtgcatgaaggcttctgcggtaatcatgctaggggcaaagcttgtccaagaagatactccaacaggggtacttttgggcaacgatgatcgaagactcgatgatctatgtcagaaaatgtgacaagtggaaaagattttcaaaaatatccagaactccacccaacgagcttatgatgatggagtctccttggccctttgcagtatggaggatagacctaattggttgtctcccaaagggaaaaggaggggtacaaattagtgtctttgcagtagactacttcaccaaatggacagaagttgaacccctggcgacaatcacctctaagaaggtcctcgactttgttatcaagaacatcatatgccagttcagcctcagaaatacactcttccaccggcaccatcgcacccccaccgcttatataattgttttattagtcgatattttagtacgtcgtctccttacacgttcttgtatgttggcaaacatactaaaagtttgcttacttatgagaactttgaggaggtattgcagaaatttttacaaaaaaagaaattatcttgagagcgtagattgtacgatgtgcatattacaaacctgaatgggataggttctttacccttatagtaatggagtgacaaggtagattaggacacgtgcacattttcttgttgtattttaaacttttttgttaattactttaaagaggaagatgcctactgatcaaaatttaatgaaggtgaaccggtgctcagccgagttttgaagtggcattgacgagtttgttgcagtttcaatgaaccacataaatcctaccgaattatatcgatggccttgcatgcggtgtttgaatgtgaattttacaacacctgaaactataagggttcatttatttctcagcggaatccaaccttcatacaacccctagtatttccacaggtagactttttctcagcttgctgttgaacttccagaaaatgacgaagaggaaatgatagatgtgttggcagatattttaagaggggatcctatgtttgacgattctactaacactagtgattctttcaatgaactcccgatcaatgacaacagcaagtatgatgacttgtttaaggagatggagtctgagttgtatcattgttgcaaaaaattaccccacaatgcgctggtaagcttatacactacaaaggttttgattaggtggagtaaccaatcttttaatatgttgttgtctatcttggctgaactatttttggaggggacaaaattaccaaagtcacaatatgagtcaaagatttgattacgcaatctaggtttgagttacggcttaatagatatgtgcaagtgtaattctgccgtttttcagagggagaatgagaacaaagagttttgccctatatgtggagaatcacgttgtgtgaaaaaaaaaggttagagaaaaaaagttcctcacaaagttatgcggtacttcctactcacatcaagactaaaacgattatattgttcaagacacaccactaaggaaatacagtgtcattattcacatcatgtggatgctaaagaatggaagcagtttgaccagcttattctgtcttctgccgtcaaacctagaatgccaggctcaaattggctactgacggttttaatttacttgggaatatgagcaactcttatagctcgtggccaattatttgtgtcccatataatttgccaataattaatttttattctaggtgcataatgaacgacattaaatttttagtcaatgaaagggataataaccacaaaatataaaatagcggtgttatggtgctcggtgaagctagacaaattttctatgacacacttgttaaaattatgtagttgacttattaaaaagactttagtgttttcttcttaatgtgtaagtggtttgacgctaataaaagtaaaatggatagtgatggtattttaactagcatttgtgtcaaccgagagtggtaccaaaataaatcgttcataattgtatctcaagtcaaattgatatattatatccctgatattaagaacggtaaagactgatcccacaaaatgtcagtgacttcctggacgatgatggggatacatcctttatacaggaaaattatttagctaaaactcagttagttgtttaacatccatagttggatgatgttgactatgttcgccatgatgtggacccaattgaagttgccaatattcatcgtgtgaattcagagtctcaaaacttagatgattttattatcgatgatgcaatgagggtctaaatgaccaagacgaaaattggttagaatccgagagtgatagtgataaaatgttgtatatgtaaccgatgatgatgatgatgatgatgatgatgatgatgatgaattgtaattgtaacgatattttaataggaataataattgcatattttcctatttaatatgttatgaatatggttatttattttaaaccttaaaatatgtgttgtatatataatatgtctacactaagtggcagctcttcgaaaaaaaagaggtaagacgtaaatataatggcaaaaatgtagcaaaagcgcttttcaaaacatcggttaccaaactacacattaaattgtaagaagaattgggcaccccagtcgaaaaaaatagaaaaaagtttaacaacatgtgtaaatggattgtttgaatgtccatccccatgaataaattcaattggtcggatgtttctagagctaaaatcaatccattgtgggacagacttgaggtattttataatttatttttaaatatataatttcatatattattcttaaatttctaaatactgtactaatgtgaatgtgaaactttcttgcagacaaagtttgtgcttgcacgagataatcttgcacttttaggctatggtgagtagaagatatcaaagtgttagcgtgactggcagtacgattgtaagcaaatagatcaaaaacattgaggagcttggacatgagagtgcatacatgttacgtccggatggagtaacttaggaggtgtgaagtgattgcattgcatactgaaatacagacaaaaaaaaggtacttaataaaattattaattttagtaatactttacattatatagtcaacaataaataatcaattgtaagaaagaatgctaatttcaggcatgagcagcaaaaaataaagaaagttagggtaagataaaactttgaggagactggagatcaaagcccattgtttcaaatattttctcttggggtaacattatataatacattattataggtaagtcttattttgttttttgtacaaatacaataatatcaattttttcttaaatataggctaacctcgagatagaggaacttccagctgttgtagaaactttttcagaagttctaccacaaatacaacacttggtacaacaaatacgcgcaacaagcatatgtaagtttacttttagattaatttctaaaaatatctttcaattttttttttttttttgtattcaaattaactttttttttttctaggagcgaatggttgaattggctccaagttaaccagcacccactgaggatcagcttgatgagacaactttatatcccacacaataccccaagactttcctattatgacgcaattactcggggagcgatctcgacatctaagaggctttggccatctctcgagatttaaggtagttggggctaaaagagcacctgccacgaattcttctaccccaccgactgttactatgggacagtacgaggccttacaaaaaaatgtggaggacgcagagcatgcaactcaatatacgaggcagctatatgaaacacaacaacctctacctcaggcgattccaagattagcttgagtatctctctccggctgtgtcaagtttcaacttgccttcgatggatcttccaccatgccgttcctagtgcttgatcgtcatcgcatccctctgagactgagaacaacaatgacgatgacattacccgtctttagaatatatatttgatatcacagttagaacttgacttttttccgaacatcttttaatattttgtttatttactattagttttataactttttattacatattaattttagtacaaatcgatcatttttgtatattagttcgattgaaatttttttaattatcaatgtaaatatcgtttgttttctttgattacgcttctttaaaatataattttatatttataattcatttaaatataattattattaaattattaatttaaaaaaaaatatatttttctggcgcattattacgcaggtaaaacttacacatgaatttactcgtgccaaattcaacattgacgcaaaaggttttgcctgcccaatattctcgtcggcaaaaactttcgcgccaattaggaagaaaggtatgaaccttatgcaccgacaaaggttgtctaattaagttgggaaagagttgattagggtcttcgtttatctcgatgtataagttttccctacactaagtgtacatgctagttttcttggcacaattcacctttatatcgataaaaactctttaaccaaccaagtatcgctaatttcttttgccagcgtaattatgcatcagtaaaaatttgtcggcatatttagtgtacttttgcttgtataaaaaaatgtcagcaaatgtacaatttcttgttgtgatgagtactttcattaaattgaaaaaaaaaatgtacaatattacaatattacgtatatacacacattattagttattttgtacttacgaccaatcaaaagtactaattaattaaacttttatatatacctaacaagattatgatgatatgtcccctgtttctatttttcctctgccttatcattactgttatattagctgaggtagttatatcagttacatcagttcaggttgttaagttgagtctagttttggtagttaagttagttaaggttgtcctactatttcggttggacttcttgaccgacctttagctgtgtgtatatatactcttttctttctctgtattttggttaatcaattcaataaacattttcattcatgtttcattgtctcttccgcaataatactttaccgacaatccttccctaatttgcttaaattcaaaataaattaatgacaaataattcaataatttatatcaagataaaccagaaatatggaatgattttaacatttaaaataaaagttatgattttcttcaattattgaaataatatgtgacgtacgtattgaataaaaaaaaaaaaaaaaaagaggaatgaaaaagaaaagaaaagaaagaaagaaagaaatgctttatgtgttagtcatcgttgtatatcataattaaaggtggctatggagtcgtatataccctacttgtttttgcactgtagtgatcactgtcatttcataacaaaacaaagccaaaacccatctatattattttcagaagggacgtcgttgtctatccttaacaaataaatatggatatattaatatagatttttttcattaattaatttataaatatgtattttcaagtctctgtcgttatgaattaaataatccaagaggaccgtagtggtttcttaaataatagaattatatatcataatttattacactccgtataagttaaattatgaaagtgcccatgcggagaatgaagccaatattctaaataaagtatctttatatatggaaaaaaattgtttaaataatctcggtgaacaagaaatcttactctctgcttgtaatacccaaaaataatacttagatagcgtttggttggaagtaataaaatgaaaaagaaacaatttttattttatttttttttgttgcattttaaagtaacgaatggtattccaatagaattctctttactattttggtggaatgactattccaaaagaaagtaaatgctattcaaatgtactaaaagaaaaaattttttttattaataattttttttttgtgcattttaaattttatttcattctatttctattcttattctcattcccatttctattcttattcctatatttatattctttctaaccaaaggcccctcctccttatataattgtaattcggttcctacaatacatggggaaggtatacatatataaaattattttgtcaaaatcttttgacttatttgaaactagaactatataaacatattagtttttataagtactcatttccattttcatgtgattatatgtgactttcagttataatatatttgcatagagatttgttcatgcacaagcacatttagagcatctcaagtgcatgatgtacaatttgtaccaaatttaatccaaagtataaatgaatgctatattttctacaatgttgctattgtattcagcacaataatattttaaggtgtaaattagaacaaaaagtaaaatagcatgatcattcattaattaaatatttaaaaactaattaatggtaatattgtaataagaaagtttgtgttaaagtatattattaatcatgaatgataaaatattattaaaaaagttgtatttataactgtattctaaatttaatataatattatatcttatgtcaaattaaataatttttgcatcggctaaattttgtactcatattatttccaatacgagatgtaaatattatacataattttgaacaaaaattaacaaatgttaaatttagcagattatttataattatatatacattgcaatataataatattttaagatgcaaactgtcctaaagaaaaataattagtaatggctattaataaattaaatatttaaaaaattattcctgctaatattacaaataaaatacatatgttaaatgtatattattaataattaatggtaaaagtataattaaaaaattattatgtgttaaatttaattcaatattatattttcctgctaaatataaactaatttttaagatgttatattgaaaagtactaaaaaatatataataatatagtacctatttagcactctattagaaaactaactttttcaaaaaaaaaaaaaaaaaattatattatagcagtttctcaaaagtaattttgaattgctttacatttctaaaatacagattatccaagtttcaagaaataataaactcccaagtcaaacaattagaataaataatatatgatccaactttgaaaattcattttagtcgaacaatgaggacagataatgttgaagtaaaccccatattaaccacactgtaaaaaccagaatattacacaaagtattacaaggcagtaaaataaatcctaggtggccttcggcc

SEQ ID NO: 14907 - DNA, 6948 bp, Cannabis sativa
  modified_base (4189)..(4194): a, c, t, g, unknown or other
  modified_base (4428)..(4428): a, c, t, g, unknown or other
cattataataaaatctctaacaaatgtcactaccgtacaaactaagcatcaacatgtcaccatcatgcacaccaacatacgccaccacttggccaacttatgggcattaccacctaacttgtaacgtgccatcttagcatgcacgttacacttaacaccctattaatgtgtaatattattattagtgtaaatcaatatcaagtattatatatttcactttaataaaaattataaaaaattattaatcaattataaaacttgacaccttgaagacccataccaaccatcttttccaaaaagaaaattattgagaatgaaagatttcagtaggcttgtacagtgataacttgaattttttctttttgttttgtaaagaaaaagtgagtttttgagatttatatatatatttagaaccagcttttccatacacggaccaaacacgcccttgacacgttccaaagggctcggttttgaacaaatcacagaaaaccaagctaataaatatgacacatcatcattcaccgttgaatttattttgatcaaatatccaccgtccattttaaataacgcaacaactttacttttccacacatccccataataccatacaactcacctcaattcaactgtcactcgccgccgtacagaccacctcatctcactcttcttctctccacgtggcgccacgtgtaccattcgatttcactgcacgtgggaccctccactgcgactccagactcagtctctgtatctttctttcacacgtggcaccctccagtctccgttggcgcgtaaatcgtaaatcgactcgcctttctagataatctgaaagtgacggatgggtgtggtgggaccaggtgctgacgtggaagaggaagtgactaaactacccctactggccaattctatgttccaactagaaataaaaataaatagaattaaaatagagaaataaaagctatttatttgtggttataaatttcttttttttaaaaaaactatttatttgtttattatggaaagtttaataataatgacttgaatgtgatgaattatataatcatcaatatcaacatgattatttcttttttttttttttagaaaggatcaacataattatttaattcatagccaattattattattttgaaagaagcaaaaagaaattatgtgttacttgtggcaatatttgttcattatttattgacaaattgtagctttaaaaattgtttttagtttttacaaaattaaggaaattgaatttgactttttttttttttctttcgagttatttaaattacaaatcaaacaaatttatacattccaacaaaacttgtgtactaaatacaacgaatcgatttctatattaaaatgttaaaaaaaataaaatatcatgtcttttcaagtttggcaaaaaataattaaataaatttatcctttcatataatattttatgcaattaaattcatacaatccaaacgtaaatgtgaattgaataataataatcactcattttaaaagcctatcttatctctgttacatttcttgaaacactttaaccaatgtttaagtagcttaaaattctttttcaaatgtggtttattttttaataaataaaaataaaatcatcaactcaaattcttaaaataacaactcataaacttataaaattaacacatataccagtcaatatatttgttatatatgaaagaaggaaaatcaaaatgaagcaacaattaaccaattacccaataattatcatataccagtcaatatatttatgatttattaaaacaatactcttggtagaattaaaattttgtgctctaatctataaactatctagcttaataattatactaaagttaatattattatgcctatacgtattattttttattacaaatatatactgtaattaattaaaattaaaatacatatattttttttttgatttttttttttaaattcaactgtcctactcgcttgtatatgtgagtcctttgattgccattgattgagagaataattattagtagtagtagtattattagtattagtattagtattatgattattattatttttaaaaaaaataaagaagagtataattaagagaatgtaaagtacataatatattatagaatctaattaaaatttatgattaaattaataaaactagaaaaaagcacccccacgtggggaattactttcaattccaggaacatacatgaattcataataaaaaatctcattgaaccaaaacattgcttgtgattttccaaaataacaggaacattataatgataaattaataaataagtaatctgtttcttttcaattaaaaataaaataaaatgaaaaatatttattttaaaccaaaaatgcatttatttcataagggtcattgtatttaaattgattttgatgacaattatccaaatttaattaatttttggagttgataatatatattatctgtctcaagcctggcaaggctatgtatgaggctattaacagatctttgtagcttgtttgtggtcctaatattactcataaataattatttttcaaacttttctcacatttttaaaaagtttgctattaaagactttaattgttttttaataatttaatatatttttaaagaaatgactaaattggatgtttgaagttgaaccattctaaatctaaagattggatttagatattccccaatttgtgggttataattattattatttcattttttgttttagaaaattattattatattactatttccttttttgttttagaaaaatcttgcatagagtatacaataggaattatttatcattttttttttatagatatcaatattttttttaataaaattttgatatattaattaaaaattatgtcatgatgattggattatcaaataaaaatgggtacaataatataaattataaaatattataatttaacgaaagaaaatgaagaagagataagaattttttaagtattttatttaaataggcgatctcctatctaaatagagtcaaagattaagaaactaagacaaatagaatattaattacaattaatggtaacaaataaaagatttagacttctatatatttattaatatttataacactcctcattagatgtacataataactgccttattaaaaacctcactgagaaaatccagtgggacaaaatttggtcaaggaaaaaagagtacaatatgaaattactccccatcattttggtattcatggagatcttttaatcgacacattgcaatcttgtgaaccatattctcaaaagttgatattagtaatgactttgtgaataagtctgcaagattatcacttgattgaatttgttgaacatcaatatcaccattctcttaaagattgtgtgtaaagaagaattttggtgaaatgtgtttagttatatctcctttaatgtatcctcctttaagttgagtgataaaagcaacattatcttcgtagagaattgttggtattaattggatgttaattcacacgttccttgaataagatgtgtcattgatcttaatcatacacattctcgacttgcctcgtgaattacaagtatctcagcatgatttgaggaagtagccactagagtttgttttgttgaccaccaggatatagcagtgtcactgtaagtgaataaatagttaatttgagatctagctttatgtggatctaatagatatcatgaatctatgtagctaataagttgcggcccacaatcatttgaatagaacaatcatttatcaataatactctagagatatcaaaatatgtgcttaatcccttttcaatgtttatatattggagcaaaactaaatcttgctaacaaattaacatagaaagttatatcaggtcttgtacagctagcaagatacatcaatgctcttcttgtattaagatatgatacttctagactaaggagctcttcatgttcttctctaggtggaaaatgatctttttccacatcaagtgatctaactaccatttggctactcaatgggtgtgatttatccatatataaacgtctcaaaatcttttcactataagggctgatgaatgaaaattccactttttaaatgctcaatttgtaaaccaagataaaaatttatttttcctaaatctttcatttcgaactnnnnnnttagatattccacaacttctaaaagtatttcaggagttcaaataatattcaagtcatcaacataaacaacagtgataacaaactcagaacttttttataaaaatataggcaaatatgatcatttgtatatccttcctttaataaatgcttactaagttgattgtaccacacgcgtcctgattgtttcaatccatataatgatctttgttatttaattgagtacatttctcgatngcttgaattatatgcatcagacatcttaaatcattcagggatcttcatgtaaatatcactatctagtgatccatataaataagatgtgactacatccattaataatatatcaagtttttcactcacagatttaggttcaagatcctcgttcatttataattactagcgctacattataagcaaaaatattatcgataactactaggagtcggtcccattcttttttttatattgacataatttattgagatctcattatttctaatattttttaggtacctgaatctcttcaagagatttgtttatgtcaacatcttcctcaaaattttcagcctcttcattagggtcatcttgattattttttcattttctttttcgaagatttttatctttggaactgattggtctaccacatttcaagcatactatagaatcattagctaattgtccttccaggacttcaattcaaactagagccttttcagctggaatatgtgattttgtaattttttttgggttagttaatgcatttggtaattaatatgtaatattttacaaatgaactattcattaaactagaagttcacattgatttgtatgaggatcaaattgagataatgattatgcatttcatataatttatttttctagttgtttcttttgccctctccttaaagttgggaaacttatctcatcaaaatgacaatcgacaaagcgtgtcgtaaatatatctttagttgtgggttcaagatatttaatgatatacggagattcatactcaacatataatcccatcctcatttgaagacccatctttattggtggagcaattagaacatatactgtacaaaccaaagattcttagatgagaaatatttagctcctgaccacaaagcaattgtaatggagagaatttgtgatgtgatgttggcttaatgtgtacaagtgccgcaacatgtaaaataacatgtccccaagctaaaattgaaagttttgttctcataagcattggtcttgcgattaactagaggcatttaattaataatttttctagatcattttagtgtttttgtgcttaatttactatttaattaaagaaaatctttttctatttacactatatcaataatatatttatatttagcacattgttatctcttttatttaacttaaactcaattttttttctctctctgttggtacgctagaacaacctcaacttaggggtgttcatctgatcacatccatggatttggacccaaccgattcaatccaattatttattggatattgaattttgtcatccgatccaatccaatcgaattgagtcatccaatccgatctagcggatgtattggattggatcggttccaaccattagattcattgattagttttttttattggattggattggatccatccaatctattttagctaccatttaagttaatttcattaaaaagaaaaatatatatatatataaaaaacataatttaatactttataatccaacatacataataaacattagtttaatccaacctaattctcatgatctcataataaaactgctaaaaaataaaatttattcaatatgcattaataattttattagcgtttagaaagataaaaaataatattttagatctaaggtttttttttctttaatctcatgtgtaaaatgtatattaaatcaattaatatatattttttaataaaatatattaaatatataaaattattattttaaaaatatataaatataattggatgaccattggatgataattggatcggtttggttggttatccaatagacgaatgtcacatccaacaacagatccgatccgattgaattttcaaaatttacatctgatccgatccaattataattggatatctgattctattagatcggttgagattggatcggtcggttgtaattggattagatgactttttgcacacccgtactatacagtgtaaaattaaaaaaattattttaattaaatagcaaagttaagcatatatagcaaagtttgctttgtctagaattatgtaataacttaatcttctcttagttgttttgttttaaccacttatattttaattttgtatatcttttagctagataattaatttgttagttgtagtggctttgctttcttctatgtaaaaaaaaagtacaaaatcatattataaagaaaatttgattgtatcacttatgaaaccaattaaaccttcaatattttaaggaaaatataaatggaataatgattcctttcccaatattttggttcccaaaattgactaatgcatatgcatgagggcaatatttgtttatgccctaaaatcaagtgactgttgctctaagatacttatataatataacttaaatcatgttttttttttaaagccatccaatttttgaacttcaatagcaaatgctatgttaccctttgatgttgctccagaattcgcccaaaatacgtggaccagtcgagaggggacacgtgg

SEQ ID NO: 14908 - DNA, 6568 bp, Cannabis sativa
ttttcatgtttatcttattccctgttatggagaaaacagataatgatgtaataaacatatgatggtgtttgcaggctattggactacaaccatctccatcggtctcagctgttcaaaaccgggttcttcaggctgctgcaaagcatgaatctaaaccatctgatgcagaaggtctagctgagccatcttccgaagccacaatgctggggagcgagaaggtagatctctcggaagcatagaaaaagctttgagatatctgtgcagcaagcaagtataagattctgatttgagaattaaagaattgaaactaggccacattaccgtacaataagccgccgtgattattcagaaattacctttttgtgtaaaaacacaactgttaattaaagctgattcaaatagttcaattgacttttgtacatctttcattaataatcaccccatccaatccaatttcatgttcatacgcccaataaatatgttgggatcctagaagtaaccattttgattttattgccaatggaatttttacaatatatacatatatagatgtgacatattcctacactaataataacatattaaaagaatgcagagagattacaaagtcacgcaaaaatgacttcattccttctctgcaattaccacgaaaacatccttcactgaccaccttcgtctgatgctttttgatggaggattgataatagctctctcggcatcagctaaccggtaacctattacaatctccctcctctgtcgagctcttatgattatttcataaaaacttaattcctcaccttcgaagagatagagatctgcttgccttatttgtaactcatttccctggaaaggaaaaactaataactttacaaaatacaaaaagttctaacagaaaaaaggacaccatggataatctccaagtaatattgttttgttccttaacttatgagtgtctttcatgttacatgggacaacataaaattttcatgtggataattttcagagggtacaagtaattttgtgccccaagttatgaaaggaaagattacctcctctgcaaagagctcttccaatacatcatttatttgtcgatcctcagcaaccatggctaatgccatgctgacaagctcgtttgacagcacataatcactgatttttgacatggctaacagattttttgtcctcggatccaaaatctcacttattataactgacttgtcggaagcctgctgcatttcaccaatccaagagcccggagagaaacttccattttgaacatgtgtcaccatgggcagtcgcttggcctgtaaaaccaaaaagcatttgaaattcaaggatggagatcaatattgtagcagttaatagttaacaaataagaataaccaaacaagtacctgaatatcacgaatcaacagtaatgtggcaagagatctagaatccgcttgaattgctgaatcttccacagactcatcggccaaaattaagatctgcacaggcatttgtcccattgtcattgacggcagtaaatctctctcctatttaatatgttacatagctcatgattttcatgcatctatttcgcccaatctcaaccataacttctttaagctatcaaatttggttttgcaattaaaccgttgcgtatatttatgtattttcttcgctcgttcctattctcctaccaatgcttatgaaggatgtcttactcctcatgcaactaaactcaccgaatcaaaagattccaaaggaagactttccaaatggcgtcgtataacagcatttccttcacgattaaccaaagttatattctccaaccgctctatgtcaaggccgccatcaataagctttttttccctttccttttctgcgacttcattaaacatccacagctccgaaccttgagccagaaaggcatccaagacctgaacagcatagatgtaaaaggagtaacttcacccaacttaaatagattattctacgacgtgccattatagatgtaataagtaaaagttctatgattggcaattgcagaagtgtgatccattacaaagaatttaacacaaagcagtaattgtttcggacatggctgagcatgtactattagcatgattgcagaaccctttgcccttgtgacattaccataatcatatcttccatatctcgtcgccaaccacaaaaaagtatcttttcttctttcgttggaacaataaagtctctgggtagacttcctctccaaacctgcagcattcaggcgaaaaagggaaattaggagcttcaatagaaagacttaccacaatcatatcatcaatgtccctcctccatccacatagtagaatcttctgtggctttcttgctggccgagaagtgtgtataaatgatgcctctttgacctgaatgatcaaagtgattgtacttttgtgagtttaaataagggcatccacatcccccatttattaaaactccactgtctgcaacagcaagtcatgcaaaacttttcatttttaaaaacatgtattccttcctatttcttattcctcaatatttcctcctctttaaactttgagcctggatatagctttagctgaagtggagcatgccaagcctctgacagctcattcagcaattatatttttccttgaataagaactgctggatggaaccgttcctccaatttagttcatacgacaatagtgcttgtacacaaatatttcttgagctcaatttttagtcaaatttattctcaatatgaccaaaattttcttatttaaatacaaaaatatattaaaagagaaacaaaaataattttgatgaaaattgtggtaaaataaatcttttatataacaaattttaatattaactagattaaaggagggtaagcaggtaataaacaaacatcaggatcatcaggattgagtattaagggaattgtgaaagtaccataggtacagcagctggagcatacgtatcatcatcctctgctataacaagaacttcatcgccttcttgtagaacataggaatcgtcaggattcagaatgatctttccatctaatgatgcaaccttgatcccacaaggaattgcatcaggaaaacttatcaacacattttcaaaatgcatgccatccaactgttgccaccttttgatgtagaactcacaattttcaaacccaaggatatcttcccaaatctgtcataacgtgctcatcattgagaaagtaataaacttgagattaaaaaactaaataaaaaacgaaacgaaaaagtagatatgaccatccataataatgttagaagtaacctgcgcaaggcctggctgtctagcgcattgaatcatcagacgaccaattacatcatgagccacaacagtctcaacaaggtccccaccaacaagtttaacaagaacctcattgtcaagatcacttagttcaaccactatatgtcctcttaatccttcttttactccagtcagacttaaaactgttctcagtgcacgagcatcactctgcatcaacaaaagtaatgacttaagcttaaacttgaccaattagcaaatgtcatatctgcactttaatgaagaatacctgatcagcatttccatcttcagcgaggatgactattgcacgggccttggaaacagatacctataatgaaaaatgtattagcaacacaaaagaatcttctaactgtaaggaaaggttgcagaattatgtaacttaacctttttcaagtcaactagaataagagggctcccacttctgcatatgacagatgttcctttgaaatcaaattccattttggcaatgtcaagctccatttcttctttgtccctctcagccattaccacaaccattcctccacccaaactctcatttgctattgcgagctgatttaacagtgacccctggaattggaaaatggctatttagcagtcacaataaattacaagcactttgtttcatcttctattttgcaataaaacaaaaagaataattaaattttcacatggatcagccacagaagtaaaagcttaccaatttatcactccatccaagaatcaaagtatggttttgctcaactacctcacttcttcctttcctcaaagaatcaaacttctcagaaatagcatcagagacaaggccaagcatcattgcaaaaacaagcatacccccgaaactaatagaaacagatactaatctttcaccaaacttttcagagttagtgtgattgccagaatcagctacataagtccacgacaaccaaaggcactccgctaagctatcgtcttttacaccaaaaagcgccaatccaccaagacagataagtaacaatgttgcaactaacaatcccagcgacttagcatatggattaacagataaaaatgcatctaccctatatgctagctgcttgtttagagaaacttcttctgaactattttctgatgatcttgatcttgaccttgacacatagtcaacatacttcaaaacaagaagtggaatagacaacagtgtgacagagacaaacagagctaatctcttcaagcctttactggggacatggtgtacggaatcactaccatcattaataattcttgacacattgtgtacttgcaataaattttcaagctcataaatatgctcctaaaatcaaaaaacaaaaactttgataagagttgaattgcaatgcgcacaaatttaaggaacaggggaaaacaaaattaagtttacctgcaactcattgacttggtcgtgtaaagagaagttttggtacagtagtgatgagaaagccgtgatcagaatctgcaaccgcgtttacaactatgagcgcttcacaatatatgataatatacaaattgagatcgagagagtaccgctacggtgatagccattttccagcgaattcgaagctgagaaccgttaagcttgatcttcttcgaaccagaagcattgtcaccaacaacggcggacgaagtctcgacctttggggccgaaacggagtccgaggaatccgatgtcggaggaagatcggtccaacgagtgaagccagctctccggcgaaggcgagcattgtggaatgttgtatgaggcggagtggcggcggcgacggcggaggaggaagcgtggcggcggaaaggagggcgggagagaggagggttttgggagaagcggcgagggtattttggtaaattagggttggaatagactataggcggtggtgaaggaaagtaccaatctctactggtggtggtagagggaccactgtccaagtcaacggacataagtgtaaatagttactcttgctgaggggcttttttggaataaaaacaaataacgaacaaacttttttttttagttttaagatttttagagctttttatttcttataattgagtttctgaatttgaatggaatgatttgtgtactgtgttttgctggaattaagtctttaacaaatggttaatcattcatcccatgttatcttattattattattatttttatcattgtttgtgtttggaatactttgtcttcttataattattattgtataatcaatcagcattgactgacttattaatcatataacaacattattaccattttcattcaatatttaactccaaatgaaaagggattatgagaaacaacaatcaaacaccaaaataatcttttgacagaaagaaaaagtcaaaaattagatatagtcacagtaagtaaaatttgttctctctgacattttgtaagcttctcataaaaaaagttgttttactccttgaaaagtgattaattccctattttgaaagaaggtcgctactccttgtgatgtcttctctactttttggaataaattttagagcttcaagattattgaaccacgttaaatcttgtggtgaagcatcgtgcctaatgcttttgccaacaactagaactgttatcataactaaatttcatgtcaaggacattttctgttccttatatggttgtgattgtgaggaggagactatgaaacacttatttctctcatctaactttgcttctatttttggagattttcttcttgggatcttatccctatctgatgcttctattttcttcttattaggacttgatcctactgttgttgtggatactatttcacatgctaggaatgacaaaaagatcacaacaatattgtctacattgctttattaattatacactttttttttctcaagaaccaagccatccttctcctattacttggatttctcttttggtggattggatcaaaattaattgtgatgtagctcttgggatcattgtggtagctaagattcattgtgtgaaaataatttgggtcgagaataaaatgattttctttttggatctccttgttggggagttgcttgggtataatctccccttgtttatatagtattgttgttaaatgtgattctttgaatgttgttaatgctcttaatggcgagtttagtagacgggctattaataattataccctagtttgtaggaacatcgctaatcagttattttgtttggattcctcataattgtaatgtgtgccgataaggttgc

SEQ ID NO: 14909 - DNA, 7131 bp, Cannabis sativa
  modified_base (5106)..(5110): a, c, t, g, unknown or other
atatggtattattgaaagaagaataagtagctgaaataaagtggtaaaattataactagtaaaatgcccattagtggcctgccactatgtgtaattttttcccattattctattctttttcttaatccatataattcaaacctaaaccctagttgaaatactataaaagaaacatgatcctcttatctcatccaactattcactacaatcaaactaaacctagttttcattctctgacaactagtagatgagagacactttctatagaatttcgaaccctccttaattgttcttcacctattcggcctatagtgatagagtgtcatgcccacacataacaagtcaaatactcaatcatagtgcggaagacggtggtaaccaacccaaagtagagaaagaaatccaggcttaaatcttaataatactttgtgacagattggaacaagggttagagatttgagcggaaagagtcattattattccactacaatcaatgtaaagttttctaaactcttatgtgtttaattttatcatattagagatatttgtatttaggatgttaatcaccatacttgctagtaaatctagatcctaataaaaatcaattccaataactggtatcagagccatgataatgatttacttttatgaaatataaatttaaaatgatgaatttgttgtgttggtttatgtgtaatttgatgattgaatgagaattacgaaatttctccatgaaaataatttatttggatttcttgtaaaaaattacgcaactttcatttttacggaactcaattccgataaaaattgagaaagttatattattttgaaaaatcgggcctaaggtgttgagcatggctcaatcgcacgtacaggggcattcagacaaggtgctcatgcgcgcatgtgtgggggacaagtccttatctgaagccacgtctcgcccagcctttagacacgatccacgccaaggaggaccttgcagctgaccgagaaacctcggtcaaagaggccgcaatcctcctggtctgcgcgcccaaggctaccagctgcctgtctcgtggacagtcaccaaaaattcattttttttttagagtcattataatgatttacttacatgaaatatggatttaaaatgataaaattattgatttggatgtgttcatattggtttatgtgtcatttgatgattgaatgtgaattacgaaatttttccatgaaaataattttatttttgttctgaaaataatttctttggatgacttgtaaaaaattaagcaactttcatttttacgaaactcaattccgataaaagttgagaaagttatagtgttttgaaaaatcgggtccgaggtgtcaagcatggctcaattgcacccagagcactcagacaaggtgctcatgcacgttcgtgtgggggacaaatccatgtctgaagccgcgtctcacccagccttcatacacgatgcacgccgaggaggaccctgcagtgtctaggaggttgcaatcctcctggtccactcacccaagacaaccaaagattataaggttattgtatccttctttgatatgaaaaagcgtatcaatgggagaactttgattcaaaataggtgtaggtaacctgttatgaatatacaaagcacacctaaaggcttcatcccaaaacttcaatggcatagaagattgagcaagcaaacttaggccatgttccataatttgtctaggctttctttccactaaaccattatgttcgtgggttgttagacatggatgcctgtaaatgattctaacttattttaaaggctcgataaaagacctatactcacgcacaattaatttaaagaaccttaatcttcttacctatttgaagctcagtttcaactttaaaattgagaaaagttttaagggcttcagacttagtttttaataaataaatccatgtgaatctagtgtgagcatctacaaaggacatgtaatatttacagccattatgagagactgtatgagaaggtccccacaagtttgagacagctagttgtaatggttcaaaatattcagtgcaagaagccttaggataaggcatatcttaggaattttaccaagacaacatgcttgaaaaatagaaataggcattttattatctccaatagaaatgttacaagattttaacacagattgcacaacactatctgagggatgacctaatctattaatccacaattcaaaaacatatataagagatttattacagttgctacaagaactgacattggaatcacaagtgcttgtaccagaggtgacaatgcaagcatgtttctagtttacaagactagagacaggttgggatgagattgttggagttgatgagacttgaagttgatttggatcaaaagtatataggctattgtggagagtcccagtcagtattattgctttgttcacctggtccttgacataacaaacaagaaggtgaaactcaaataaaatattattatcaagagcaaatttagaaacactaagaagattcttagtaatatctggtatgtgtgtgcagcagatttttgagtataaatgttttatcagaatgtttagacttaaagcaggcatagctagtgtgttggatctccaaacctgaaccatttcccacatagagtctaatttcctgtctattgtactcagaactactcatcagattttgcttatcatcaatgtagtgattggttgctcgtgaattaaggtaccaatttgcatttgcatttagtgatgtttgagcaacatgtgcttgcattgaagtagcttcattagagggtggcaaaaaggctcctgtgaagcttttgccaaacctttaaaagcattcaagagccatatgtccaactttatgacatagttgacattgtggcttgttttgtgttgtagaaaatcttccaccatgctgagtaatatagtttcctcttccatagttgtaggaaggagatccacctcgagacatgtaactcgagttagttcctctattattatagtaattggaagaactagaagatggatagagtgaagggtgaaactgacttttattgaatccttgtcctcgagacgcgaatacaaatgggatacggtgatgacaacaatggtaaaattatatgatgagttttctataagtttattgtcttcttttttattatttatcaaatccttatttggtgtgagggctctttaatctctaatattatttcagtatagtgtttgaaaatattaattatttaattgagtaaaaaaaaaattaaaagtttagtaaaataagtacttattctaatataaaaattacattaaaaatttgatataattgtatgatttaattatcactaaataaaatatcaccacacacaaaatcacagtttatttcctagtttaaaataatttatgatcaaactagttaattctagtgacttcagaataatttaagttctagggcatctaaatcaataaaaaaagttgtcccttaatctcacttcatatacttagtcaattctatttcttttaattaaaatattaaagtacactagtccatttaagactcgtttaatcatccctctctttctttcatatatcacctaatagtatgacccacaaatttttagtcaaaataaatgaacaactcccattggcctgataaaaatatgattatccacaagtaatgacaaaatattacaaaagacacaaccctaattcataatgattctactaatttctcgatacatagagattgccaattttgaaacttttcttttctcaatttaaaagcacatgcaaattttaatttacagaagtgaaatacttcaatttttaaaaacaaacaaaaaaaaaatcatatttttaatcatttttttaaggaccggagagtacttataattaattagtttaattatgaatacaatattcaaaaatagtataattgatattaattgattggaaagtgtgataacaacctattagtagagatacagtaaagagtaaatactattttgaattttgtattttgtaaaatttattaattgtattttctgttttgttaaataacaaaatagaccgtatatttttttaaaatagtaaaaataagacattatgcttaatttttaataattttattttctaatataacgaattttaaggcaatttctaacacgaacagatatagaaaatacaaccagttttatcataacatctctaggtcaaattattattaagttttattttgacaaaaaatcagtttagagttttatttgtacaattttataaaatacaaaatttattgtattatttaacaaaataaaaaatctaatttataacttttataaaatacagtgtgaaaaataatattatagtcatgcataccagagtatgaggccctttctgattaaaaaaaaagtggtggtccatctctaaccatagccgcctctagaatcatagtttattttatttgattgatagatgttctagtcttaagagtcatatatatcaatatctaagcaattacgccagagtttattttttaaatcctcccaacaattattttaattacttctatttaattttttaaatttaaattttgacaataaaattttttaaataattgaattaaaacgtcattcaattaactgctatcgtaaattgtttataggtacatttttatacacataatacgtttatatatattagtataccgaattttattagttcaaaattattttaaatttaaataaaattataaaaaataaaaaataaaatatttttaaaaaattaaaatattaataaatttcttattatttttaaataataatattaggtgtaccaatataaatatttcatgtgcataattaattattttttttatacagttcaaatattatttgattacgttttattcttattctcttctcatttttatttctatatattttaattgcttcctttcaaacacacaacatgatatatttggaaatagttagcggtttagttttttttatacatagctgtagagttgtgaccaccagtattattagcctgtaacatctctctctctctctttctgtatatttatatatatatatnnnnntatatatatatatatattacatagcaaagggcttatttattactttcttaataatctcatagtcatagaaacttatccaagataagaattatggccatggaaacgaaacctcacgcagtattcattccatatccagcacaaggccacataacacctcttatgaaactagccaagcttctacaccaaaaaggcttccacataacatttgtcaacaaccacttcaaccacaaccgtctcctcaaatcaagaggccctaactccctcgatggcttgcccggttttcgattcgaatccatcccggacggcattcctccgaccgataacaaagccgatgcaacccaagacatccccgccctatgcgagtccaccgagaagaattgcctagaaccctttagaaaacttctcctcaagctaaacgacactacctctgttgatccaccagtgagttgtgtcgtttcggatgctgctatgtcgtttacagttaaagctggtgatgagtttggaatacctgttgctttgttttggactatcagtgcttgtggcttgttggggtatacacagtatgagaatcttgtcaataaagggtttactccatttaaaggtaacaaaatatattaaccatatatctttagctagatctatactactcttttgcaatattataattattatgttaatttgtgttggcttttagtttatagttttagccattagtagtgtgattcgattttacctaacaaaaacgttgaaactaaatgacaaaacaagtacttattattggaccaagtttaactatatatataactatataagcatgtgctcactgattctcactgatcccttcgctgtttattttatctcttctctaaattatttttgaatatgaatatttgtcactatgtggtatggttgtaggtgtttttctgttgaatacatctagagctttaacacgttttcacatgtatttgaaattaatgctgaagactaacaatgttacttaacacccgatttcatattgttattagtctaatttaataacgggtctagcttattttattttaataacaattataaataattactaattatttatagagcgatcgatactttatggtggtaattagatattgtagtacttaatagcagtggtatttatagggtagcgatacacatcccgaccaccttcagatgttcataaaatgcatgattcagtttaatattttgcaaagttcaatctaattcaatttacaaagtacagatatcagtacttgtgcagattgaattaaattgaaaaatttataaaattagtactttgtaggaattggatgttgtttcaaatgcaaaaacatagtcgattcaatcctatttaaatttatttatatttattttaaaaatgataaacttattgttaatattttaaaataattaaataaaattaatgtatgtacacatatttttaaaaacatgatatgtatagaggtggtgtttggacaaaaaaataaaaagttcttttttaatttaaaaatccttttaaaaaagctaagatttgtagttttctcaaaataacttttgagaaattatttttaaaattaaaataatttataaaattcctaatttacttacaaaagattttttcgttaataatatccaaatattttaaaaaatattttttattaaaaaaaatattcatatagtatagttatccaaacaaataaatcaaagcttatactttatcttatactaatctaattaaaactacattcaatctttcttttctataacatttttctctttccattattaatttttatttatttattttaatgtattgtttgagatatataataacaatttattctattttattattggagaatttaaaatgaatattttatgttttgtacatatttaagtaataactttggtgatgtgaaaaaaaatctattttaatcaatattaaataatttaatattaaaaaataaccactacaagaatttcaccatataattacatttgcggat

SEQ ID NO: 14910 - DNA, 8012 bp, Cannabis sativa
  modified_base (2466)..(2479): a, c, t, g, unknown or other
ttgagagtacacacttctgtagttacatgccgctaagctttgtattgttctgactttgatattctaggacactgcaaacagctgttggagtgtttggaggtgagggctacacagatagaatggatatagtgccgctgatggcagcaaatgctgggaatagcgaacgtcctgcaatttctagtcttgacgccccaccaatcttagcagtagagccttgtcgtgaacatctggtatgtaagaacgacaatatatctttcccacatttatacacaaatcttaatgaaaatataagttcggcaaggatacatttcaagtgtaaccaaatgacaagacatgaataattaaaagggtttgcttattgttggattgctactagatttttttggttcattgactaagagaggtttttaactattaaaatttcatttttcattaacttgacactcgaaacatactaaacatcgcatactttcttttctgtttttcgagtcgtatttatttaaaaggccttttaactcttttttttgtgaatatttgtggtttcagggggttcatccttgtgataagaggagaagcatcagtgaatatcagtatctatttccagcagttgatttttcactggcaagtgttgttgtgatgaaatgacatggaataatttgctagctaaatcctcatctatgatgcctgttatatttggggtggtgttttgaattatcttttgtatttatacagattgaaagtgacgaggatgtgttatggaacgccactgttagagagacaaaagaagaagttgcagccagaggattgaaatttctcaactggtaagttactactaggactaggacaatgaatttgttttgatcagctcctaaaataattcaaaattataatgctatttattattgtggatgcgagtttaaagaatttttcataacttggaattcctaaatttaatctgcaattttctttagtccgactttttaatggcataatcgagttactttctagaataaatgaagaaacagtgcttttaaattctgtgaatttacattgtaattttaaggaactacactttggttgaattttatcatctcatgcatttttttaagttcactaacccgagcccttttttgaggtctagagaaaataataatgcctccagaccataaaacttccgtgatttatgctcaataattcttatgatgcatctggggtgtttaattaatttgactgctgaaaatttcaggttgtggacgaggcaagagaaggagatcgccattgttactcacagcggctttttgtttcatacactaaaggtgtgtggagatgattgtcatcctttggtgaaaaaggaaataggcaaacagtaagtgtattgcagaggcttattcttagcatgcaatcaagttaactaaccaactttctatggcatttttctttggtaaataacctttcgtttttaatatatttgcagctttgcaaactgtgagcttcgatctatggtcatcatcgataaaaggttagctaacaaagaattgtagatactcttttaagcttgttcttatagattgatttcgaaaccatgtgaaattgatttgatttcggtaaaaaatgacccttactactgaactcttcaatgtccagtatggcaggctcagacccctcaacaactaattatccaggaaagattccaagtggacttgatcatcccagtgatgctgcagatgacaagaacctcgagaatggtagctcgaattcttgagttaataaactcggaagaagaaagaagagagttgaaagtttatgacattcccatccaaagaagatttttgtatttagatagctctggatgccataaaaaacatatttgaagcatcattgatcatcatcatcatcacaaaggaagggagacatgtaatattgagtctctttctctatgatggattgagatagtaaaattaattatacatatttatacataggttcatgtatatctgtgcttaaatggatgggagatgtatttgaatgaccatatcaatctttattaatgacctattgattgttatgataatgacttttgaattctaataatgatatttgcactattatacaccaaaacattacacattgatggtactgttttttttataacaaatgaatctcaaatgaaataaataattttggctaattaggatttttacctctcgaacttttacatgtaccaaatcatgctccctgaatttttttggtcgttaaaaatttctcctgaactattgagattgttaaatttaagggcttttgtctaatttaattcaattttaatatttcggtgattatttatgtattaaatcatgctcctcagactttgatatctactaaatcatgcctctcaaacattgacatgtactaaactatgccctctaaactttcatccatgttagactttttttactaaaattggataannnnnnnnnnnnnnaacaatctcaatagtttaggggtatttttaacgaccttaaaagttcagggagcataatttaatacatgtcaaagtttagggagtaaaaatttttattagcctaaacaaaatgttacaccactgtgtgtgatattttggtacacaaaatattttgtatgatcttactaagaaactagaaaatatatcaaaaaaaaaattatgaacaacttcaggggtgctttcaagtttcaattgctaaattttagctagaattaataaaaggtgaatcaggttacaagtcacaattagaattaatagtagttcactgggattgtagttcgactccaacctgtgacaaggcctttttgatcatatctcttggtcgcttattattgttatattaagttcttttttcctttcttgtggcattagctttgattgtccctactattttcttgtcctcaatcccgctttatactagaggaaagaaaattgacatcaacggctccatattagcaaattgcctatttgaacccgccccagcaacgaacaccttcctactgcaaggtgagatctgcccttcctctaaaatctactctgggccgaaggagcaactagttcaacttcttgagctgtcgagatattaaacaacgaacatttgattgaattcattgtctcacattgagaatagagagaaggtcgatttggtttgaatcctctttcatccactttacaagttgaagaaaaaagtagctatcaacactcttatgacatttcggatagatattctaataagagaaggggatctctgtcatcgcttcttcttactttggtaatgactcataaccactgttgcaaagactggaggatacatatttaccgtcagtggtcaaagagcaaataaggtatttagtttaaaaattgtcacaactccattcaacaaccttgattaatttaatacttttttttttttggtctattttacaaatttaaatttttatttgttattaaataaaatttggagagctctccatttttggcttgctactttggagaataaaatttacaatactttaattcctttacactcttcatatactactttgtattcatgttgtctaaatgatcaaactcactactcatttatttaggcagttttctttttctttttaatttcacaatctaatccagtactccacatgaaattttacaagtagcactaatattcatattgaaattatttttcacttaatagttagaactttgattgtgtgtaaaaacttgagggaacatatatatatatggggaacttttaaaaatatcttttttatatatattttatttataaaaatatactcataaagttttaaaattacaataatacacttttcaaaaaaaaaaaaaagtaaaaaaaaaaaaaacaatttaaataaaataataaatcaacttcacgaaaactataaatcaactataaaacaataaaaaaaatctcacgataactatagtacaattaaaaataaactataaaataactaaaaaaataatttactatattcttgtaaataaaaaagttcagagcataaaaaaagaaaatttatcagtgttgatgtatttttatgatttttctttttcaaattcttggtttattatgtaaattttcaaaacatgttaacatcatggaaagaaaccccataattaagttaaaatgtagcagcaaattcatctctgcaaaacatcaaaaaatgatgcaggcttcttctttgaggggcagagttcctgaaaaatcaagagaagattcacactttcagatcattaacattataattctcttttgagataatttgtgaatattaattatgttgctcaattgtcttaacaattatatatacaagttctgagtattgatgatatacctccactgcagaagcgacacgcagaagcgtagcttcggcccatggacgaccgatcagttgcaaacctatcggaagaccttctttatcataacccacctgaaaatacaacacaatttgattcagaagattgaaaaccagtcaataagaaactatgaggaatattaaacacaattattcttgtggtgacaatggtgtatgatgattgttttgttgatttcgaatttgcaaaataccaagaaaagtatgttaagaatgaccctgacgatgtaagagaaattctcagttccttaagttgaatccaaagaatagttttatacacattcagaacccaaaaaatattttccttgaatctctctctccttttcctgagatgaactgtgaaagttctgtttttactcactatttttaatacttgctatttatttagaaagaatgtatggaaagaaaaatgctttttcaaacggttaatattggaatttgttgagaaaagtggacatcactcacgggcacagaaatggcaggaagaccgagaagatttgcaatggcgacaaacttcataaggtaacctgaacataagaaatgcataagattagattagtattcgaatttctcgttaaaaaagagaagaacgttctgtttttttcgttaccaacgtacctgtaacatgcatgtttgattctccatcttgaatagcacctggtggtatgataggtgctgtcatgctgtttcaatttcaagaaagaaaaaggatgtcattttgcttacaataaaccgaaatgacatatatagttacttgcatacagtaacggtaaagaccgtggaatctttcatctatcgaatcgaatcattcactcaataataatgttaacagagttgataatacacacccagttgttggggtaactatgatgtcaacgtttttgaatatctccatgagatgattcatcactcttctcctgaagaatcaatttagatattaattttagtgtaaccatactactaaaacatgcaatcaaatctagtaggaaattaaaatattaaaagagataaacaaacccaattacactcaaggcaacaataaaaacaacatttaacttttctttccaaagtacattctgaatctttgtatttcaagtttctacaatagtctgtgttatacaattaaaatggcggagtagctaagagtatactattaaatcggtttatatttataggctgagtttttagtctgagtttcggaagtgaccatgttcaggggcagatgtagaaggtaaagaaaaaatcccgcactcaattgttccattaatggttttaacgagctaattattcgtaaaaatattttggtctccgtctgtcgttgtaaacattacccttcttcacttcctttcattagtctctaaacattgtttatacactctacaatgctgtatagtacagtgcttaatttctgtctttctcaatcatatgaaacactttctgtatacattttctgccaccccatttaaatcctattaaagaagtaatcgaattgaagtaatattgttaaattcatgaatacgaaattgattttctgtcagtcaacacctatgatcagtttttcaaataaaataaaaactacttttggtttctctcagttgtgaatcgtttagttctgatttttccttacctgagacactgggccgccacataatctgctgcagtaaaagatctaaaaagagccatactgattcgagtatcatatgtcaatctctcaagtttcctgagggaacagattaaattgcagataagtttcgtttacaaacaaatttcaaaatgtaaagagaaacaacaacaaaaaaattactaagaacatacccgtcaacacaatctggatttagtgaacatgcacactcagatccaatcgtaacaacatgagcagtgcgcatctcatgcaagtcaggcaccacaatttctaccacctgggaatgtttggggttaataaacagattgcactgaatgttgaaaattaaaattaatggtgatgacttacattacaattgtatgattttgtcaaaagatcaagaacttcatcacatttgtcagatatattagttgaatatacatcattaaaccactgcaggaaaatgagaatagaatgttcatgccatggaaacttgataactattcagaatatggaagacgaaaaaaaaatatcgtatagtttacaacttacctctgtgtactttccgagttttaaagatcccaagatatctgaagtgtcatatgctaacaagtttggcacacaaggtggggactatccacaacaatataagagcgaaaaaatatttttagtttgcgtaattttcaacgaggcaattattataattagtaatcactcagaagataagagaaatgttaccggattcaagctaaatctatcagcaagagaggaacccaacattgccgaatacctaatgaaatatagattcaatcacaacatgttagaatagtgggattctaaggcgtaattttcttttagagaatcctaagatgtgttcttggtgtagttcgcactgaaattaatgcaaaacaatcttacactagcatgagatcctccaccgatgaagcaattggtccgataatttccacagtcccaccaccgcataaagagctatcaagaaaaagaaaatgaataatgaacttagcacatttctacctaacagtgtcaatagtattatagacgaaagagcttacccttccatgtctacacgtgcatatgttgacttcaatcccactacaccacaaagagaacagggtattcggaccgaacctgcatttttaagctgaattaagtctagaagattactatacataatgtagttttagtagtcccttcattaaaatttgcacaacctccaccatctgttccaagtgcagcagagcatattccagaagctacaattgctgctgggcccgaggaagatccaccggtgtacctatctactgcatgaggatttcttgttgttctagatccataaaaaaaattaaaaagaaaaattgattcagtaaagattgaaggaagaaagaatcaagtatatcatgacaaaaaagattcataaaaaattatagatttccttgttacaaaatcatagagcaaaactgtagagatgatcataagcgcatgagatttagaagctctcttgttttgtctaacaccagattgaattcattgatgcatgtgcaataattatcatggggtggcattggagacagcctatgttcatatcaaacactaaaaattcatgttcacatctaaagatgagtgctaagaaataaatttacccataatttggattgtttccagttgtacccatgcccaattcatgcatgtttgcctttcctacaaaaattacaccgcatctacgtagttttgaaacactaactgcatccttattgacagggcgaacctcgtgcatccatgttgatccacctgtcagtcaccatagaaggttaactggctgttattaaatagtgaaagaaataaaatcatcggaaagccaaatgggggagagtagtaccatttgatggatgaggataacagtctatatcatccttaactgccataaaaattccatccaagatagataatggattgcctgcac

SEQ ID NO: 14911 - DNA, 7304 bp, Cannabis sativa
aattagaaaagtagaagtgtggacgttaacggattttttttttaaagtattttataacatattggctaacgacaaaaaattatcttcatcccatccacagtttacattgtgttcgaagttttataaaattgggagctagaaatgttattgttttagaaatgatacatttctagctgtcatattgtcaattaatgacatcccttatcctaatacaaaccacctcccaggacaccccacccactaaaattttgtccatattgtcaatctcagtatttttctttttacaatttcatgtatttttagatctactctgccttttttttgtactaatttcttcttgctatatacagatagcccaatttctggacactcatgggttcatggattacgtggagaggggtatgggttctgatgataactgtaataatctcctcgacaagctacaagatgcaatcggcaggggccagaatcccttctctattttcccctcaaatgcagttgaacctgagattataactatctcagatcctggtggtaaaatatcaggtaaattgatctaactgttaagtgatttctgctgattatatcaggaagatgagtggtgtagctaacattttctttgcattttgggatcagatgccaaatatacctatgataggtttccatctaacattagaacggaagaacaagaagaaaaaaggaggcagatccttgcagcagcaagtggtgcctttgagtactctggaaagcatactccaaggtacatacaaacatatcaaatttgataatattatttcaatttgagtatatataggaaaattcttaagtagtgtcatacgtttaaatttgataatattatttcaatttgagtatatataggaaaattcttaggtagggttatcactcttgttcctatcgtaggggcattttctattttcggtacttaaaaactttatatatattttttatagtgtaaatactaatttggaccgtgtattttgcaaaaattactgattagactttctgttttattaaatgacaatttggaccttgtgtttttaaaaatcgtacaaaatagatcctgagcttaatttttgtcaaattaaaatttaataataacctgacatggaggtgttatgacaagaatcgttacattttttttgtgaggtttgttatattaaaaaaaattgacaaagatggagttcaatgtctattttatactattttgaaaaatacagtatccgaattgtcatttagttaaatacaagtctaatatgtaatttttgcaaaataagaaaatggtatttatcttttttttttatgataatatacgttgttattatagtaggcaccatgattgttttcgggtaattctgaataatgatttacagtattgagaagaagaaaattttagggttcatcacttttgttcctattttcagtatctaaagaaattttatcccaattttttttagaggataacatacattatagttgtagtaagcatcatacccatttttaggtggttcaaaataataatttacagtattgaaaagattcaaatagtccactgttttatcattatcatttttaaagttaccatagtatcaatatatatatatatatctatatatatatatactaagttgatgtaacgtgcaatgcacgtataattacttaattaattttatttttaattagatttaattaagtgatgttaagcgcaatatatatatgttcaatttttttaattaggtaatatatatttttttttaatttgtcaaacagggtttgagattttgatctttgagatttttttttagctattgtggctatattagtgtgctctttagatgattatatatacgtattttatatgtacaataaaaggatgaagtatcgaaggagtacgaagatcgatagatttcttatctaaatgaacatgtggcaaatcatataaatcaatgactattagtcatatatcttccaataaaaattaggtattaacaacccattattcaacctaaaatgaaaggaaataccaaattcaatagtcattgcatttattcatttgttaaattggtgatgatatttgagtaaagtaaataattcaaattcaataattaatctgatgttacatttaatttgatatattattcttttcttaaaaatattaaaaaactaataacatgttttataaaaaaatatcactcgcaaacctataaaaaaatttacttagagaaaatttggattctaaaatgattattttcacattttacattgtttttatataaaaaaaaacataaaactacgaaaaaataacataaaaagtgttaaattattaatagatcaacaaacttgttaaaaaacatttatatatcattcaactggcctctttctctttttcaaaaaagaaaaaattattcattttaattgcaatatgtgttcttagagatgaaattaatatattatttagttcatttttctctaattttaatcttgatgcattgaaatattttatcattaatttatctatatttaaaactcttatttgtaaatggaggaagaataaagattctgtgttgataataaaaagtgaaggaaatattttatcattaatacatgtatttatatgctgttgacacaagattaatgctgccttggttcctttcttgtcaatttttttttttcattgctatgaaaaacaacaaaaaaggatgagattttcagaatgcaatcaaacatttacaaaattaaaaggttcttatttcctgaaagcaccaaatcaacatgaatccgctggagatccctcttttatacaataattagaaatattttcttcagtaataaccatcagaggggacctaaccactctcactgaaaagttaagaatatgaagcttcataacaacctaatgttctgttttgcttggttctagtatgcacattggacgattgcagaaattttgaagtttttgtgtacatttatttttcttttcaaatattgattgactgcgatatcatgttgaagtcattttttgccccttctggaaactgtattttggttcagagatctctagtgtggctcctcattttttctttcctttacagttcaccttcctttctcactaaggactctaaagcagacagcctaagtccaatggagagggcagtaagttccatatacatccttgtgttgcctgagattatgatattttaatgttagtgttctagaaacttcattgtttattttcacaggctgaaagggatcgcatggttttagacataaaggttaagctgcaggtaagacattatttgtctcactgttagatcaagtagaatagtgtatgaataagatggctgtaaaatattgtctttgtgcttgtttcttctgcattgtcagtccttgaaatgacatcccattacttgatttcatattttggtttcagctcaagtgtatacaatattatgaattgatacaactatactctattaacatgctaatatttgtagaaatgtgcactgtaggtatttataaaagtgtcactaatttctatttcttttaatgtcctcaatcagccaagactctatgaagagatgtctaggatatcacaaaatatgcattatttatttatttatttatttattttgttcttaagaatattaaaatgtacctagctcaataaaaggacaaggtctaactttatcttgtgaatcattatcttctggccaggctagtgtgagtttacatgtacatacatttatgtataattttatgagcgccaatatatatatatatatatataaaatatttaatttgacactacagcttttaacttgcatgaataatatattttttataagaaacaaatcataacacacaagtaggaagtttcattcaccgatcacatcaaacaaattctcatcctactattttcactactgaatgaaatattctacgtttatactcatcaaaaccttgcaaagttttggaagtgtcacgattcatttactacagttaaaacacaatttgtttatatgatgatgttattcagcacctttactatcacaactcttaaataaacagggtctgtggttgcgtcttctcaaattgggagcaactgaggatcctctttcatcatttgaatatggcacaatccttggtaatttaatgtttttcctttttccctgaaataaaattatactatacatcactttttatttttttattttagacaaatgatttgctacatgcattcttcatgcgaagctattgctgtccgaacattgtgtgttttttttttcttctcattttcatatattgtgttgtgcagctttaattgaatctgatgctgaggggataggtgggagtgggtttgttgaatgtatcagggagcacatacattcagtacgtaaatttaatatttatataggaatggatttctttgcccaatgcaacatttatgctttattaattcaatgactattttttcccagggatggcattgccagttaacggaggaacagttcattgctgttaaagaattggttagaattcttctcaggattcatctgtttcctttgcaacatgaattgattgagactacatagaatctgtttcttttgcaacatgaattaattgagactacataattttcgacattaatattttcaattattttctgtcttagattttttaactattaaaacttctaattattcaaattatacatagattcatggttcagttaggaaattattacttctcctccatctgttagactatgcctttcaggactgaatatgattcttatctacactaatttgccctattttctttgtaatgatgagttaccatatgttattctaatgttttattgtgcctaatgaagctcaaaacagcaattagtcgtgcaacttcacgcaatgatatgttgaccatcagagatgccattgaagtgtctgctgaaatgtacaagaaggatgcaaataatgttcaagactatatacaacgtcatcttatttctttatctatctgggaggaattacggtaagtgttacatatcataattgttgtacagatatgaaaatccttctacggtcctctttcttttgtcttggcaaatgataggataattcctacacaattagaataaagagacaattgatagaagaaaatatggggaaaacccctactgtattgataatgccagggaattcgagagcctgacctctccttacaagaaaaattgcaaattacaacttggacaataacccactccaatttccactaactcttatgtaatatctaaggtgcactatactagctgcactacccccgacactaaaataactcatgtaactaacctgccacatcaacaacccctcttgatctctccccctttaccctttcttgagtacacaaatgtaattggagggctatcattactccaggcccaaagatgaaccttgtcctcaaggtggaagtgagggaactgctcctgaatagtgttagattcgagcaagtgacaacactggatgcgagcgtgagtttgcaccttccgagtgccaagctgaatatccaacaactttgctggatccaaagtccattcaaggtcaacggataactccttagtaattggaggcctatcaataccctcgacccaaagacgaacctcgtcctcaaggtggaagtcggggaactgctcctgaatagtgttgacatcttccaagtcgctttagattcgggcagagcttgaggttgcaccttctaactgccacactgaatatccaacaactttgttggttccaaagtccattcaaggtcaacagataactccttagtaattataggcctatcattacacccgacccaaagacgacgaaccttgtcctcaaggtggaagtcagggaactgctcctaaatagtgttgaaatcttctcaagtcgcttcagattcgggcaaataacaccactagatgagaacttgtggttgcaccttttgagtgccaagctaaatccaacaacgttgttggttcccaaggctattcaaggttagtagataactccttaggaaggtagctgcaacttgtatgctgctggaccaatgcgagctagcacaagaaaaggaccaaagaagcaagtagccaatttctcattcggccgtttagcaagggagtgttggcaatatggtttcaacatgatataaaccaattcacctacgtcaaagtgcacatcttgccttttcttgtctgcttgaaccttcatttgttttcttgtttgcttgaatcttcatttgttgttgagcttgctggagattcaatttcaagatgttaagaacctcgtctcgagctaacaaattctcttcgactgctgaaatagtagtgctggtaggttgaaagcgcattagaggaggagggtcgcgatgatatagagctttaaatggggtcatactagctgatgttgtaccaatactcaacccaaggcagtcacttcgcccattgagccggcttgacactgatgaagcaacaaaggtacgcttcaaggctttgattaacaacctcattctaaccatcacattgagggtggtaagaagtactttgctgtaacaacgttccttgcaagcggaaaaattctttccaaaagagactaaggaaaactttatcgcgatcagagacaattgaacgaggaatcccatggactttaatgacctctttcacacaaatggttgctactgtagtggctgaataaggatgacgaagagggataaaatgggcatactttgtcaagcgatccacctctacaaaaacggagtcaaaactatttgatttcagaagcccttcgacgaaatccatggaatatcctcccaaacctgatctggaataggcaacatctgttaaagtccagtaagtgattgagccatatatttgttttgttggcaggtagcatactcggtcacaaaattttgaacatcgatttcgatctctttccaatttaagtccctagccagccgctgaaacgttttaaacacccccgaatggtctaccacgttggtgcaatgaatataagatgtagatggaataacaaactgacctttgaacttcaaacaccccttgagtgtatgtaaaaccaggatgagatgagagtgaccttgttggagcttgcaaatgaccctagagagagaaggatccccagcaacaggagtttgcaagtccagaatggaaatgagggaagggactgagatagcattgaaggtggcctcttgatacacacgagacaaggtgtcattagccttgttttccaaac

SEQ ID NO: 14912 - DNA, 9984 bp, Cannabis sativa
agtcactaaaataaactaaaaatacttgagaacaaagctaatttaatgcccaaaaagatataaataactctattttcatagagttatcatcaggatacttttatttctcccaaaatgagcaccaatggttgagcggtactacgaacaaggaggtgtctaagatcggtggtttccttgaaaattactacttggtcaaagaaatggatgccgaccaccttttttccaacagattccctcttactgccgtcctcctttcaccttgggtctaaggtcaagagctcaagcaattcttcaactgttggagttagctcagaacatttctctcctggaaattatgggcaatttcctcaagtacggtctttacccatctaaggagattcaagaatccgaaaaggtagttgagaaaattaccaatgagcaagaggctctagaaaagaagaaaacccccaacggcattaggtgttaactgactggtctatcaggatcaggaatgaccccgaggtagccattagtcctacctcccctgtaatagggaaagggaaggtcatagtagtggaagatgatggggatttttctgacgaggatgctttgtcttttcttgtcgggagggtgctccccctgaagtctagaatagttattgctttacttatcttgtttattcttaatttctcatatttttaacaagtgttttcttttatgtagccatgtcagagaagataaaatgcgcactcaagaagaggaagatgatgcatctggccaaaaatcacatgccaaacgaccaaaggtgtatgctcctattcccacaagcattgtctcgagctccaaaaaaactcaagtagaagttgagaggagcttgagggttttcattatggacatttctgagtcccttcctccggccaagaagaatttaaagaattaacctccatccactctgaccaaaagctctaaaggggctagtactgaatggcccagcctaccaaagccaaataacactctgcccaccatccaactagagacaaagaaggctaaagagatgcttggtttctaccaagatcgcttaatggtcgaggcaacgagcaagttactggggcgtaagatatgcccgtcgaacttctggtcggcggagttctaaaggagattatcagggtacactcttttttcagagttctttgtacgggcttttttgcccaggtaatttaacttgtttgtttctctttctaggctaaattaaagctggcctatacttattcccgagccaagtctacaactctaaagacttgtaagaccaccaattacttacaaaaggcgttggaggaggccaaaaaagatgttgagttgaaagtccaacaactagttgagctaaacaagcaactaattgttgcgaaaaagtcaattgatgacttaaagtagcaaagaaaagacatgtcgtccactaccaagctcaaagtagatcttgagctgaaattcaagagggtgtgggatctaaccgaagtctattgatgacttaaagcagcaaatagaagacatgtcttccacaaccaagctcatagtagatctcgagcatgaatcaaagagggtgcaagatctaactgatgaaagggaaggcctccgcacactccttcagaaccagaagagcaaggtcaaggaattgactgaggttattcaacaaaaagaggaggcttcactgaaggagaaaactgccttagaggagactttggatactgagcgggaggagcatcaaaaagaggttgaattgcatattgttatctcgggagcttagggggttaatgttatccctgtcctcggatgacttgtacgtggcaatcacataagggtgccacatcggattgcatattgttattttatgttttccccttaccagggttacagaagattttgtaatacccagaggctctccttgcgagcaaatgcggaaaagactccaagattctcatcgaatgctcttgctatcggaagtacgtaaaagttgcacacgctctaggatggtagcgaatcagttgatccaagaaggccttagctagaccttcctggaactccatgatatctaatccgaatttaaacccaacggttgcatatcttctgacaccaaatcagatcttatctcccgcgtcagaccttggtagtgtgcgtacatgctctgtagctcctttttacccaacaacttgtttatacaccaactttgcaaggtgaaacctttgggcgacacgggtagtaagtcctacaaattaggatgtcacagttgtgcaccacacgattatgaggttccctagccaccaacggtcagattgttaagttgtaatcactagctaaagaaacatgttgagtacgaaaccctaggtgggtgaaaggtatgccctcacccacgcatgtgcctatgaatatccctatttatcatgtagagagggtgaacctatttcttacttacaaaacctctgtcaaaattcctagagaagctttcttcttctttatgagaaataaaaggaatacaaagttatcattgtaaacacttataataatcaaatacttgtcggcaaggctaatacaaaggacttgtggacaagggattattaacgcctgaactgcgtacaaaccatttttctaatatttattgttttatattttccttaagctctaattaatcggtttctaaaaatctcggtaaatactatacaattgattattaaagcaatgtggtggaccaaaatggtgcatttcttgagtttattctgaagaacatggaaagccaatatcccaagaccaatcgctcgtaccgaccacatatgaaaatgatgattctgctttcgcaacacttcgacaacgatcatagcagcgccgaacttcgtggcttggattgtaatctcacctcacctaccatcttcaccatcttattctctctcgcaacccttatttcaggtaacaattttcatatgagaagaacatgcttggaggttccttgggggacaaagcaactaaagatttgacacagagttcttgttccactacgttcacgttatgtgaaaggatttggaccgtatacttatgttgagaaaattatagttatgttggtattttaaacatatgtttatttactaacttctagacaattataactatattatgcatgtataattagaacaatttaaattatattttattgtgtaattatttataattaagctttcttgttttattttttattttttatttattttaatttaaaaattattgataaaaaatttaaattaaataatattaaataaaaaataaattacaaagttttatcagcgcattattgtactggaaaaagccaaatatccatctatcaaaagtgactttctcaaagcatctacacactggtaaaagcttaacttttgccagcgtgttaatgcactggtaaaagtaagacttttcccaacgcatatttgtgttggaaaaagttaagcttttatcagtgcgttaatgcgctggtaaatgtaagactttttccagtgcatatatgcgctggcaaaatttagacttttaccaacgtgctaatacgctggtaaaagtaagacttttaccagcacatttacgcgctaggaaaagtcatttttaccgacgttttttattttgcgctgacaaaagttcccatagcaatgcaaatttaccaactctttttgccagcacaaaaatacgctggcaaaaataaattctgttttaccagcgcaatacccaacctttgcaagcgcacaaaagtcttgtttcttgtagtgtattgtgtaaggtacataactgaactactaacaatccttcagtggcaaaaaaaaaacttgttatttcaactactaacagcaatttaatgacgagcgattgaagaataaagaagaaccaacaacgaaataaaacaaaatcatgtcacataaataagactaaaatattcaaaatcatgttacacagacaagactaaaacactgaaaatcatatcacatagacaagactaaaacacataaaagtatgtcacagagacaagactaatcatagttgcaaaacacaaccccgaccaagctgtgcctaaagcctagggaaggctggagaaaaaatgcaatctacgatagctataaatttagggacgagtaaccctaatttttcttggtaagtaacacgttgagaatctataattggcccgagaaaagaatattaagctaactaataattataatattagggtttgttgtgttaaaagtaaaaatgacttattttgatgcgagtatagaaattttaatttaactatcctcaaaggttcgatatctgttgccgcatcgggagagtccattaatttctagaggcagccttggatgccatggatggagtattaagagtttgtggaattaatcaatagtatcagaaacagaagattcacaatacaatctctggcggatgtttcaacaggcaatgaatggaacgaggaactgatattgcaaatttttggctctgagttggggaaccgcattctcaacattccaagaattccttctccattctcagatcaggtgtactagaagaacaatcaaaaggggtagtttttagttaaagcagcttacggtgtggaacaatcttggaggtttgctccagcaaaagacatttggaagtgaatttgggatgtggggatccatccaagtatttcagtcttgctatggagaattttgaatgaggctatccctactaagaatagactgcattttatttctgacaaagaatgctgcttgtgtggatttaaagaggaaagtgcaattcatttgtttcgcaattgcagcttttcaaaagccctttggtttggaggaagatttccgatgaggattgaagacattccaggagacaacatgatcctttttatggagaatcttatctcgaattcgctcggagttaataagaatgagcttcttgcattcattggatgcctcttttctgaaatttggcaacagaggaatgcacattgcattgataatgttcctgtcaatccgtcctttgccatggctagagttgaaaaagctaatctggaactccagaatttgcccatccgcaacagaggaggagccattgagaatgatcctgtcattgactgtttggaagcccctgttattcccttgcgtccgcgcgaagagaaggtgagacatgttttcttcacagatgcttcgtgggtcctaggggaagctggcattgcaacaataagagttgatacttcgactggaaggtggtttgttaaatctcagaaaattcgttcgcaatttgccttggaagctgaattcaggctattctccttgctctgtcctgggctgtcaagttaggttggcgtgaggttcacattttctcggattcgaagatcgttgtacaagctttaacaacaagatgaggaacccctgattggaagatgtctagtgtgtttttttcaatagttaatgttactaaaaagtttcatgtgtgtaagttcttttttatcaaccgaagtcttaatactttggcccatggtgtagctaaaaacgctagaattgctagtgaactaactattttgtatcaaggggagggtattcttctgtgattcacatcttactttcttaattaatgaacaagacgttctttcaaaaaaaaattagtataaaaatttaatctattttttttcaaaaaatgaaaacattaaacaataataaaacatttctttggcagcaaaaaaccagatcacatatttatttacatacacacaaaatacaaccgtatccttatccaagtttaagcttttctaatttgatcataactgttctgtcttgtgttctatggtgaagtgatttaagttacatatacaaactgatatgttagcagctatttcttcttctgcttctctccaaattttcacctccgccgccgtagcctctcgccgccggcgctcgcccttgtcaccggctgctacgtcatgccgatgtcactgctctctcacagacttccgagagatgtcgacgcaacctcagacctccataaacgacaccgttcagctcccaaatatagacataaacgacgacaacattgagaagaagaatattaaacgacagggactccatgaaagcgaagaggaggaagaaaaatggatttctaagatacaagtacccagacagaagtacatacctacttccaagactgagcttctaagcggcattgtgtcgaacatgttccatgctactggcgatgtcgatgatcaattggaagattttcttcttctctcgtcgtaagtccttgaattcaattatggcttttgcttggtttttttttattattttattttctttccatggtttaattaattttgggagagagtgttgtggaaattaaaggtgtttggattccatcattcatgctgaacacaagagtgttttggaagaaatgcgctctgattattttcagcaaacggggaatgaagaagaaggctcggctgcttcagatggacaagtttttgataatgggaatggaagaagtatagaagacgatcgatatggcgctgaagaaatcgaattcgaaaacccaatttcgttcaattacgttttggatttaaggaagttcctgccttctccttcacctaaaaatgtcaaaaggtttgtgtgtttgtgtttgatcgagtttaacttaaaaataacattaagcttggttgagatgaatgaaatataagaatgagaatgagaataagaataggaatgaaattaaatttaaaatttaaaatgtataagaataggaatcggaatggcaagataaattaattttttatctttgaattggaatgattctattttaaaatggaataattattttattagaatgacatttaaatactttaataggtaaccaaacaaaagaatagaataaaaattattaaaggatgaaacttaggaagttttatgttgtaaaatgaacgttacaaaatacaatcttgttttactaaattgtacttgtttttttttctgtgaaatcttacttgtattttttattgggtagagttgctgttgccactcgttttcagcgtgctttcatgcaacttcttaatgacgctcagtttgaagaattatcagctagagatttgatgctgacttctgccctgaactcagattatctccttactttacctatatatgttgattggaaaaaagctgctgaatccaacgcaataatattcaggtgatataacttacttaacacttcatatctcagctctgttgctggtagtttaaggtttaagatgaagtctctacaagtgtacacattataggctacagctactgacctctcctttactttacacttgtaattttcatctcatagacggggatatgcaactgagagacagaagggccttcttattgttgaaaagctagattacctgcagtccaagcttttacgagggatcttcttcactatatcaaaaccattgggcaaacttggcagcttgattatcgaggtcactctcatttttcttttgtgtagtatggttttgtgactttctcattctcacttaaatatgctattttataacctctgtatggttaattttcttcttagagtcttttacgtcttagaatgattagatttcctgagctttccttttgattaattataggctttcaaaagcgtttttcaaacagaagaagcacaagattggactaagagatttgagctttggctcaaggacctaagtactttccagcaatcattacaacagaatgaagagacttctgatgacctgctgggagtagatgagttttcagagaaggatcttccaatatggcttgcagcgcaaagggcagtttcgcgttatgaagggcttttgtcaccagttggccctcgtggaaggctcttaaaacagttgcttacttttgctggacttgtttctccaacaccagaaacaccttttgagcttgatggtgatactaatgcttctgagccttataaagggtttgtgccacgccaacacctttttttctcccttctctttctcttgacaatctaatttttttttcttcggaatttcattatcaagtttagttaagtaaagtatgtcctttctgattctcaatgagacataaaagttttccgcacggcagttttaaccacataagtttcaatcccagattaaatcaatttttctgaataaaaattaactcgggccgatgttgagaactacgtgctcaagaaagcttttaacattggaaaaataatttaagagactggtctaggacttagcaaccaaaagaatatgaaatatgtaccatatgatctgaaatatgtgtatcctcaaatatgactaagttattgtagaattatttttttcccagacctattttcttatcaaggatatcacttggagatatttggagacctgctacaagaaaattctgtggaaacgatatttggaaaatgctgaaaacttcagtgtccattttattctcaaagtctgttctccaggtatgatctcatacaaaattttccactaataggttttctccttaagaatgagaattaatcttcttaggtggcatttggttggaagtaatgaaatggaatggaatagaaagaaaacaattttcattctatttttttgtttggttgcattttaaagtattggaataacattccaatggaatgcgctttccaccattttggtgaatgactattccattttaaaatagaaagaaataccattccaatataacatgagaaaaaatataataatttttttattattattttttatgcattttaaattttattccattcatattcttattcctatttctatattttcattcctcccaaccaaacgccagctaagtgttcttttacttagactaccattttcttttctgtacttagtgctgttttttgttatttcctactttcatcccatttaccataattttattatagccaacaagcaaaaatacatgaatgaacatgtgtttatatttctatgatttcttatttgaaataaacaatccatcataatatattggctaagttatgttttcttaatgtcttgcttaaaccatacggaaaaaatgtcttgcttaaagttttaacacagtatatccgagatttttgagaatatactcacatgatactattagaattagtcccacattactaatatgtagaaataacatatcatataagatgaataggctactcatgtagaaaatggtgaatcaactgtgtatattattcatgtagatggcatatatttatacgaccctattttctagcgaatttaagataatcaacccgcaccctattcaaagcagacaatctactaattgtcttccagttttcacgtcctttagagataagtcttgttgaattttctcacgaacaaaatgttaatctatcttaaagtgcttagttcactcatggaacacaagatttgaggcaatatcaagagtatcttgattattacagcataattttactggtactgaagtcttaaaccctacttcggtcaaaagttgatgtatccactttacctcacacaaattgtgtcgtagctttatattcttattttgcattggatctagacacaacattttgcttcttagttttccaagagaccaaatgacccccaataaagacacaataacttgaagtggatcttctatcacttttggaaccagcacaatcttcatctgagaaatactctatgggtgtgctcatgatccctgtaaacaatatctcatccaggtgctcctttcaagtaacacaaaatttgctctaaggttgcccaatgatgaattgtggaagataacataaactgactgacaacacaaactgagaatgcaatatttggacgagttacaataagataattcaactttgtaactcattcgcgatacttctcatggtcttcaaatggttctttatcactcgttaggtaaggttttgctcccaattttcttg

SEQ ID NO: 14913 - DNA, 4608 bp, Cannabis sativa
gcactaattttctattttctcccttaaatatataattaggaattttgtcatttagttttttctcccctttttatgcaaaaaaaatacttgtatagatagtgatgttatatgtatttgtatacttgacgttattatatttagtttcggctagctttaagtataaattctcataatcaacagattattttgaaaaatgaagggaatacaacctataaaacatatttgcaataattactataatttggagaatttatctgagcacaaaactttacaatgtcataatttgagtgataaaaatcctatttattaataataataaataaaatggtttagttaagtatgggaaaataggttatattatatgatgaatttaggtttggtgacagttaggttgatctaatattgaatttggttaattttgtactttctgttttgcctgatcttattccactatacttctgggtgtggtcctgagttagtcatcatgaccacgtgtatgggggtgttttgtcattttttttctgtaaatgtctatcagaaatataattattatgaaccttgatcatggctcttctccatggatctgaatcaaagcttgtggagacaattatactgacagggtgttatctgtatatatgtatatgttgtgttgtgttgagttgattatactcagaaattgcagtgaaacattttggtatagtaaactctctaacttagcaagatctctttccatatataatataaccttgtactcaatatatagtactaatatatattgatgagttgtattattgtattgttcatacatgattaaccctaatgattaattattcaactactagtcatgtgtagtaatatgaaagctacataaatcaatcatcattgcttatgatatatgtatatgtatgtgtgtgtgtgtggcctttatctaagattatatataagtcaattttattacaaccaattacgcgtaattccattattatcatatcatctaataaagctgttcttttgcaaaatgtcaacattaattagctaaaattgacatttatcactgtggccagatcctgatgattagtgggtctctttcaagtgtttttgataaatacgttacaatatataatatattattattggttaaaaataaagcatgttctcatttccatcaatgtcacaaaacatgttatagtttagtacaacatcagttactaaatgtaggaaagaaaagagcagaaattaagtgtcagttttcattttccaggggtaaagtttgtggcgaatgcccaagcattgttgttaacagggtcagccaagtgatcagccaagttctctataggaccttttccagttacaatggcttgaacaaagaaaccaaacattgagaacatagccaatctcccattcttgagttccttcactttcagctcagcaaaagcctctgggtcctcagcaaggcccaatgggtcaaagctcccacctgggtacaatgggtctgtcacctcaccaagtggcccacctccaattctgtacccttcaactgctcccattaagatcacttgtgtggcccaaattgctaaaatgctttgagcatggaccaagttagggtttcccaaatagtccagcccaccgtcgctgaatatttgagacccggccttgaaccatactgcctcaccgaacttgaccccattgcgggccaagagttcggggaagacacagcccaaggccccgagcatggcccaccgtgagtggatgacctccagctcacggttcttggcgaaggtttcgggatcagctgaaagcccagctgtatcccaaccataatcgccagggaattctccggtgaggtaagatggagcttcacctgagaatgggcccaagtacttggcgcggtctgggccgtaccatgggcttgaagatgaaactttcttgggtttagctgcggcctttctcatggtggttcggctctcgcccatgagtttagatggggaaggagcaagcctcacagcttggcctgcaaaagatggagaggagagagccattgttgaagaagccattatgaaagagaattttcaatggagaagagactttgttctccttggaatgatatgagtttgtaatactatcagtgtctttagttatagtgtatatatagtttatttattttatcctttgaatatctttatctctactctcattcgtattaatgaattgtttgattatcttttcatttttttaataacaaagattgtctttgttgatttcccaaactctagaggtttagctgtagccaatacaatttatccacgtgtcctcaggagatgacaatatcatctcttgagcttatgagttaaagatgtaaaagataaggaaagagatatcaataggattctttgagataccctttttgtttccttttctgtttttggttacacttgttctacaccacacaacaccaatataccatttatttattagaggacaatataaactaactaaattttaacagcaaaagctgtgaggattcttcgatattgttcactggcattaatccatttttcttccacaccagcaaaagcttagcttgtaaatttaatttcttaaaatccatcttctttttttcacctttcattcatagagtctaagcttaacttaactgagctctccatgaaataaatatatgaaagttgaaagcctactcaaaaatggctcttgttaattgttatattattattaactcaggacaagccaaaagaggccactaaacactttctttttgcttaaatggaaatgaaacagagccatctagttacactctttctaaaactctaagaagggaatctgatttcatggtggtaaataacaaagccaaatcaagaactctttactaacctacaagacatctatcatcacaaataattgaaatttcagcatatgaaagttaaaactcagttaataataatatacttaattacctacactacagctccatttctaatcagatactgataaagccaccaaacaagattcaacagcagcatcatccaggattactgtaaattctgtacaaaaatacacataataatgtcagtactaaacatggcacattatatagaattcaacaaatcaatgaactacaatctagagctccatgcagaagtaactaagagcaatgtaccattgaaattcaagaggttccattcatcaattcttgcaaagtggatgatttaaatattcgaagaagcaaagctttttctttctttcccaacttgtgtgcaccgtagcgcctaatgacaccgagcttgagtgcttctctgccttcttccacaaccttttttctcacatccattagtaaacctgtcccttcacaaccattgtccttctcctcttcatttccacctttctcttcccttgttgatactgcaccagtggattgaactttggcgagttcttgagatccagctccatctttggagttagagatggcttcatgtccatcaggaaagctagttcctccccaccatttataagacacagttgataagccctgagatggaaacccatgtttgaattcatccaaggtatgatgaatattattaacccctttagtcaaatttgtggttagcacattttgggatctcacaatctgaacattcttgcctccttcatgctgcaagttttgagaaattgtatttgaaatctgtgatttcgacatttctgtactcaaattctgaggatgactctactcaaccaaagaataattcactgaaaacagaaccaaaaaaaaaaaaaatacaactctgtaatctgtatccaattactttagttataactcatactacaaattacaatcttaagtaaaccaaacttcacaaaaagaagattcatacatacatacatacatatacaaaagactaatggagttcaaaattcaaacatagggtttctcaaataaatttgtaactagagaaaaaaaaaacaataaaaaaagtttaatcttacagaaggagaaaaattgaggcgtcaacagcggagaaacccagaagcgcttcttcttctcggttccagatatctttgttagaggaattttgtagggttttggcttaaatcagaaaaacaacaaagtgtaattgaaaatcatgaggttggtggcgccaccgtcatggaaatggaaatggccggcggcggttagaataatagcggttggcgttggtttagagagggaagaagaaaaagaccatttaacttttaccttaaatttttttttttttttttatttggagaaaaagatagaaatgagtttgattggtaacaagtaaatatggagaaacataagaaagtaattttttttaaaggtttctagcaactttttttttagagaaagaagagtgttatattaatcaatgaaccatgttaataataagagtattggcatatgtaatttatgtcattttcttcacaatttaatttagggtgtgtttggaaataactgtgtaattactagagcgataattacacagtttagtaattacacaatattttaaaatgcaaggtgtgtttagatatgaggtgttaattacatatgattttctaatatcttgtttggcaaaa

SEQ ID NO: 14914 - DNA, 9355 bp, Cannabis sativa
aaagctttttgtgagacgatattaatatttagaccactttactacatgtttaatttgtgtactagcaaagatatcttatatttttgccacactatgtctaagccgaaaatgatatctagtgaaaaaatatcttaatattcttattgtgagaggttcagaaccccttaaattaacttttatttctctagcatctttcattacttcaagccgccaaattattacttaacttaatatgtttcccatgtaaatttgaaagacaaccaatatgacctcataatttacaagtcaatcaacagaaaaggctcaaccacatcaagtgaaatgtatggtaatactacatgtcgtactcttgtcttgctttctggtttctgttccttgaaatgtagacacaactatcatactacacctggagaagcacaccctctaaaccaaagcctgaccaacaacaagcaagcattggctgcgcttctggtcaaaaggatcaacataaaaagaaaatgaatgaaaccctaggtttctaagaggggaatggaaaaatacagcaacccatgagtgcaagatcatgtttcttccatatgcatgttattaagttagaagtgttattcaaatgacaattaagtcctatcacctaaagttataatcagatggcagaagtagtaaaacaatggtcgactttaaagcagattatgagattttgtgtaaattcctttgaataacaagaaaacactttgtatgggtgccttggcttggcagcttagttgagtacttggtgtttttttacaaactcagtaaatttccaatttcagaaatattagtatcagtttgtttctcattttcttcctagaaaataaacaagaataaagagcccgctaaaactacaaaccaatgagatcaagtgtatccaatttcaaaaggaaaaatatgagcaagtgttatttattactagcagaattgtcaatttagtacaaatcgtcaggcgtggacttggtaattatacatgggatggaatagcaaaaagtgaagcaatacaaaggtgccgcataattggattcttaactcaactgtctacaactgataactcttaatatcactcaccttgagaaaccaaccagtctttagtgtccatctctataccaagaacatagtattgtcagtgtcatgattgcttcagtttcagcaaaaaaaattaaaacctccgcctaaaactttgcctggctcccagtcttcaattaacaacattcaactgcctttttacgaagtatgcctgctttgctaaagcagatgtatccataaataaaagtaaatagaggaattttatgcgtggctgaccattaaatttcgtttgcagcccctgatgaaaagaaacgctctgcccgattgatgaaactgagaggtaatctataatgtaacatcatggaggaagtttctaaagctgacatattaggcttcagagccacttcttctaaattctttgttactttacagtccctatgatttctcaacttgccattcctcgtgctatttcctgagccattaagcttcccgaaaattctagtgtttcgggagttgtgacggacagaccttggcggaacatcaacctggaacttcttatgttcaatactcggctgactatcactagactcatttgcagggcaatggtcggagtttgaattataccggagagccagcattttcctgcaagattctaagagggggagaagcatttctgtactaatttcctgctgaactacacccttgttctggtcacacccataacaagcagcaaccagtgtactagctataattggcatcagctccgggtcactgaagaatacgaagggtagatcgcatatctgccccatccaactcaacaatcaggatttttatcaataaatttttcagatgaaacaaagcacatcaagtattaatataccgaccttatgaaggatagtaggagtctttccccatcgaagaacagcttgatttcctgggtggaacagcgcaaagtgaccaagcagtgacagagattcaagaagaagcataccaacctgatacatttattgatcaagaatcagttgtctttaagacaaggaaaaggaaaacattgctaaaatgtattacaaaagaatataaatgtaatagcattacaaccacaaactggatcacctgatcactagctgttttccacttgttggtgcaatgggataggaggaaactcagtaaatggaaaaactccattttcaggtctggccttgcctataccagaaaagtacatgtgaatgagtaaatttgaatggagctatacgaaaagaacttcaacacccaatataaattaaataactcacaagcattctctgcaaaaatttaagatccaaaagagccaaattattcaacaccttcagaactccagttgccacctcctcaaaatttgagggtaggatacacgaggcctgaaacgagacaaaagttgctcataatctggacatgacaggtcaagaacctcaacaagtgtcttcaaatatcaatataacaagaaaattgagtaaacaggacataagtgtaaaagatgcaacctcaccacccacaaaattcaagttaacatgtagaaaactaaagatgctatcatcaaaatgacttgacaataatatatataacataaaaattacaatcaacagtggcacattatgggtgcgattctatgcgcacgtgcattcatgttctttatgatctcttaaaatatccagttatccaccaagttccccactcacaccattagtgaagtgaattgtatttgtaggtaattcctgattaattgtcattacactctaatttctacaacctacaactacacaaaatgtggataagtgtttcagataccacacaaaaattaaacaaaccacagatttcaacatttatttgcatgcagtgtatttccacctggcagcgtagttacctgttcagaagacaacctattgtttgcctgcagtaacgcagctgtcaacacagaaagaagactgacaagcccagtttctgagatggcagaaagaagaaactgcacaggttgctccaggttcagaacattatcaagcttttgttctactctaacatcaaccaagtttctctcatccctgtggactggaaaagatttaatagtgtcttcaatttgaattttctcagattcatctggggaatctgggttgtcagtgatggccttattttcttcagcagaagaaatagtatgctctttgtcagtatcccgtgtagtagattctaacacatttttatttatcctatatgattcatctaatgtcatatcttctggtacatctggtagatgtacaactttacttgcattcagtgtagacaatggagtcctaagatactcagagttatctaccagaaatccagcatccacagattctgcaaatttggtctcctgacttctattcagtaataacgtctcagtatttaaatattcccaatcaatcacagaatttgtttcaggtctggatgtcaaaaccaccaacaaatatatgcttaagagaatagaagaagggaagggagatccttccacttggggtcgatcataaagagcaaaaagatcacgtagtctgtgaataacttggtaggcagtcaatagctctagcaaaccatcccgcatttggagctgttgttcttcgcaatttatgtgaccgattattgttgtcacagtccataagaaaccttccaatacttcagatattgattcaaattgttcagctgaagttttgcttgaaggcaagctagtattaccaggaacatttagagatgctgcaatctttatatagttctcaagggcagctgacagcattgggatgattggaggtaagagattctgagcaagaaaatagctcctgtttgcagccatgaacaaaacaaccttcaaaagctttagcagatgtattgtcacttgccaggcttcaggttttgatgtatgagaagcaggcaaggccgaagctacaaaatcaagaagaccagcttggcgagaagcctgtagctcagcatcctttccctctacaaactgattcccaaaagagaaataggttaagaaataactcttatcatattacacaattatcacaaatacataataaataggggggaaacaaaatttaataataaacaagttgattttagctcgggagaataaaataggaattgcgacttcttaaacttgtgaatgtgaatactaattaattaattaagcaacaaatttatagctcccacacagataatacaacacagccagacaaacaatatttaggataagtcttccctacaatttcatgcactagcttacaacagctcttgaattaaggggtttcagatatctggaaagaagctgatacatagtctttgaagagagacaggaataccttaattatctcagctgttattaatccaatactcgcagctccttcttttcttgcctgacgaagcctttgaagctcttgaagccaccttccaattttcacccttgcagttcccactgttgttctatacccgatactagtattttctccaccaacaagaggttcaggaaattcatactttagagccataagtctttgtctaatttttttaatccttcgcttcatcgaatgctgcaaggtgacattatttgttgcaaaagcagaacctactaaccctgacaaacagcttgcctgattttcttcaccagggttagtaattgtagatttaccctgaccctccttattcaaagaacggcgtaataatggagaatgatccctgaaatccattgaagctctctctcttatttgctccaggtagaactttcgacgttgctcactttcgctaagtttctcagccaatttttgggcaagaagctcagcttcttcttgttgagccttggctctttcttccctccgacgaagttgttccaaggcccgtgcctctcttgctgcacttgatgccttacgttcttcttcccttctaaattgagcctcttcctttctcctttgtgtctcagcaagacgctgtaacttttcagcttcaattagtttcctacgttctaaaacagcctcttctcttgccacatcctctttctgttttgatttcataacttgaagcttctcagctctcctcaactcagaatcgtgtagtttttgtctcaacataagcttcttattctcttcatttaaagaagtaataaaccgaacttcattaactttgctgctctcatcaccagctctcttcacaacttgagctagaaaagcttcatgccgagatacactgcgttgttgtcgagcatgcattccttcacgtaacttcaagcttcgaacagcttgccattcacttactcggtttaacttttctgaagttcgttgaagtttctgaactctctcattctcaagctcacttctaatcctcaaagcccttgcatgcttttcttcggcttccctctttagatccttggcagttttctttttcttttcaggagacattagtttatcatgcaacatacgtgtgcgctcagcacttctcctgctcattcctggtgagtgagaaacacgggaagagactcgataaggagatgaaagtatgtcctcccagttcctcttctccttccatgcatccatggatctccaaggagctgagtttctcctttctttttccttgtcctgttcagatagagacacatgtcgcttgtaattatctgtcaatttggaatttttctcagataccccttctgctattatcttagttttcctaggaagcagtttctctgcttcaaatccagcagaatgttctcttttactctttccagaagcagcagaactatccctaggtggcaattttgatgtaatgatgttagaagaagaaacctgagaagacagacgcccattcagtacagagtttgatttgttggaaaagactaacttagtatgctgttgtactgtactcaggtcccctatcaaattcttcgtattggaaattctatcacttgatgtagacaacttgttaagtttgtcatcagattggagacgcaaggacgattttacatcactaccttgacgtaaggtagctctttctcgctgaattttcttaaaagcttcaagagatgaagaaagtatctctgctttttgtgctgaagtcgtcattcttcttacctgcactcaataataatagactaacatttttcatattagagagcaaggtaaatgaacaaaaataataataataatatatgtaatatttcaatccacagacagattgatgaattgaacaaggtatactcttaaaagaatccttggacactatggcttagggtgtaaagagaggccttcattctaatgacagtgaccatattgttattcatagactagaaaaatggaacagaaaataaaatggtaaaacatgcttacctcccacgacaaagcatgtggtctacgatggtcactttttaaattgagtggcactccattattgaactgagaagacgacctcttcattttttcaaactcttccactctagtggttagatctttaaaatcagatgcagcctcttcaagaacaagaacagcttctttcatctgctccacatcacattctaattcacagaggagataaagttcatctacagccctgttaagattctcaaacaaaaagcaccaaagccgctgcctaaacctttccttgctttcaactgtatcacattctccaaggatattcatgttatgagagtttgacgtgttttcatgtacagtagcaccacaaacaactccagcgtcttcaatagatgctgtagaggatagttgtttttcagaaagttcagctccatcgttgccaggggtgactaactcaggatggccctcaaccataactgcattaattaaatcaccgtctgtcttagaagtctcggtattttctccatcactaacctcagctgtatctttaggaataggatccataagtttcacctctacctcagctgtaactataggatcctgaactttcatctctacaccagtggaactactagcagcttcattgacaagcgtaacatccatatccttgcaatctgaaacaccagtttctagaccatctatattttcattgatggtaaatccttcaacattttcagcagatacttcatttaagttattaatatcatcttcaaggtgttcgtctttaggagctacaggaagtatttggtcaacaacggcatcttcaggtgcaggtgcagataccaatttgttttcttgagaatttatacaagagaccaaattatgatcactttcatgatccatacaaagcattaaattgtcttcttctatagcaccaaacttgattccaacaccaaaagcattttcagtatgcagctttccactattgtctgggcgaaaactgttagtgtcatcaaccaaatcaggtttatctgtttgaggcagtttctcgatatatttaactccagtagaatttgcaacattgtgagggtatgacttgggacattcagtgttttgcttaacaacagtgtccttaacatgccccgcattttgtttgtctttatttaacacagcaacggaatctgtagtactccgactatgtaaagcaaaatttccccctgctttgggatgatgatatctgctcttgtcacgggaatttacattgtttccattcaatgaaggctgactgcctgaagggtgagaagcatttttctccgaaaaccctccaacccaaccctgtaaagagaacttcgagctatttctatgtttctgttaaaacaaaagatcagtatcaagctgcaatacaagctatttataatatcagaacaggaaaatatatatatatatatatcagaaggtcaaaaatagcattttcctcagacatgtaggacattctacagcatacccatacagctactcattactaaccaagcttgacatagcagtatcaagctttagttaaacacatgctttcaaaaaagaaaaaaagctatagttaaacacaaaaaaaaaaagtattttggttagttcattgactaaaaagactaacatgaatattaacctttctatgttttgtttattcaattttctttggttttaaaattttgggtaaaatgatcgagcctaaacaattaaatgtatatattcttccaaaagcaaaattaatctatttctctctgaacaaaatttaaatttaacacaaagatttccgacaacaaaaaagatatctttccttgaaaggagatatgattaaacgaaaataaacccgaaacaaagaagacgtaaatgaatgaaaatgcacctttttcacttcgaaccatccagagccctgatcatccactgcttctccactgttctccatggtccatcatccccaactttaccaaaccaaaatcatctttctcccgacctcaatatttaaatatacttataaatatataaatttatatcaacattatatataatatctaatatatagaaacctcaatttgaaccaagcgaaaaattgatcatcttaaatcaaaattttacaatgagtaataatctggagaaaattcttcaatttgcacaacgaaatttaaaatttcttattcgaacataatggacattgtccccaaataaatgagtagcatagaaagcactgatgggaaaaaggaaaagaaaaaaactgcagttttcctgaaagttcaaagctgaaacaataaactccgagaaaatcgaattccaataaatttgagaaacttaggtcacgaaatgtgtaaattttcgtttcaaatgaagcgatttatatcaaaattggaaagggttaggagggttgtccttactttttctgattaattgttattatttaggcaacaaggaaaggggaggagggaagaagagtatgagtgaatgtgtcaatcttgtgagtgagaaagaaattgaagaagagtttgctggtggtattataagacaggatttaaatacatatttgcccttgttattttaattaatgacattcgtatccatgagagagcttttgtcaaaccacgggtcgggttggctcggagaaatggatcgggaaacggacccgccgacaatgtaatatacggtagtctaatggtatattagaacttttcacttttatttttttcttttgatagaaagcaaacttttataaaaactagcaaacccgaaccaacaaacagcaatcttacaacacagaatacacaatcgccaagtcaaaaaaaccacaaaaactctaggacgcagcccaagaagccagcatatgagctgcatcattgttcacacaagaaattcagcaaacattacacgaactaatggtatggtatgttttttttttttttttt

SEQ ID NO: 14915 - DNA, 5878 bp, Cannabis sativa
gcggatcagattggatccaaaatatgaaatccgcacttagtgcggattgaatgttctttgaccaaaaaagtgcggattagatcggatgaacacccccataatagactgactcgtgaactaagattaattaatacctaatctacgtaaaaaaaaaaatttcttccaatttttttgctatttactatttcttttaactcttaaatattttagttttaaacaccatgtatagcaaacgacaactacagtattttttttttttttatgggttacgattacgacaaccacagtatattctcatttctttttgtcaaagtttcaatctcctacgctcctaccaaacatttatttgtttgttagatttaggaacacaccctatacaatacattatactaatacaatggttactttagattagataacaaaacagggagtttagattcgtacaggccactccaataagaagttcccttttcaaatcaaatcttacaaaaaagaaccctttcgaagaacaagaccccatcgccatcggaacccatttcttccttctaacttccaatctctgcaacaaccattccagtagtagcacacccatttacttcaatctcataaattaataataataaaaaaaccattttcataaaaaaagttcttctgattctgatctgggttccatgtcttctctgcttcggaatacgcttttgagtctctttctgctgagcttctttgggtggtcatcagcttcttcgggatcgcgttcgatcctcagagaaatcgatgccgaaaacggtgatcctcgtgactatggccttgatttgaatcttaccaactttgatttggtccttaaggataccccggcaacatatgccattgttgaattttttgctcactggtgagcttttctttttctccatattgaaagttttcctctttgattatctattgtttatacaaaattttttacgtgttatatatttgggtatgtgtttcaacgaatcacaacatgattcgcctcacattatggatctatattgaggaactccatacatatttttaattaaaaagtttgaatttgtgataacttcgaccatattcggttactttagagctgcttctccgtgatctcgagctagctaaccctgtttaatgatgtctcacttaatgaattataatttgcattctcttagacttgtattcaaggccttttgtagattgtcctttttaaggtttccatctttcttgctgtatgtgattgaaactttgcttcaattactggttctagtggtagattggtattgaattccacgggattggttcatgttggcacttttgtttgtgtgtaaattttaagttcattgttaagattttatggaaaagatggttaatttgaatatcaaagtatattggactggaaaatagcttaaattggtgaacaattttaagagttgattgatatgacgacgactttcagtaattatgttgtctgttatgcgcagaaaacattttcttgaatttccaatcagaaattccggaaatacaatagacccaaaatcatttctttgttttgtttctatgaaagaaaacacttttattgcatgacgttttttatggatacccatctactctctcttgcacttaatgttatcatttgaaaatgtgaagtttaatcttcttgtttcttacttgcttggtaggtgtcctgcatgcagaaattataaggtatacatccataaatcttgtttagatattgttgatgaatcaatgttatgaccattggttgctgactgaaattaactttgcagccccattatgaaaaagtagcaaggctttttaatggaccagatgccgttcatccagggatggtattgatggctagggtagactgtgcatctaaggtatttataatgttttctttttttcccttgtactgttattcactttttaagaacttccaaaacatttgtccattatttccaaagcgcttaaattgttttcaacagtttatgagaactagcaaaactcaaattaattaagataaccttattataatttcatgtctttaaattcttattacaataaaatccaagtaaattgcagatatggttattttggaaaaagtgtgagtctgcaatgtatcctcttataggattatatttttcctttgtcaccaattttgtatttatctgttgttgttccccatccttctgaagtttttctgttttgttttatgattgttaattactattttgcataatttgtcatctatctattaaaagtatgtcttgataattagaacattcatttgcttatttggcagcacagataaatactaaactctgtgataggttctctgttagtcattatcctatgctattctggggacctccttctaaatttgttggtggtggttgggaacctaagaaagagaaaagtgaaatacttataattgatgatgggcgtactgctgatcgtttacttagttggattaacaagcaattaggcaggtaagaggtatctatatttttcacttttttaaattaagcttttagacatttccccttgctttcattattgatatactgtgtattcagaattggtggttgacctttgtcttttttgttagttatcttctttaaaatgtgatagaagagaagtcttgattttccttttttgctgcaaaagtcttgattttcttgaaatgttatgcttactcatgtaactgagaacaatatattaaaatcaatgattggatggatgtacaggcacaagtatttaattcttcccctttgattatttttttcatctccttggtttcttcttgcatctttgactattattttaaatatttagttgggcatcttagacatggtaataggcatttaaaatgtcaatgtgtaaactatatacggtttgaattattatttcttcatacacattcattaaactagcagaatcagagtttagtaccacaggaaatgaatttacctacaacagccaacttaaagtgtcatcattatgatttctaatgctctataaatttacagctcattcagcttggatgatgagaaatttgtaaatgaccatcttccatcaaatgtctcagaccctggacaggtacaaaagagagcacatgtttgaatttccacatttttagaaatatttgatcaattcgatgtaatgaatttttcaatgaatgatttgtcaaagattgctcgagcggtctatgatgttgaagaggcaacaaccactgcctttgaaattatcttagaacacaaggtagaaattgtttcctccctcttgcctctctttggctgttggttatattgtttgctgatataacctatcctctgtctgtatgtctacagatgatcaaatcaaatactagagcttcactcattaaatttcttcaaattttagttgctcaccacccttctaagaggtaatgactatttcatctttatttgtcgcttaaccaagaatactactttgtatggtactctaagactatctgtatcaggtgtcgtaagggaagtgctgagattcttgtgaactttgatgatttgttcccatcagatctactgttagctgacaaacaggaagaaattgatggaaagggtccattgagtagtttccagatttgtggaaaagacgttcctcggggatattgggttggtacctggaaatctgcacctcactgtttactctttttgtttcatttcatcatgtgatgtacaactgtacggaaggcttattgaactgcattttatagctggctaaagcattttgattcaatctccaaaaaatttcatttattttagtgtttccttctattaaaatcatcatatttttaaaatggtacaaaattatcaccgattacacgttataagtaacatcaaatgcgaatttcataatttgatgcttttcttttggtgctctatacagatgttctgccgtggcagcaagaatgaaaccaggggttttaggtaatggtctagttattttccaatccatcaatatatacgtgggcaaagagaaaataatttttgtggcatattttttttagtatttgatttaattttgtctcacaaatcacaactgtttattttgtgtatcatttccatcgtatttgttctttctagttgactcttcattttatttttattggtccgcagcctaccccatcacatcaatttatctaaatcacctgaccaatgtggccaaataagctgtcacctccctccctctctctttgtacacacagacatgcatctaattctgtcctttctctgtcatcactggtctttgactatacttgctagaacatgattgtcttcaatgagctaatacaacaagtttttcatatttttttatgtcacttctcttacagttgtggattgtgggttcttatacattctttgtcagtaagagttgaggacgaagagagccagtttgcatttactgctatacgtgattttgttcataactttttcgtatgcgaggaatgccgccaacattttcatgagatgtgctcgaggtaaatgtaactggaaataacaataaatgttcaaattacttaagtctcctcattaaccttcgatttattctaattgcagtgtttctagtccctttaagaaaacccgtgacttggtcctttggttatggaatgctcacaataaggtcaatacaagactgatcaaagaagaggcatctctaaaaactgccgatcctaaatttcctaagatgatatggcctccaaagcagctttgcccttcttgttatcgctctcatatccagaggaacagtgaaattgactgggatcaggaagaagtattcaaatttttaactaactattacggaaagactcttgtttctctttacaaagataaagatgctcttgggaatgatgcggctgagggggctgttgaagaattagtggcctctacaaatgcgctcgtggtacctgtgggggctgcattggcaattgctgttgctagctgtgcattcggagcacttgcttgctactggcgttcacagcagaagagtcggaagtattttcatcaactacactctttaaagaacatatgatagttaggagggtaatgtgctctttcatataggattggtgaagtgaactcagaaataggggaaacaattggaaagaagctagagagaggggtagggagagagcgagggagagaagatattgctaatagttattcatatttctgacttttcctttttcattcctttcaggccaagaagaaactggaactaggattttttaaaggtttacaagccaagaagaaatggaagccaagactgttataaagggaaaatttttgcattgcagagaggctgagtaggaatccacatacagcctcgtagcagatgcttgtcttggggtcaagtcaagattttactatttaaagatccaatgtggattgtacagatttaatcatattaaattttgggagagaagcacaccatagatctgcggcgccttttgtttatgtttctctcttcatttttttttcactaggtttagttgttgatttcacagatttagtcaaaaagaaatgagaaaccattaatagtgcaattaattcagtttactccaatttcctttatcttgctgttattttgaataagctttcaggtgtatattttcattttccttgctcggttagcagttcattttcccaattctaatataagctattgttcaacagtaaacaatagggtaatattttagatttggtgccacttttaaccaagttatcttgtgatatctattatatctattctatataaaatgtggctatataactaaattcttggtttatgagaaattagtgggtgattctttttttttttaaaaaaa

SEQ ID NO: 14916 - DNA, 11870 bp, Cannabis sativa
  modified_base (8344)..(8346): a, c, t, g, unknown or other
gccacgttaaccccatatcccctacggctgctagtgccaagaagcaacacttcttgcccatttccgaggacaaaaaggtgaggtttttgcactcgtaggatgtaggttctccattattttattctgtaatgaacgattgagtatttctgagtttacggtatgttttgctatttggcatattggagtccgtacatgttaaatgtcgtatagcgattttttttctttgtaaaaaacccttcctaaagggttttgattacagttctcaattctttttcgttttctcttttgattttacatctgcgttttggttgaaaatattaatagctttggtcaattgcgttgatattgagataggtgctcttacttttggttttcatcttgtacataatggaattagtatctcatttttctcgttcgaattactagccttcagatcctaggagtaggttttgtagtctctattaaacaagaacacgtattcggagaactacgttgtctcattttgcacgcccctgccagtgatttcgttagtaacacttaatcaagaggtaattaggccataattttctcatacgttttaagctaggagaaaacatcgtagtagctttggtcaattgccgaaaatattattctacatttttttcttgaacttagatccctgccaaaccctacaagacctggaaactatagcattattctgtatttgaccacttgtacttttttaattgttgtatttgtaagttgtaacttctctttcttctgttatagcttgatattgccgttcttcagtatcaaaatcaaaagttaatacagaagttagaggcacagaagattgaatatttgtctcttgagaataagttctcccaactcgaggagaaacaccagccatatgattcagcattacacgtggtcaataggtcttgggaagaggtaagactcttgtttgttgctatcttcctgccgtccatttctcttgtgtaacttcatgtttttttcctctttcctatgtatacagtatcgtgtaatgcttgatggggtgtttattctatgtttttacaatagcttgctcgtgacttggaatcatgttcgattcatacaagagaaacaagctgcaagcaagatgttggttgcatgtccattgttgagggtgaggacatgtttaaaagttcatctaatttgggtagtgggggtttgttgaatgatttaagtttagttatcaccatataatgtcataatataaagtgttaaatttttctacaatagaaagtaatgttttttgttcaaatggtagggacagatgtgtgagtaaaataatgattgcatcagttggtattgtttctcagtctcctttaaatgtattcttgaccaggacctcttctgttttgtcagcttaccatgttatttgtttttttttctttttctttttctctaagataattattggtttttctgctgtcaatcattggatctattttattaacataaggatacttctacatctattgtcattcaagtcgtagtaatttagtatattctagtgacaagtttaattacttcacacatatgagggctctatggccatgtttgcaaactcaaagagacatcatgaaaatagtgtttgaagtgttaagtttatactgtattgcagatgaatctgaatctactttccatgaggcttttcttagtcgtcttacggaaactggtgcaacagaaagttcgtcattatgtgaccttcctaaacaggcggaaggtgatcatcagagagcctttgaacagactaagaacatcttatgtaatctagttgctgctgttgacaatatgtggtatctaaaagatggaatacatgcttttgtcttgaaaaaactttcagaaaatggtaagagatgcgtgggttacttttatacgatacttcgagcactggtctttagagttatctcagttttggtggatcttgctctattttctaggatcttgcaggcaaaagacaccaagtgaattagatagagaagtcaaggacttgaggttggcatttactgaactgtttgtgaagcataaatcactttcatcaaaactgcagagtcatcgagatattgatgcaaagaataaagctgagcttagaattttaagaggtaattcccctctttcttatttggataaaccatgaaaactgatatactgtacatattccataaatataaattaacaaggattttcccccctaataaattggtgtttagtattttttggtaccaatcttgtcagtaaaatgaaaattaaaaaaaaaattggggcagcacccactcacattggttgctcaatcggcaagaagcaatttggttttgtgacttggtctaaaaatgaagtgccagattagtatatattatgtttttctttttaatgttgcatccttcatgtagtcttaatacattataacttttgtatgatcaaaatttatagtagtttagagaatcttgtggtcacttgataagttgatgtaactgaagtttgaaacaaaaggtaatgttaattgaacattgttgcattttaaatttcttcataaatggatacaatggaataagttgaagggatggttttattttgccgaaatatggagaatttttgtttggccgtttatggttttcattgccttggaggaaacttaatgccaagtgctgttctcgtattggttttatgaaggggagttgcaaatcagagttgctgaactagaagagagtaattgcaaactagcaattctcaaagctcggagagatgctgcaaaaggggcaggctttcctgtcttaaatttagggagcaagcatgttagtagtgacaaagtcagggataaagtaaaagatatacaagatatggagattgctcttaaagaattaatggtaggatatttacctttctttcaatcactcatcttaataaactaatcttatctagatggtaatccatgctaactgatttgagctttgcaggatcaagcttcttgtcggcttgaagaaataaaaggtcttcatgaagagagaatacttatattgcagcagttatataatttgcaggtcactttaatgtataactagtcttttgtgtatatactgtttttttactttaaaatagcatttttgctaatactaactcttcttgcaaatggacagagcaaattgaagaatgtagcatgtatttcctcttcccaagcctatctcttagtgagagatcaaattaaaaaatcaaaatctgaagttatacaatatcaggcttcgtatgagaaacttcaggttgtaactggtcggtagtttatttatgcctgtatctaccgttctttgataagatgtcattgtgatgctaacaataatgttgtcattggagattgtaggctgagaaggataatcttgtcttaaaagaaagagaactcagtgttaaaagtgatgtcattgatgtccttcgaagatctgccgcaattgagaattcaaaaatttctgatcttaggatagaaatacagaagcagaacgatgagagaaagataattgaaacaaaggtggaagatgcttcaagagaacctggttagacaaaacctgaagcttttgcttattgtgagctcatggctctctttaatcttctgatggaataattattatggtttcaggaagaaaagagataattgcagaatttaaagccttggtgtcttcatttcctatggaaatggaaaacatgcaaggccaactgcgtaaacataaagagactgcttcagatgtccattctttgagggctgatgttcaatctctttctagcattcttgacaggaaggtgagcatgtttttcatgtggtgaaattattggatgttattattgggcttgtgctgactttggtgcatcaggtgaaagagtgtgaaactctatttgctcgatccacaggtcaggctgctgagatacagaaattgcaaactgtggtacgttttatgctttcggaattgtatcttagatgttaattaggtggagactagccatttctattaatctttggttaattgtataacatgtcatgtcacattaaattgtccttctaagttctaattatttacagcagaataacagcttctatgtttttatatttattgattctttttcagttggacaagaaaactgctaattccattttgttctttaaactttacaaggattttataaagttaacttcgattgattgatcattagtggaaatctggagatacatttgtttttgccttcttgcttattattgttattatttttgtttcacttataggttcatgacttgaaagagagcacctatgagttaaagctgtttctggaaatgtttagacgtgaatcctctgattcgaggtgagaatgtttttacattatttgctttgcttcattacataatgtttattagtaaactatgctatatgagactagcttttttggttatgtttgattgcacaccatttatgttctgtgtcatgtctctgcagggacattcttggagctagggatttggaatacaaggcgtgggcttgtgttcaaagcttaaagtcttctctagacgagcacaagttggaattacgagttaaaactgcaaatgaagctgaggccatatctcagcaaaatttagctgctgcggaagctgagattgcagatatgagacagaagttggaagcttccaaaaggtttctttctttttttcctcttcaggcaagagagggagaatgcaatttcaatatgaaattttgacctgttattttatttcatcctgtttgaaggatattagtccctaatatatgtcgtcattgtggatactgttctgtatctagcatgagactagtcatacatgatgtaaagtactgagagaaaaaacagtgtaaaaccagaaaataggcagaaaatagaccttaatgttatggtttaaatagtacaagatttatataccaaataatatctaattaactctaatatgtacacctaggattaagatgaaatacaactatattaaatattagtatcatgtgggtgtgctttggttttgacaattcaactgcttttatggttttcatgatcttatgtttatgacaggactttctttagtagagcttcatagtttgttttattgctatgtcaggaatatgttggaactcgctaatgtattgaaatccaaaaatgaagagaatgaggcttacttgtctgaaattgaggtttgtgtcatgttggtttctgtggattgggatctcacccttgtacagtgatgaagttgttccaacattggagttttttcttttgttcagactattggacaagcatatgatgatatgcagactcaaaaccaacatctattacagcaaatcactgaaagagatgattataacataaaggttaatgccttttctatcaactgttttaattaatgttgaattgtcaatgctgtctttttatttttcctctttttgttttttgttttttagtggtatttgttattgacttagataattcaataaacctttgctatttgtagtgatttttagttggacaagaacaaatacacaatctcctatatttttcttccttaaactgtatttctttttataattactttggtgaactttttactttcattatatagtatgaaccaggctggcatacctctgttctcgttctcattaatataattgaagctcggttcaaaggattctctgttatttttctttccttttttttagtattttgatgcatctgtttgggttatgatatgtatcacatgctacatttcttattgttttctggcacaagtaatgacatttcactttgtatgctggttttgtgtaaaactactaaacctgtttttgtttttcactcgatgcaagtgtacatttgaggagggagattgttattttgtaaactactgtttatttaatagatgtttccccccctccatttcagcttgttttggagggtctgagggcaagccaactgcaggatgagttattgatggaaaaaagaacattggagagggagattcaacaagctaattcatctttaaatttttatgacatgaaagctgcaagagttgaagatcaggtatctctcatcttcaaattaagtcttaaacatttacataattttggtagagtagaaaaagtgaggaaagaagaatttggagagaaagtggagagaataagaaacagtgtttggttgcaaagaaaaatgggtggaagagaaaattgagaggaaaaaaaaggtgggtcccaccaatatcgttctctcctaaattggagagaaaagtgaagagaaatgttgtataatatgcatttaaagtaaagttacatatttatccttatatttaattcaaaataatagatgtaaaattatacaattgtaatttcacttttatctctattttctttcctcacataccaaatagcataagagacacattttcctttttcatgtccattttctatccctcattattttcttgctatgcagttgaaggtttgctcagatcagattcagaagctattaggagacaagttccaaagttctgtgatgttggacagtacccaaaagaaattacaagatcttaaaagatcatcagaacaaacctgtagatcactagatgaatcacaatctaagatttataaaagtcgagtggctttgttggacctacaaatagaactagagaaagaaaggtacatatgtgctgtgctcattccaatatgatctattctgtctttcgtacttgggctaatctattgcttcattaggtttgaaaagagaagacttgaggaagagctggaagttttgaggagaaaggcctcaagactaagagcgcagacagaaggttcctcaattattgaaaagcttcaacaggaactaggtgaatatcgggagatactaaagtgcagcatctgccttgataggacaaaacaggtatatttaatttagatagatgaacttcttactgatctatgttccacttttacttttattattattatgaccaatttttgggtttgattctgagctagtgagttatcggaatcaagatttctagttttataattaatgctcagaacaattttttcttttgtcttgtattgcttctgcctctggcacagtttttaaattaagatcacaattttggcttgacaaaagccacaaaaattatattgtcttgttgagagttggaatatttctcagttattacagcagttgcattcaggtttttatttttttgatcttttattaacatttgtatataactctgtccaggttgtaattacgaaatgctatcatttattctgcaacccttgcgtgcaacatatcattgaaactcgacaccgcaagtgtccaacatgttccacttcatttggtcctaatgatgtgaaatctgtgtacatctgagaggcaaccgagaagaagtttgtttgttgcatgtgataccagagaccaacttctcaatgagccagcatcatatcatacgcctttagctgcattgatcccagagacttgaccgatgagtgaggacaggttcatatgtattgtagtgatgtgtagaggaaatataagttgcctgattggtcctttttgctttcctcatcccttgtcaccggtgcaggtctttagatttgttggcactggttctaggttgttgattttaccaatttcttattgtaattatagtttttctttctttttttctcccccggcaactgcttcgagcaactggaatctctaatctatgatttgcagattgattggattccatccaatggctaatcagagtagctggatgctgcgcgtcgtcataagtgaattgaatctggtaatgaatgataatggtaatggtaagcctaaagttgtcataatgtgaatgaatgtcagtagcttatttttaatttcctcttctgagcagctattacatgaagctaacatttatgcaatttcttgatcaccactaatttagacctttgaatgtaacctttaaaagggaaaaagaaaaacatcaactatgtttggtagagggatagagaaagttgagatgaagaaaatgtttaaggaaaggaaagtattttccattgacgagctaataaaaaatacaataaagttgtaaatttagtgtatgtagtgggaaatttacatagtatattaatttttgccatttttttacaaaaatattgtcaagtggtattttttattttttttactgtgtgtttttttataagttccatattacagtatactatgttaagatttcactagtgctttatagttgttctactgctgttttgagttgttctgttctgtgttctactggtgttttataaannnacagtatttttgaaaatatttctgtgtaacagtatttttgtaaaagttaattcaaattctagtatttttgtaagttttcctatatttttttagcactgtgctggaccggcagtttgaactttgaaggttactgctagctgagccttctgaatatttatgttagacttgcactgggctaagcagaaatcatttcttcttatggtcatgttcctttgagaccgaaattaagcaattagcatggtaaattatttgatggctggtaggtgcaggttttagtttactaattctggcacaaatttagagggaaattataagaaatgtgtgatggaataagtacaaagaaataaattttaaatgacaattttgtatgttatttatgtacaattattttatttatttttgattattaaaataagtgtaccctggaaattttaaaaatgtagcagtatcccagttgagaaaccttgcacttttgtatctaaaggagggagcttccatggtactacacagttgagtttttaaatggttttgtcgtctgctccaacctttagctgccactgtatgcatattcctccttcctttgtcatgttttaagtttttgtcttatatttggtttaggttattgttggtaataatagatttattttaggttcattgttagttcttaattagtactattataattgatgtaagtataaactttcagatttgttgttttatgctctattttgtgtgtaatttatagttggaatcataagtgactagtttataacatatgattgacaataaaaatgaaaaattgtatcaaagtggatgaaagagaatatgcctttatttttgtttcttgtctatgtgaaattctgcttaccatatttggatatataaacccctaagctggcattacagtgaaattctacatgtttggaatctccttgcgtgagcatcaatactacagcctttgtaagtaatactaaaaaatgcatatccctaaatttgaatttgctgcaattatggaagcatcaatttgttggggggagtcgcaagtttgaaccacacgatgttgtgtgctaaggggagttaggaaaaacatgtgcaggagatcttaagtctagatgtttgattatgcaattacttacgaatcaatataatttcataattaattaaaagaagatatgcttaaatatacacaaattataatattaatttttaatagggttatttatagtgaaactctcctatattttgatttttttttaaataaaaatagaactttattaaccattaaaatctaatacggaatacggcaaattcctttatattttaattaatacaattaattaattttttttttatattttttgcggtaaatttttttattttttttaaaaataaatttaaagtgttagctttatattacatttaaatactaattggattattaacgtattaactttgaaatttctttcatgtatgtacgaatgtatacaatggtcatacaattgatattaaaagttatatttgattgatgtctcaaatttataaaaaactgtaaatttaagagagttaagtgtataaaaattaaaacataaagtcaattacacttttttatatgatgacaccggaatatttttattttttaaccctttctaaatatgccaagaattgtcttaagaatgaaaaatgcattcttctaattactgtgaagaaattacaaaaaggaaaataaaagagagattttggtttcttagagaaaagcatgagagttttttcgtatctaacctcgttatttttctctttactgataacatcttttcacaggaaaaatggtaattaaaattaacttctaattactatatatttatatatttaaaaaccaaatgctgcaatttcattcaagaccagcctaaacaacagaagtaacaacagttggagcattctctctgaaaataaacaatcaacataaaaagtgaaactttagcaatattaggaacaacaccattcatagaccgcttaacaaaacactcattaagccaaaagcctcttacagttcttaataagcaaatcaaaaataaaattgataataaaattattccgcacagtttggaccaccactaagcattttatttttaaattcacctctgccaccccttgcctttcacctatcttagaacctctttgtgtctgagagcttctgtaatatccgacagcaccacactgggacaacaccagcaacgagctttcctcaaccttccttgacaatctttgatcacacatgcaaagccaaactgagcttcttgttgaaaaattgcagcatgaatgttgatcttgaatctagtagtaacaattttagaccataggttagcccattaccactaaccctgttagggttttatgtcctgaaaagcctgtaaagacattttgattataaatctaagttgaacaatttgatatatgtttgaatgttaaattatttagtaatatttatatataatattagaaaattccttataaatatgagattgtgacttgtattgtatggatatttaagatcacgaggtatgaataaaatagtaaacaacatattcaatttatggaatctttaatcaacagttgctattatggtttagtgatctccgttactctgtgcaagcaatcttaatttggatcgtaaatgtagatgataatctcggtaggactgaacattttttttgggtttgaccccgcccgtactcgacctgacccgtagaacttgactctgtggaaaaacccgttccctataggcgggtcaactccaacctaaataaaatgtgagagtcatgttgaatttttatgaagcaagcttcgacttccgcaaaggaacgctaaagttgcttaaaagttcaagcaataaagataatctttttgtttcgggaaggagggttgaagacgtattttacccccagtgatcttccttgcatgaaaaacgatgttcatgcaagagtcatgttgaatttttatgaagcaagcttcgacttccgtgaaggaaggctgaagttgcataaaaatttaagtaatgacttcgctcaaaaagatcaaaaggagaaagaaccacagagagtaagacagacttcaagcagtccttccatttcgagaaggagggttgaagacgtatcgtaccccattgatctttcttgcatgaaaaacgatgtgcatgcgagagtcatattgaatttttatgaagcaagctttggcttccgcgaaggaaggctaaagttgcataaaaatttaagcaatggcttttctcaaaaagatcaaaaggggaaaacaacacagagagtaagacaaacttcaaccagtccttccatttcgggaaggagggttgaagacgtatcgtacccccagtgatctttcttgcatgaaaaacaacatgcatgtgagagtcatgttgaaattttgtgaagcaagctttggcttccacgaaggaagactaaagttgcttaaaaattcaagcgatgaattttcttgaaaagatcaaaaggagaaag

SEQ ID NO: 14917 - DNA, 9275 bp, Cannabis sativa
  modified_base (82)..(103): a, c, t, g, unknown or other
  modified_base (137)..(137): a, c, t, g, unknown or other
ttgaaagaaaacctaataatttatatatatatgacatatcaaataccatacaaagaactaaaaataaaaaaataccatatannnnnnnnnnnnnnnnnnnnnncatatttatcataagaactcttaaaatcccatantaagtgtaatttcctctaaatttttgcacttaaaatcatacaaatagataatttaattctaattattcacccaatgactcttaataatatttaattttacacattaatcacaactccttaatttattgctagtctctaacaattcaaacaaaaaaatataacgttaacataatattttatggtcaaaaattctaaaaataacacaaatattcaaataaaatattagtaacaagccaataaaaactatacaaaattaccttaaataaatctaaagttgtgagtgtgtacaccaaacctaaatattcttatcgcaaaccatagcacataaaagccttcaagaaacatactaagtaaaagtctcaactccattaatctcacaggtaattgaaaatattttatatatggctaagaatttctctcatggagttagaaattgaaaagtgagcacttgaatgaatagatcaatttaggataaacaattaaataaatattgaagcaaagatatgttatgaaggataataagccctttataatatcatgccaatttcttagtggaaaatcgtatctctttgggtctgtgttcttgcagctggttttagctggtgccatggctaaaacaagatcaaagattcaggggagaaccaaatctgctaccgaattcacgaagaagaatggctcgaaagtgatgaaggatgctattcaattcaatcttatagaatagatctctgaaatcaaagccttggaggtctcggatgaggaagaactgatggaggacaatccaactctgaagtatgttttccagcctcctctgtctcccaaatcctccctagctgcgattcaaaggcaggaagatgttcatagtgattttgttcagtttctccaagcaaatgaccaatgtaacagtgacatcactcaggatgagaactcgattccccctattttacgttctaattctgttgttcacaatttagacaattcgtttaagaaatctggacataatgagagcaaggtgaagattactatggatgacatagaagatgagattttattttggacaccatcgattgtttgttatgtactaggggtgaatcctcctttgcatattcttgatggttttgtgcatacaatctggaagggcaaggtggatcgtgtgaagatgctttcatatggcatctttattatccgattccattcgattgaagacagggaccaaattccgaatgggggatatattttcatcaatagaagaccggttatcctgaaaccatgggaccctaatgtgaactttaagaaagaggatgtgaagagtgtgcctatttggatccaattggaggacttggatttgaaatattggggttaaaggtcattgttcaagatagttgggcagattgggaagccaattatgttggataatgtaacaaagaagagggagagattgaactatgctagagttctaattgaagtcttgatggatcaaagcttgccagatatggtagactttgagaatgagtttggcatgaacacgacaattgggataaagtatgaatggaaacctgtttcgtgctctcattgctctggtgtggggcattttgcagctgagtgtaagaagaactcgaatggtacacaacagtggattattaagaaggataataggaagcaagggcaagtagatgatgaaggccttacaaaagttaccaactccagaaaaggggttgtccgaggcactataaatggttcagatggggcaagtggtaaaattgtgcaaaactcttttcaggcacttggtgaagaggatgtgaatcttgaagcagtggaggaatatccaattatggtcaacacaggaggggggagccctctctttctaatggataaactcctttgttggaatgtgagaggagccaacaatcaacataaacaacaactaataaagcaatttattaattctcagaaggttgattttgttggtctccttgagactagagtaaaggctccaaaacttggtaccttgtactcgaatgtgtttgataattggtgtttttcttctaacattgcatgacatgcaggtggtaagattgttatcgcttggaacccgtggaggttcactgttgacatccttaaatgtactagtcaacttatgcatttaaagttgtcaactgttgaaggttatgacagtttcttaactgtggtgtatgcttcaaatagcagagtagagagaaggatattgtggaaggatttgatggacctgaacacagctaagaaatggcttttaatgggagacttcaacgatattttagctaaggaagaaagggttggccacagggttaaattttacccccatgttgagttcgtgaattgtgtaaattcctaccttttacaagatgtcaaagcaagtggaaattttttcacttggtctaacaaacaacatggagaggataggattttttcgaagattgaccgaatacttgccaaccaaacatggattaacaaatatgaacttgcagaggctgtgtatctaaacgaaggattatttgatcatactcctgcgattttgtctcttcatccagacctggtgagtgggaaaaaaccatttaaatactttaagatgtggaaatcacatcctaagtatgatagttgtttgaaagaggtttgggatcgacctgtggttggtactaaaatgtttcaagtcatctctaagatgaagcagtttaaactcaagctcaaagagatcaataaagaggggttccatgacttacatgctgctgtttccaaggcaaagctagaattagaatctctgcagaatcagattcatcagaacccgttagactctaatctgcatacataggaaaaagaggctagagagaagttaatcaaagtttaaggagattatacatctttcctacaacagaaagctaaatcttcctggatacaaagtggtgattgtaacacaacccttttccatgcttgtattaaacagagacagaggcagaataggattttttctattgagaagcatgatgggagtagggtcaatgatccaactaagataacaaaggctttcttggaattctataacaagctacttggcaccaaaatggacaatagaaggaagatagagactaatattctggctagaggtcctattctaacacctgatcatgtcaaccttcttacttaaaaattcacattagaagatgtgaagaaagctacctttagaatccctgtaaacaagtcccccggacttgatgggttcttgagcagcttctttcaagacaattgtgagtacataggggtgacatcagtgcggctgtgctatcattcttggaatcaggtaacattcttaaagacattaattcaactataattaccttggttctaaagtgtaaatgccctaactctgttaaggattttagaccaattgcctgttgcaatgttatctacaaaattgcaactaagctcttgagttctaaaatcagtaacatcattcctgatataatatctcaatcccaatgaggttttattaaaggaaggtttatagggcataatatcatgatctgccaggaattggtaaggcactatggaaggaaagtaaacaagccaagttgcatgatcaagcttgatctccaaaaggcatatgacaatattgaatgggaatttattgaggaggttttaacaggtctgaatttccctagaagctttatccatctggttatgaattgcatctctactcctaagttctctcttatgttcaatggaaccttgcatggtttctttgaatccaagaaagggcttaggcaaggggaccccatgtcccctctactgtttgtactgggtatggaatatctatctcgattaatggggaagattggtgacaaagatgatttcttttttcatgacaggtgtgctggtctcaaattgaatcatctagcttttgctgatgatgtcctacttttttgtcatggagatttcaaaagtgtggtgtatatgttacaggctttgaagctcttctctctcacatctagcttacatcctaatgcaagtaagactgcaatttagtgcaacaatatgcctcaaggatgtgtaagcaagatattacaactctcgaggttcataagacaggatcttcctttcacatatttgggaatcccaatttgtgcaaagaagatagcagggaaagaatgtgaattgctagctgaaagaatgacaacaaggattaaaagctggagttcaatgaacctatcttttactggacggatcacactgatcaattcagttcttatagctattcaagcttattggagtcaaataatgcttatgccaaagaatagcctgaaatctattgaagctatctgcagagtattcctttggaaaggacaggccttatttcatggtgcagggacagtctcttgggatatggtttgtcaaccaaaagctacatggagcttaggaattaaaaaacttgaagattggaacaaggcagccatgagtaagtatgtgtgcgctatttcaaataaccaagagagtctttggcttagatgggttcatagtgtctacatcaaagagcataattggtggagttacaatgcttctattcatgcaagttggtattagaagaagcttgtagctatcaagaaccaaatcagcattataactgattgtgattcatttcagagagagaaatatactatagcaatcagctataagatgttcaattctccccaagctaaactgaattggagcaaagaggtatgggctcgactgaacacaccaaagcacaatgtgatattgtggcttgcaatgctcaataagttgaagacaaaagatcgactgaggaggtatggcatcctggtgcaagatcactgcagcctatgtgattcacatgtcaaaaatgggcagcatttgttctttgaatgatgtgttgctgggtactgtttggagagaaacaaaagttggcttgaatggaaagcaaaggctgtgtctcttcctcaactagtttggtggataggcagggcaaagatttcaaagttcaaaaagctggttttttcagctgctgtagcaacgctggtgtaccatgtttggcgagcaagaaatgaggtaatttggcaagggaaaccggtgaataagtgccaggttgttgaagacatcaaatggaacttgaagactcggatcaacatgtttttaccaaagaaaatcaaaagtgtagataaggattggttttatgctttatagatgaattgtaaaaatggaagatagttgagtagaggaagaaaggagaaatacattgtatagatttttaggcccttgtgtgggtgctattagggtgtaaatatatttgtgcaatacaactcactgatttataaagaaaaaaaagatatgttatgaattatttggacaaaccactataaagagtaccacaaactaactttttgggattttgaaaggaaatatacaatcttttacatttattctaagagccataataaatgaaaattaaatactacacttttttttttgaacaagaggcaacatattagacaaatagagagaaatgttgttgttgcatttttttttttttgactaagaaaaaacatataatgatggaaatatttctcttgtatcttttttttgtttttttataaaaaagaaaataattataaaaaagctccctaataagatttgtctatagaaacttatcccttaaaaaaacatctaatcaaatcctagtaccatgtccaaaataattataattatttctatgaatcaatgaaaatttaaaatttattttctcaaatctcgccactcaaaaaatatgaacacatgaacttgacaaattttctaagcaaaagtgtgctaataaccatcttaccatagagttaggcatgtgcattttataactctaaaaaattttaagcaataaagataacaaaaattagcttaaaataatattttacaagaataaatgagtaattttttgaaaaatttgaccatgaaagtattaatatgacaaaatacgaaaaatttgacaatgaaattattaatatgacaaaatgcaaatgacagtacttgaatatgcttaccaccccaactaaaattagaaaatatccttattgttaaaaaaatatatacatgaagtgtataaaatgagaacattaagagagcgagcaaataaaaaatgacatgatgttgattcttagaaaaaaaaatgaaaaaaataaactaacaaaagaaaaattaagacgtaccaaaaataaataaaagaaagaaactgaggaaagataaaatatgatttgtcttcgcaaattggagacatgtctccacaggttggcttaccaactcaattttcttgactatccagcatcaaaaatgaattttcttttatcttgtgtcttaataatagaagcattagttaaacttttagaataaagaaaatgatatttgtgtaagtcgtggaggaaatattgtaaatgactaagtggaaataattttctaatttcctcaatgactttatctatgatattattatgatagtatttattttcatctgcagtgaggggaagaatgatagaatgggaaagagtttctttttgaatagtggtggtactgttctcctctatgaataatgtgggtaccacttcattatgataaccctcatatgtacttggtagagtcgattcttcaaaaatttcaccactagaagtagaggtgatagttacgtcgttaaaattgtgaaaggtggtagtggagatcaatgtttcattcaccagttgcaaaggaaaaccattagcatgaaaacttaccaggtgactagataatttgttcaattcttcttaacttgtttctgctcaacaagtaagtcttttatcatcttgtaatatgtcgccatagattcttgtaactcaacaatagtgtcatctagggaacagttcgataaatattgaaagtcatgagaaaaccaagaattttcattttcacaattccactcatataatggattatagttgtacttagtttttcaactatgatcatcaaaactactgtgattacaccagggatctttctcttcataattctactcatataatggattatagttgtactcatgtttccaactataattattagaattattagaccaactgttccacttttcggcactctcattcttgtaaaaagaatagtattggaaagcttccttcctatcactaaattcttattcaataaaattactagtactttcagtagcactagaatttctattgtttaatgaaacaagatataatggatacaaatattcaaatcggtgatgaccttctttatttgtttttaattagtataaagttcaactatgtaataatttaagggtatatacacgagatattcccaggctgattgagaaagttgctaaggtaccgctccattccacactttactaaaacttcctgaggttgctagaaagtgtagagagtactctaccacaaatttttaaagccaatcattcttagatagaattatcttaggcacaatttttttttaagttagtagcctaaaactaacctaaaaaaagactctaattctagatataaaagtgtattaaagaaacaataaagtaaaagaaaaattaacaaacctataactaaaatatgtctatgatgaattaaaataaataaactaatagagtaaattaaattttactaaataacataaatgaaaaagaaactatatatgcagactatacgaaatttagattttatttttactacaataacaaaatgagagaaaaaaaattttactacagattttctttttaatagaactatatacacatataactataatactaaaaagaaataaagaataagtaataaaaaataactacactatatatacactaacaatttttttttttggaaataaacaaacaaacaaatagaaaaataaataatgaaaattaaaagtacactactatactaacctcttatagtgcaaaaatcttcttaaaaatgatgccaaaaattaatatcgtccaatttgttacactacaatcgtattagtaaccggactatatcgtatccacaggaagatacagttactacaaaaattagtataaataaaatattgtaacaattggaatgaattaaaaataataaaatgatgagtgagagagataatgatcatgtaaagagtttggtaaaatcgaaatgtagttatacaaatctcattttaatactgatattaattcaaagcagttgtaattctacaccataaattacaactggaaaatgtatatatatatatatattaaaagcacaaattattcaatcttgcataaattgaatcttacttctaacttgacagcttatcatattatatatatcataaatcgataaaatacttccattggcaaaatacagtaaaagacatacaatataataaatataccaaaataaataatagcctaactaatataagaaaagtgtgactgaacttatataaaagatactattaaattttggaagaaaaattagaagataaagaacaatttaataaatgagatatatagaagaagcacagaagaatcaataccaatattatgaataaaaagtataatagctacactctaatctcaccaatatttctaaaataattcacttaaactaaactagaaataagaagtaatgaaaggagtataattttttctctgaaatctaatgatgtttacattgtatttaactcttatttatagagtaactttgctctaagattcatacatttcgtgtatgagaatagtggcttagtgggacaaattactgagataaatgggaaaacatggggtaaaattgcatcaagtaagataggtggtgcaatattggtgggcgttgactatgtgcatcagcatcaagtgggtcccaatcgaggcaatatcttgctctaaagcggattgagttattgctgcaaaggtaagcctgacccttgaatttgtactttattgaccgcgtgattaagatacagattagtaggaaaattagcattaattattgttatttgaagattacatataaatatatatgttggtaggttttatgccctaaattaaactctttacaatctgattagttattaatataagaaatttgaagtgat

SEQ ID NO: 14918 - DNA, 5002 bp, Cannabis sativa
catcataaaagaactcagttcatgcttgacctagggtaatttcagaaacaacaaaaagaagcattaggagcgacaatattagaggtgacctttttttgcccctaatcacctgtcattagtggcgacttccatctgtcgctgctaataaacgtgctccaatttttatttttattttaaatatgtttagggacaacattttttgtttaggggcgataagttgcccttattaatagtttaataattattttatttagtacccaaaatccatttcccaccgaaatcatttcgcgcgaaataaaaagcttcgctcttcgtttcagcattcactctaatctttctcattaactaagaaatccctaaatctgaaaccgattcccctaaataccagaaaacctcaaatccaaaagtgcctgcgtcgtctcctaggatccctctctgtcgccgtcttcttcgtctcagggcgatggtaagtcgctcactctctctttgtatatatatatgtatattggatctctctcactttatcatctctctcctactctctcagctctctccgatcagaagttagaatctgtacactatgattaggtataactctctcaaattcttgtttgcattttaaatatgattttgattttcttactcattgtatgctaggcatgattattttcatatttcatctccctcttcttattagaacagtattcagatgtgattattttgttttggatctaaaattattgagcttattctaatttttatctaatttatgtatgtttcgtatttcttttatggagaatattgacgttgctcaccatctgctcgtaataatgttttaatgattatgtaaagtattctatgtatagttttattcattgataaagaaaaaaaaagttatggattggttaactatggaacgctcttattgttatgcataataagagttggcgctgctctcattttcaattgtaagaatttacttaaatatatcgtaagtgtgttgtttctcttcttatggtagttgagagaaaagacattaatctctacagctaatattatcatttcatgtgtttttttttcttcagatttgggggttttgaatctctctctctctaggatctctcactttctcatatctcctctgcgtaagcttgattgctgcaaatacatatatattacaaacttctgtgattggaaattaatattcttttagccgtctttttgttctgtttcagaactatattttttccaataaatttcgcttgtttatttttttgacagattgggaaagaagtacgtgaggaatctaagagaaaaaatttagttttccagcattggattgaagctgtaagattgtaattgaaatgacaattattcttgtgaagttctgacatttggctaataaattaatcttcataaaatgaaaggttacaaagtactagttctgtcttatgcaggttggatgctggagatggatataagattgacttttctgatcttatttgtaatattcttcataaaataagcaagagaaaaccctacgagtatatgttgatgagttatggtattagttggatattcttttttatcttttcagaagacttatatgcttattctctttttgattttctagaaaataaaggtgtcacttcatcattccagcttccttggaggagttgtcaccttatctattgaaggtctcgtagtataatagtataatggggaagagtcaaggtacaatatatacactgtaatatagctgggtctgaattatgcaaactaatgttattctctgtttgttttgatttagaaatagtagtagaaaatcaatatatgtatgttatagcttctaaactcatattgatttctatattaatttttaacctttgttcagctctttttacaaggtgggaagtagacatccaaagaaagatgatcattgccttagggtaaagcctagttctcattttgtgtggatataattatcaccaacttctgctttttgaggtaaagtttgttgagaatattttctctgttttggtggtatgttgtcttgtagtcctatatgcttcatgccatatttaatttagctattggcgttgtagacttttggaatttaatagtaggatttttcaaggtgtggaagatggatatatatatttattttcatttgaagatggagattgtatttgctctgttttgttacactaatttacattatacaatttttgattctttgagcttgctggagtagtcatatatcacctttactaatttctatggtaaattcttcgtttgtaatagttttccaggaaatgagaggaccaagtattatctcactttcaaggtatatccttacttaaatttgactaagaaaaatgtgtttttggatagatcatatatctgtgtaagtaattaagttattgcttttatatttgttatttgcggcagcattgttaaatttattttgattggtactatgccaggtgattgagcagctaaaagacttgcaatatacattgtatagttattcgtggctgatggaaccgatgacgcccatgccacaacgaacacagaacacagcaacattaaaaggcaaggatatagaggaagatactatggatttggggctttagtaatcctattatataattgtagtttaaacattgattaacagtattgtaatgtgaacaattaaagattaattcaatttgctataatttataaatttaaatatttttagtttttttttttcctattagctttaattttaatattttaattttaaatatattaattgtaaaattaattattttttttattatttttttttaaatttaaaaaatattagaggcgacaaatgtcgctcctaatgcttactattaggggtgacgcgttgcctttaaaaaggtataaattgccactaatatttttttagatatcatagattgatttcaaatagggggcgactttcaattttttttagggacgacaaaaattgtttctaatactcacttttagggacgattttttttattgcccctactaaggagtattagggacaaagtattagaagcgatattttaggggcggtatgtcgcccctaatattttttaggggtgaatttggaacttttaggggcgataaaaagtcgcccctaaaagtctcttttcttgtagtgtgggtgacctcctgggatgttttcccaaaaaacgtgcgagtgagaacaacgctagaaacacttgtattagtatgtagtgtcaatcgtcaattcaggaagcagccagagtggcatactcacgttacaaaaatatttaatctcacccattaacttcattgtttcaatacgggagattgaaactacatagatgaacttgaatttataatatattatgagcaataatataatatacagtgattaatatatacaaaataattgaatttatttatttatttcagtaaaaatattatccattttatatggtttaagggcaccattcccaacagaaaacaaaatattaatttggcttacatatttgtttaatcctgatagattttgatttacttaatggataaaaaactaataaagacttaaataataataataaaataaaagcattaatcaatatctaatattcagtttaaatttaaatttaaattcaaattcaaattaagcttatttatcttatataaattaatcttcgtttctctcttcttatgtgccacctttgattaaaagatcaattccatgaacacattccccataatgttatgtgtaaggtagttttgttggagaaaatatttgattaattatatatttattgggctaaaattatttttctaaacctaagctattcaatattagtagaatagatcttttttcttttttctaaaaccccattctacccctcccatttgaatagccccccctctctctctctttcccccttctctctctggctctctgtaaacacacccatggaggagcacacaatcggaccacccacacgacccacaactcatgaaccaccccgatttcgcgaccacaccacccacaccacccacgaaccaccgcgaccaccacccaacaccaacaatatctttgtcaaaggtaatccctaatttttttcatgatttagggttaaagcaattagattttatggttaagtctgtgtttttagtggagaatatgtgatttttgaggtttttaggctcggatctgtatttttatttcaactccgattgaggcccggtatagggcccgatggtagtttaatgttgaaggggttgaaggttgaagaagatagcccgataggtccgatgggcccgatatagggcctgatgggtttcatattgtcttgttgatatcggacctatcgggccctatattagaccccgtcagttagtattttttagaaaaattaactggtcatcgggtcccatcaggacctatattgggcctttgtcttcaaccaagatctaatttttcatcactatgcattgggcctgcatcgaggatgcatccgacctacctaaaaaatgtattttctaacccagaaatcatagattcaaatctaaccctaaatctatcaataaacaatattttaaccctaaatgaataagaaaaacattcaaaaatacaatagggggaaaccgtcattgagggttgttcatcttcgtggtgggtcgactgggtggtgggtagagtgggtcttcgtcctcatatggtgggttgagtggtgctcagatggtgggttcgatggctcttttccttcgtggtggtggattcagtgggttcgacaatgaccgagagaaagggaaggcagagagagagtccgtttttggaatgagaggggtaaaattggattttagtaaaaattaacctattttacaaattttgaatagttttgaattagtgaaataattttagtccaattaatgcataaaaaattaaattgggaaattatagtaaatggccccaaatgataggagtatgttagtt

SEQ ID NO: 14919 - DNA, 4499 bp, Cannabis sativa
aaagagtaaacggcagcgatctccgccgaagatgaaccggctatcaatccaagctgcagacggagatcggatacgacaacgctcaaaagcccgccgatgcacttagtgaacgcatcctcagacgaaggatctccgaatccgatggtgtggacggggacatcgaggtaagaagataagcgactggacgacaccgaaggagagagggatcgaccggttcgattatggcgatgttgatcatcttcgctggccgaagggttgtccgataggagcatcatgatggtggctgcggggttcttttcgcgccggtcttctagaaccttcgcggccttcttgagtgcatcgcttacggacatgccctggccgacggtaccgagtgcgtcaacaatccgacgcgccgatcttcttccggtggttgtcattcttctcagaggtagcaacctcttcgaagtagcggaaaaggcgacgatggaaagcctatccgtggaaccgagggatgatatcaccaggcgcatagctcgcttcagcatttggattttggcaccgctcatgctggagctgacgtccacaaccgttaccaaatcgatcggagctctttgcccagggctcaaaatcgatgaggaagatatcgtttttgcagcctgagacgctggagccctgactttcaagaccaccgcatacgtctcataatttctccccacggacacaattgctgcatcaggtagaagcctcatctcgacgtttccaatatttcgattactgtctttaactaatctcgtagtggcagctggattgacgaagaagccttggaactccgaaacggagttttcatcaccttgttcagtttcatcttcgtccgtctcaggaatgggattaaatcgtgtaccggaggttggtgacatcagaggctcgtcatcgtcgtagaccctcaacgacttggctttgacgtctttgagtttcactgggtcggagctactgatcttattggctccagaactttgcaagctctggctatggtggaaggataagaaggggagctccttccagcccgcactgcaaaccggacaaacaaggttttgattcttcttgacatgggtagcaatgcaaggaaagtgaaaagagtgagaacactcggccgtgaaaatggcggttccttgtccggcttttacgctctctaagcatattccacatcgagtctgtaatgtcaaaaacaaaaacggttagaggtgactgaatcatcgacaaacaaacaaacaagaattatgagtattatacgttacatgaaaaaggttatagatgaagattcttaccttagagagtcttaaagtggatttgaggagtgagaagctagatggtgattttggagatgttgggttagacaaattgaataatcttgggctgttgctggggttgtggtggttcttcttaggtgttgtagatacgttacaatgaagttttgggctattgggtagggaggaattgggggtagtggcggcagtaacggtggtccggcaccggagacttggagtagacacaggttgagattgtaaacgaggggttgacgggttagagaaaaacccaaatttagaggtgattttggggctacggaggttgctacttccatcgtcgcaatgctgttgtctctctgtcaaaactttgggttctctgtctcttggtatagaagtgcagaaagcccttctccaaccagtcaccattttttttttcgttctttcacttattcaaaatctaagtagaaaaaacaactggaaattgggccctaaggaaggaagaaagaagaagaagaagaaaatgaaagaaaaggggatgaaattgtttgaagaagtggggttttattcaaaaggacaaaaagaatggattactctctctttccatccttctctttcccattgttttctttcttcctttatctctttatgaagtcacccaaaaaccaaaatcaaaaaaagctttttctctccaaattctcctttctaactaaaacaaatgtcatatgacaaatgagatctgtggaatatagaatagataaagactctttttcccactgtattttaataagtaattttccttaaattaactccctttccttatataatatgatttggttttaaaaaggtgaagttggggttatatattattgggattaacgaaacttgagagggtggtggtgaccggcaggtggaggtttcgtcacctgctacaacaagtcaacgggccgggtctggtcttggaatttgggtgtagtactgtatcagtcactgtctcattcccacgttatggacaccgaccctttctttctctctaatttttctttcctttgcatagagatctcaacactcaaaatcacactcccactctctcacggtcatcccatcccatcccatcatcccatctcatcccatattattaacccattatttggattttttttttttacctttttcttcacaaaacaggattttttttatttattttttcaccttgttttcttattttattacttttcttaaatattttgacttacatgcatgaatggctagagacaaagagtggtggtttcaaggctgtgtgcagggttctaatctgacccaaaactgtgattgatccttctgatcctgttcgtttatggtggggtccactttgttttcattataacaaaaaaaaaaaagtaaaatcaataaatttgtgatggcccttacaaaaataataataataataataatttgggggtggcaaattaatgacccttttttttttcttctctgtttgggtactaatggccagcctttgtatcttctttattaattattattaaccttttattaattataataattattagtattattattggcagtctatgataaattattttcttatgtcaatccctagaaatccagaaatcggagtaggaacacagatgcaacagctaaccaacaatcgagttctcaggataggtattaggtaacaggctctatagctcagttcttcctcagttccaacgtttaatttatcatttgttaattaaataatatatatttaaaattaattttgaaaattttcaattagtcaaaccaggctgacttttttttttttttttttctttttaccaaatgagtttgggtagaggtttttcaaactgcaaccaaaatgtgtttaatggaattctgaactttgccacttttcatgaaatccatggacattattatttgtaaaaatgtaaaaaataaaataaaaaaaagagtgctttttggccaaacaaggatgaaatcgttattaccatgagtcatatgactctttgatgttcaactactcaaaaagagaattccctttatacttatatctatgattcaaaattttgactttgtatagattgcaacaaaagaataaattgcattaaaaaatattgtcattaaaatgatggaaatcgttgcttataagcgtcaacctaattaaaactcttattagccagtttgaatacaataatttaattattaaaattatataaatatgcccatatgcccaccacttggtaattcaaaaaaaaaaaaaaactataaataatgtattgtcccacaattgattatataagcaataatattattagtgaaataaaaaccttggcattaatttgagcctcgatgaggatctctctaacgtcattatgttcaatatgaaaagaagagtgaataataattatatgaatatgatacttgtagctccatgggcacactcttataagtgtattaattaatataaaagatgtaatttttattttccctaaattaattatatttaatacctattattattattattattattatttcattacaattatcccgaggaacaaaggtgggtgcttggataataattgcctttatgtctggatatttttttttacttaacgttcacaaagaaacaagaaagaaatagtgagaatgagatagagatgagataccctttcacttcacttttatttatctattgctttattataattatttttactatattatatattattgcttataaattataagaatatccactcttgattgtttattttttattttcatatctcatcatcaatggataatatcattacatattgaataagccagatttccctaagggagggttttgctcaattggacaatactcaaacctcaatagtcgttttcagtatttataaaaggaaattaaaactaaaagaaaaaactgaattaatactgttgcaggtatttaatgaagaaagccatcctttattattaatgatctttacctaaaatgttggaacaataaaaatataactgtgctctttttaagggttaaatgccatatttaagtagcagtataaaaataagagaagtacattgatagtaacttaacacaacgactaattaaatttcaataaagtagtaacttagttttgttactttttgttactgtcttgatacttcactcatttgtagagaaaactt

SEQ ID NO: 14920 - DNA, 15422 bp, Cannabis sativa
  modified_base (5951)..(5956): a, c, t, g, unknown or other
tcctattttgttggtagtttcctatttcctagtctcctagctttgtatataaatatgtactattctatgaaatacacagataattcgattcactattttctacagatagaaattaaaatgcaaatgggctaaagaagaagatgccaatttcaagcttttctacagtgcaaggaaagcaaaaacttttatgtctagaattgaaaacgatgacaattcaattgtaagccatgctatataaattcttcgagaaacaaaacgttgaaattgaagcaattgaatgaaagagaattccatcttatagctactcatttagaatataccttatgaggaggaggttagacaagcgttctttgaatgcgatggggataaattggacgacatggtatcacaatgtcagtgtatcaatcaaactaggaagtgattaaggaagatttaatggaagtttttaggggattttgagaagatagtgttatccaggtcaatgcagatgaaacatatattttccttataccaaagaaatgcatatttgttatagacccttcaacttgatcagtagcttgtttaagataatatctaaagtcttatccttaacaatcagaggtgtggtggttgactcaatctcttaaacgtaggtttcttttcttttgtataggcagattttaaacttggtattggtggcaaatgaggccgtggaggaatattgaagcaaaggaaaaagtggtttagtgtttaagattgattttgaaaaagcatatgactacgtggagtaggacttattggatatggtgcttgagaacaaggaatttagatcgaagtggaaaagatggatgaaaggatgctcatctttagtctccttagaataatcattgggaggccaagaggcaagtttcacagttctagggggctgaaagagggtgatcttttatcctcttttcagtttactattgttctagttgtacttgggaggattatagacaaagctagtgaattgcctatattgaagcgtttcttcgtgggaaaaaaattgtttagagtgtgtcaccttcattttgtagatgatacaatatttttggtagacaatgatagccttatgcagatcttgcttgacatgttacgagtcttttaccattggatgcaaggtgggacagtggcctttgaaatatttagggttgaccctaggagaaaatccaagaaagattattttgggagctagtgattgccaaattttccagtctaatcgcttacctatctaaagattggagattgacttctttcaagcaatcttatcctcattgaccagttattatttgtcactttttagagcgcctaaaacggttataaatctattagagtaggttagtgctgtaaatacgtgttagaccttttgacacggcacgattagacacgaaaaaaatataaatttgggcatgacgcgacacgaaaaatatgcttaagcacgaaaggcacgatacgtaagtacgaataaactagcccgaaaggcacagtacgcgacaagtccgaaaaacactgcacgatatattaaaaaatactaaaatttattattattaataataatagatgtatttatcaattataattaagttataataacaataaaacttaaatataatactaaatattatacttttataattaaaacatgtaaaactaaaattatatatgaatttattttagagtaatatcaaaatttgagtatttatagttaaatattcaaattctaataatattaatcatttttgtatatgattatctataaaatatcgttgagaagttatataaatataactaaagctaaaaaatatatatagtttagtaattgtaaaaacaaaaatatgaataagtaaagcacgaattcgagcccagatatgagaacaggctagcctatttaagaaatacgggctagcacgagcaaagcacgacacgaatccaagcacgccacgaaaataccatgcctacgggctgtgacaggcctacccttgaaaaatattggcacgacacggcaggacatgcatttttctgtgcaacgacacgacctacatttttttgtgcaacggcacgacacgaccgtattttgagaagcatagataattatggaccaggcttgcacgacatgcatgaatttacaatactagagtagatgatgctagacttcttttgggaatgagggaacttgtttagatgagaacattgggtggcttggaaatagtgtgccaacccagactttaagttggtctaggcattggtaatttggagataaggaacaaagcttttgttatgaaatggttatggagattttgtttgtaagataaatccctattgtataaagtaattgttagattattaattgtaaaatattagagtaaattgtatttagtagtttcctatttgtatttagtagttttccatttagtcttctagctttgtatatcaatatatattaatacaacacacaattctctttaccattctctacatgtgattagagccactttagattcgaaattcgaaatttgggctgttacaaaattagggtttatagttggagtttttcttttcttaaggggttctcttttgtaaaacccctttggagtaattttctactctcaccgcccactcagacaacttacctagcctccgatctcaaaaaccccaaagattagtcaccggaatctctgcgcgtggggcttacgcgccgcgtgaagcttctgcgcacatccctatgtgccagcgcgtggaggcgcgtgtgatggcatcttcgacaacgttctttttttcagttcttttctcggttcttctaagcctactcgcttctgtctcaggttgtaattttgtattttttgccttcttcgtgtttgggtgttcattcttaggtattcgctttctttcttttctctttcatggtgatcttcatgaggaagtatatatggagcaacctttagggtttgttgcttagggggatataaggcgtgtttgtcgtctttcgaaaatcattatatggtttgaaacagagccttcgagcctggttcggataatttagtctggttgttgaaatttttttgggttgcaaaaaaaaaaaaaaaatctgatcattctatgttttacaaacaatcaaaatctttagttgtatatgtggatgacattgttataactggaagtgatactatgagaatcttatctcttaagtctttgaatcatctcagtttcacacaaaagacttggagtgctaaagtattttctgggggtggaagttacaaagagtaaaaagagtatcttcttatatcaaagaaaatatgctcttgagctattagataagaaaggaatttttggggcaaaaccttgtaatgttctaatgactcctagtatacaccttacaagagatggggaaactatttgaagatcctgagatatatcgaagattggttgggatattgaattatcttacaatgactcgttctaatattgcacatacagttagtttggtcagtcagtttatgtcatttccagctgttggtcattgggcagcattaaagcaaattttgtgttacttgaaaggtgcacctggacagtgcattgtctatgcaaatcatggtcactttgatattgaatgtttctcatatgtagattcggcaggttccaaagtggataaaagatctacttcaagttattgtatctttgttggaggaaatttggtttcatggaatagtaagaagcaaaatattgtactatggtaaagtgtaggatcaaattatagagttatggcacagtatgtgtatcaaatcatgtagatttatcaactcttaattgaagttgaacttaaacttcagctccaacaaaattgtagtgtgacaaccaagctgctctttatattgtatctaatcttgtgtttcataagcgaattaagcacattaaaattgattgttattttgttcgagaaaaaatctaactaggcttgatttttacaaggaatgtgaagactggtgaacaattaggggactttttacaaaagtttcgaatgaggttcaaattgattatctttgtaataagttggatatgatcaatatctatgcttcaacatgaggggatgtattagttgtgtgttagttgacttgcctaaattagcttaggcttagtttcctaattgtatcatttcctatatatattttttttttgaatataggcttagtttcctgtagtttcctaatataatttcctgtattagttttcctagttgtgtatgtatataggtgtattacttttcaatgaaatacaatttatttttcaccaacctttacatggaggaataactgccacatgcctgatattaaaatttcatacagatagctattcttacatgccaggagcatatagtgattattattttttttttaattttatctatttatttattttgcagcttcctagacttcctcggcatccaaatgttagtgaaatatttcagtggtatatacagcatagaacagaacagaaagaaccgtaagttatttttgttctgtttggacagtttacttttatctcctcagcaatatatcttcaaggtttttctaccttgttcaggacttaatcaatctcctattacatggcattcaattatattttccatcatttgttgagtaggcattcgaatttaatctaaatggataataatcattaaaaagttaggttgaagttacatggcattcgacttgttgattattatcgccttatctttctttctagaattggcgtggttgaaacttgttgagggatctactagagatagaaattgttgaagaaacagcaagatggttcttttgccttatcaatatgctcatttaaagggtctcttatcaaatgtataagacccaaattatcacattaatctattgttactttctacatgtatatactgctattcctacttgtaggtaacatttttcaccacatttgtgccaacagtggtaagcaacaattcattaaaaagttactccgaatttagagtacatccatattgtgaaaacttatgcaatttgcaacctttgcatatcaagatttttaacataatttgagtggacatatctaaatgtgcttattatccttggtacattttgtaaaccaaatcgatatcactagtaccttttactagcctaaagtctatttcattggttctcaatgaatttttatggaatctccttgcattgtacctactcccaatgctcatggtttgtgaaatatttggtgtagcggaaacaattacttgcatattagactattaaaccattcaagcatgttttcaatatacatttcttgagacaagaattaagtgattgcctttttccatccctaggattttctttccaactctcaaattcttcatgtcaaactttaagctcaattgagctttcaaattatagattcctgacatgtccgaacaagtaattatcaaaaagtcagaaactgattctgttgaggagttgcaccacctttgagatgctaccgctgccaatgacgaagccaaacacaatgtaggagaagttgacaatgccaaaaacaaggatgtcgatcacgactttaaagaagtcaacaaaaactgagactaagaatgaggagagtgtttatgtaaatgtgatctcttcaatcggtgacatgtggacggacatcgcgagcaaaacaaactctgctaaaaactagagtagcaactggaaacaatgacttactgggataaagaattttaaatagattctcaccattaattatagaggatggcatgcgattaataagaaagcatggtgtggaaactgcattggcccaaaaatgtttaggaactttcatttgaaacaagagggcaagtgcattttcaaggtgtttgtttttacgttctgctacaccattttgaggtgcagtatcaacataagaagtttcatgaagcatgnnnnnngaggtcatataagattgaaattgaacatgtgtgtactctttggcattatcacttcgcaaagtacaaacaaacatatttaattagttttgaatcttaacacaaaaagcacaacatattaaagacaaatcagaacgatttttcattaaatataaccaagttacacgagaataatcattcacgaaagtaacaaaatacctgaattcaaattgagacaaataggactccaaacatcagaatgaactaactcaaaaggaacactagcatgtttgttgactcgaggacccaaactaacacgatgatgtttgttgtgtaatagtaggattgtggttctcaaaaattcttcctcgagtcctatcatcctagcggaattttacaccattcctatggggggcattcgggggaaatgaaaacataccaatggttaaaacctgaggttttttgggtaggaatacggaaagatgtgctgaaatttgtataggagtgcaccatttgtcaacaacataagtattttatgtagctactactccagctggtttttacagcccattgccttgctagctcaagtttgggatgatttttccatagatttcatcgaagatttgcctagatcggaaggttgagataccatcgtggtggtggtggatagattgagcaagtacgcctattttgtcaccctgaaacatccatttacagccacaacagttgctcaagtgttccttaaaaagatagtccgcctacacggtttacccttgtccattatttcagaccgtgatcggatctttactagccatttttggagtgagttacataaatggcaaggtacaaccctcgagcgcagcaccgcttaccacccacaaatcgacgaccaaacagaagtggtgaatcggactcttgagacatactttcgttgttttgctaatgagaaacccaagcaatgggctaaatggttggtttgggctgaatattggtataatacttccccccattcgagcaccaagcttactccattccaagccttgtatggtagagataccctacttttgattcgctatcctgctagaccttcccatgtgtcggcaattgataccttgttggctgatcgtgatgccaccattgatgatctacgtatgcatctccttctagcccaacaccgaatgaagcataatgctaattagcacaggcaccatgaagagtttcaagttggtgacttggtttatctcaagcctcgtctctaccgatagcagtctttagccaagcatctcttcgagaagcttgctgcaaagttttatggcccttttaaggtgacaaaaaaggtaggcacaatagcctattgacttgagttaccagcttcctcatctattcacacggtcttccacatcttgcaactaaaaaaagcacatggctcgaccctttcatccccgactttgcctcctttgacacttgagttagagctgcaagttggaccagaagcagttcttcaagtgcggtagcaagctacacatggcttggaagacttagaggtcctcatcaagtagaagatcaacactaactttcctgaatttcaccttgaggacaaggtgaaagtgcacccccggggtattgatacaccaccaattaggttcacttattttttttggaaaagagagaaggagaccacttgacaggcgtcccccgaaattattaatgcctcacttgtggcggaagaaaaccgtggtacatagaaatgtaaaacaatacattgaattagcactttgagtgaccaatcaaacaaaaagaaagaaatcccgagttttacaacaaaccactccaatccttacttaagtctagaaaagaaagagcctcaaagtgtttggttttaaagacccatgtggttgtccaaaatttaattctctcgcaaacaaagtctgctgatctctccagcccttcgaaaatcctgctatttctttcattcaaggagacctaagaaacaagctctaaataatattagtaaataatagcataaagaataaaaagattagctgaagtgaccgtattataaatgagctgtcaaaatattagttattagttaatggtttttgttaagggtgtctataaataatagtgggaactgtaattgggggagggggaaaacaattattttgtgcagtcttgaactcagggtgatcccaggcttctcgaatttcctggaaactagctgaaattcaataaagctcaataattctttcttctccatctctgtacctgttctagtgtgtatcaaacaaatcctatggtctgaacagcccaaatcaaggactcattcatcgcttgcatcacactgttagaacactagtactatcacagccatatagctgcttctccaaatcaaagtaattttccttccctactgacgttgagtttcctcttgcatctagactttttgatgagtcttgaaatttgtttgtcgacgctcttttcttcaacttcttggggtttagtggtgtctcgacctcctttgcgtaagagtaccaccatcgtacgtcatgatgttgctgaagtgcttgttgaatcttgcgaagaaaggccacaaattattatttaatcttcattaattttgacatctatttctcagatgaagaataattttgttaaattcatccaagagctctttatttggcttaccttcctgcatttgtagagtgtacaatttcgttttctaatgtagttgattggtgaatgactttgtcgtgtacaagctttttttgcttcaatcatccttttcttgccctacagactcatccttttctttgtcagtccctacagttcgagggtttttgccaaaccttgatcaccagcagagtccatcattacctgccatagcagtagctgtaaaccaactgtgataccaatttggcctagcaaataatggacatgtagattattaaagggcaaaggaataatttaaaacacagaagaaaaataagacaaattatttgatgttgttaacaaatttgcttttatccacataaagaagagtatcagataaaaatgttgttaatctaaagctatggtcgagattgtggaatcacgtgggtgtagtttttagaaatgttttgccattcatggacacctttattttactgctttttatggtttaggtacagagtgatcaagttctaacaacatccagcagccccacttcattacttgctttgatatataaaaccatgatatcttctctccaaactgcagagagcaacaagcaatgggtattgagcagaaatatttagtattttttgctgctttggtagcaaagggtccttgatattttgagtgatagtagtttgtagatttgcatatcctttttctttcgatgcctgttttaaatcattttgttgcccatttattattcttcatattggtaattttctacaacactttggcatcaatttttgtgctgtaagccatctgatttaaaatgaatgttcttgtacatagttttcgccaagttattttttctctggaaagaacatttcatatgttgtcttgtggattcagatcagccgattcagttcacgaaattatgaaaggattgcaatgttactttgataaagcattgccattgaggcttctatacagcgaagagcggcaacaatatgagagagcaatggcagcatatgacctcactccgtcacatgtatatggagctgaacatttattacgtctttttggtatgcttctaaaatgttttgtgtttctctgacagatcagataatatttgtgtcttgatgatattgacatttctaggatatgtaggatttaaaggctcaatgaaaggaaaaatggcctgccttgacctgcccgtacaaaagcaggatttcttgtttacaacaatttagccttgtttatctgcagtgcagtttttaatgtttcacttgtgaactttgactggcaagtgttggttcaaatggctgggttgttggtacaatattttattacacgcgtgtgttgccttgagcttcaaaaggtcacaaaatagcttagcctacatcagtgttcgctatcaaattttgcagtcttccaagatttttgagaagttatatttgtggtttgcaaagttctgattatgtttttctttgacgtatgaagtctgcaagttttgggatgctgtgaatctaattcaccctacaacgtgcattattttattaatcaattgtttgatgactttgaacacattatgtttgaatactactgatatagtaatagtgataagaacaattaatgaaaccaggtggccaaagctcaatatacccctctccattcaattctttctccaatatactctacccaaaccgtacaaccttccccttactagttactacaattagccaattactctctttatttaatatcccaagtcctaacatatgcttattgtacctggataattgggcatgtagatgttctttttctttttctgttagcttagctagttgtgtgatgcttatttaatttattatctgttacatgagatgatgcttttgttctctatatttttacacatttaattgattattttggtaatgttgcagtattgatgcccgagctactgtatcatgctaatatggaagaggaggcattggtggagttgattgaaaattttaatgattttctcaagtatatatttatcatcctgactggatttatatctaattatttcttttttttttataagtcctatacacaatattctaaatgacaacaattgaatcgaatgatttttgaatcttatctattttctttgaataagaattctattactattattatttttctctagccatgagaaataaattgtgattaatttttgacaaattcatttttaggtgatgtagtttaaacaactttacattgtgtttattttccttgttcattgtgaccctctatagtctagtctaggcagtggttgtgcaacttgtaatctatatttgggataatctatgtttcttctgtttatttggatttcctcattacactttactaatacctataaatatatatatgtatgtattttgtgatacagatacctacggatgaatcaaggagcgtgtttccgcagtgattgttacattgctgatgccgcggatgatactgactccagtaccgacaagccagaggacatagtctaaatctgtgcttctactgcaactcattgaaaagacattgttatgatgtgttgttttgaaaaccaaaacgtggtttagtttttaactatctagattactatgtactaatgttagaaagaacagaaccagacttgtttagttttcggtttgtgtcactgtgactttttgttagaaattctacggttcccccaaatgatgataattatggtgatgaatgaactatgattctcttgtaaagttataatctatagcggcaaacttatcatcgttagttgtttggtcggaaaaatgtgatgcgaattgttgtattatcatgctttttttttcctgtcaggtttatctgttgacgtaaaatttgttggacgtttctaaattactacgacactcttctccacacaaaaacgtaagttttttttttttttccaatatttatatatatatatttacattatgacagttcacattgtagctatagtaaatctcgtgaaagtttattgatgagaagagaaagagtgtctgcccatgttcatgctctgaggcagtttttagttatttacaatttttttgatccccactttccttgttcttcctctttcccttgattttctaatctcaaccgtgcctgtcatatttatcatccttctctgttgttgcattatttctctttgttatccatgaatcccctacttgacaaaatgaaatccacaatgtcacttactgaaaacgaaagtaccattctgaccattactgatgatggttctgattctgtagtcacaaatgaattcattctgattgctcgagttcttactagtaaaaaagtatggtcatcaacgtttcagcgacagatggctgaatattgggatggaagattcaaagttaacattaaagaacatcattctgatatgtttttgctctgtttcagttgtgaaggagatcgagttcgggctttggaaaaggagccttggcatttctaaaaccatcacattgctcttcttgatccaactatccatcttaatgtgactcctgaacttatgattcatactcctttttgggtgcaagcttatcgattgccatttttgagtaagtctagatctcttgctagatctttggccttaattcttggagaatttctggaagtgtatggtgattctttaaacgagggatgggggccgtttttacgatttcgagttagactcgacattactaaaccactcttgaggggtcggatgattactctccctaagatcaaagatgagttctgagtagagtttcgttacgagcgtctaccaaattactgcatggagtgtggtcgaataggccatttataccaaaaatgctctgtcttcctggagaaattggataatgacatagttcctgaactgccatatggaccacaattgaatggggcaagattaccaacttcttcttatgaccgttatcgcacagatttttccaaaggcaatgcatggccattactcactcggttggcaagaactactttgactgaaactctcccgacactttcctctattcctccaccacaaccgattcctttcttgttgggtgaatcgtcgacttctgcagcaatacaagccaactaccgaccaagcattatcccaaacataactactggttcaagtggttttgtctccaactctcctccatctttatccctaaatgcgcccatgtttacaccacctactcttaataataaatcctatagtaaaacaccactttgttccaacactgcaaccataactgctgctacttcctctgccacagacattcactatcagaatgaaggaaagcaggttctcacttctagtaactgtccaaacactgcagtcaagttagatgtttatacccttgatctgataggtgatggtatttccaactccaacaaatgctcatcaaatgttttcgcaacataccctccacctacacaccaaatttatagcactacatttccttcccagtctaccactgttactgcccccacaatctcctctgtgtccccacctattttgcacactacaatgacaaatctcggaggacaggagaatgcatcaccaaaccgtacctataagtgacattatgacaccaattcaatgagacaaactctaaaacgatgtcgagccaaccgagctgtcatggtttcttccttgtcagaagaacttgatccaattcagtctgtttctgctgctgctggggtagattcaactgaagctgatgacaactccgcggtgattgctcagcaatcccgcgccttgccatgaaaatcattagttggaatgcatggggtttggggaatccgagtgcattctgtcgtttgcgtttgcttgtcaaagagcaaactccccatgttttgtttctcatggaaacaaaggttactgttcattctcttactcgttttaagcaatctttgaatttcaataatgggttagaagttcctaggacggggttgaagggtggaatcatgttgttgtggaaggatattgtggatgtaactcttctttcaatgaatataaattattttgactgttatttatcgtgtgatgatggaccccgatggcacttatctcttgtctatggttttctggaaactgaaaataaaaagcacacttggacactaattaaacgattacatgatgtttctcctcttgatccttggatggtgcttggtgatcttaatgaaattttctctcacactcataaaaatgggggacctttaagacctgacgcacaaatgagggcttttagaactactttggatcaatgttgtttgaatgaattgccttttcttggtgatgattttacttggtctagaagtaggtaaaatcctgctgctcttaaggaaagattggattggtgctttgtgaatactgtttggattgacacttttacgaagccttctgtcacacaccttgattactatgactctgaccgtagagcaatattgattgagattaatttctctaatcaattggctacagagaaaagaaggtcaaggtttcggttcgaacggatctggttaaatgatgcagaaagtgcgactattattgatgcaaattggaagcaaaaccagcaacttaatgaagacattttcacacaattatctggtagtttacaaagttgtgctgcttccttgcaacaatggcacattggtaaatttgggcacatgaaacgtgatattaaaaaggcacaaaccagagtgcaacaactgaattctagtgtcacaccagatagtaatttttcaaataatgtgcaatcagctgaagcaatattggatgagctttttgccaatggggagcaatattggcaacagaggtcttgggtagactggctacaatccagggatcgtaacacgaagttttttcatgccaaagcttcctctcgaaagtccaacaatcgaatcaacaaactacagaatgctgctggacaatatgtttattctagggaagatattgccactgttatcactcaatattttgcaacactcttcaaagcttcagatgaggatcactgggccttgtctcatgttctctcaactattccaactacaataacagatgcacacaatgactttctcttacaagatttcactaaggaagatgttcttacagcattgcaatctatgggtgcggataagagtcctggcattgatgggatgtctgctatgttctatcaacacaattgggatactgtgggtccattggtttcccaagttgttttggatgttttaaacaatggtggaaatccagttgcttttaacaagactctaatcactctcattccaaaaattaaaaagccaaagaccatgaaagaattcagaccgattagtttgtgtaatgtggtctataagttgatttccaagatgatagtcctacgactgaaacatgttctcccatatgttatctccgaaactcagagtgcttttctccctaatagattgattacggataatgtactggtggcctttgagatggttcatagtttgaagaatagaaagcgaggaactaagggatatgccgcactcaaacttgatatgagtaaagcatttgatcgtgtggaatggtcctacttggttgctgttatgggtaaaatgggttttaacattcgttggattacactcattatgacttgtctacataccacctcattctcattccttgtcaatggtgaaattaaaggtttcctgagcgtgggcttcgtcaaggcgatcctttatctccatacttatttctgatatgttccgaaggtctttcaaggcttttaaaatatgaggaggctattggacggct

SEQ ID NO: 14921 - DNA, 8431 bp, Cannabis sativa
taaaatatttttcatgtggaagaactctaaaatatttttcatgtggaagaactctaaaatatttttcttggcaatacataaaagtattttctttgctatatacaatttgaaattgttaaacccttgtaaacttgtctgataggtaccttctaaagttatcttttaccgttttttcataaatgtgtcctttatcatttgtagatgccatttaaattagaatctcttccccattttttaattgatgcatgttttaacaggtttattttgaattttggctcgtattttggtatctaaattttttaattggctgtttgatgggatcttatttttggagactcgaattatttaatttttgttcttgaataatcttgtgaattttgttttgttttatcacctgctgacagcggtttgttcttacttttaaggagtcttttattattattttgatgtgtatgtatatgattttttaatattcaattttatcactttgtgacaggtgtggaagagaaatcatttggcaaggcagtgagtattgataatgatggtagtaacttatgtggctcacctggtcctgtgtctcttaatcatggtcctgtgtctcttaatcattcagaaggattctcgtttaacttggaaaaaatggattcaaactcaatatcaacattgggctcgtcactagttgagttactacagtcagattatccaagttcagtggactcaacttatgtgaggtctactgcaattaataagttgctgatatggaaggctgaaatttcaaagaccttggaggtgaccgaaacagaaattgattcacttgaaaatgaactcaaatcattgaaatccatcactatcggtagctctccatcagtttcttgttctttgcctgcagaggaccgtttaatatcttctgaagaagaagttatcacccatcttgtcccacgtcctgctctgttgcaaattagatccactgatgatgcagttgcggaagagttaccaatcagcaatagtgataaggaagaagcttgtgcaaatgtgaaggctgaggatgttgatagtcctggaactgtgacttcgaagtttgttgagccattatctttggctaaagctgtatcttcttcggatttgttgaatcatgctactgggaattcggatggcattccatcgaccaaccaagatgtgcaacactcagtgcctggttcaggaggagaggaaactgttccagatacttatgaggattgtagtatgctaactgagggtgaaataactgcacctataattgatactttgggctcatgtactgacggagaagttaaattacagagtgtcattttgtcgtcaaataaagagttagcgaagggagctcatgatgtatttaataagctattgcctcaaaatgaatttagcctggatagttctgaaggtctcaatgcctcatctcagcaggattatacactagttaaggagaaatttctgatgaggaagcagtttaaaaggtttaaggagagagttataaccttgaaattcagagcgttccaaagcttgtggaaggaagacatgcgtttgctatctataaggaaacaccgtgcaaaatctcagaaaaagcttgaattaagcttacggtcagtgcataatggttatcaaaagcatcgatcttccatccgttctcgtttttcttcaccaggtgaccagccttctttcgttttgaactggctattatgatgcatttataattgaaacaatttcgtgacccttgtgagtatactaagagctgtggattcattttagtcagctcttgtattatgggcttatttttcgttttatttaatttttatgtttggtttattctctctttattgtagtgtaatgtagtttagtttaaacagtagtcaggagggaattctttttttccccaatagaaataagaaaaaacattagaacttagattcagtggtactatggaggtattgagattaaattgggaagtggaggagaaagtacattatgtattagggttaagtggaaagaactgtgatatttcttattgctagtctgttctcctatgaaaagctgtgtacttcgttcattagttcattctactttaaaggatatttattctgacagctgagtgtgaggagtttacttgagctaaaaataaaacgccatggtaacaccatcaaacaggaattatttacaaagaatgccacaagaacggagttttggatttttattatctgattataataactacacaaaatatatcatttttttaaaacataaaagatatcattatcaccattgaatcttggtgtggacaaagtaatctgtataagaaagtatataatgccaacgaactatagtctgaccagaaagcaggattttggatgtggcctattaagatagaagtaaaagaagatgttggccataatagtagtgatatggcgaaatttaaatttaggactgaattaggtttgtttgttttttttttgttggttgtgatattatgccactcaggtctgtttggatagtgggattgaattaattaacataatagaaaaaaaatataaaaaaatgaaaggaggttatttagtttggattatttttcaatattcttatttgtttcataacaaatcaatagatcaaaattatctgatcctactctcaaaatgtgacaatagtgtatgctaaatcattaatggtgaaacatatgtttttttttaggtatgagctttattgtttaatttaaaggtgaaagatacttttgagcacattttatgttagtctagagaatgtaggtccatatacattatggtatccttttttttatcctttccactcattctaatcctgaacaacttgaatttttcttacagcaggaaacttaagtttggtccctacagcagaagttgttaattttacaagcaagttgctgctggattctcaggtcaagcttcatagaaacaacttgaagatgcctgctctgattttggacgaaagggagaagattgtgtcaaggtttatttctaataatggcttagttgaagatccctgtgttgttgagaaggagagggctatgattaatccctggacccctgaagaaaaggagatcttcatggataagctagcatcttgtgggaaggattttaaaaaaatagcctcttttcttgatcacaagacaaccgctgactgtgttgagttctactacaaaaaccacaaatctgattcttttgagaaaaagaagaaattggactgtggtaagcaggtcaagtccttggctaatgctacatacttgaagctaaacaaaaagtggaatcgcgagatgaatgctgcttcccttgatattctggatgtggcttcagtgatggcggctaatgctgatgattgcatgagaaatcagaaggcatgctctggaaggttgatttttggagggttgagtgaatctaaagcatcacggggtgattatggtactgatgaaagatcatctagcattgatatcgttgggaatgatagagagacatttgctgctgatattctggctggtttatgtggatccctatcatcagaggcgatgagttcttgtattacaagttctgttgatcctgtggagggctacagggagtggaggtctcagaaagttgattctgtagttagacgtcctttaacacctgatgttacacaatatgttgatgacgggacttgttctgatgagagttgtggggaaatggatccaactgactggacagatgaggaaaaagctatctttgtccaggcagttacatcatatggtagggattttgccaagatctctcagtgtgttagatcgaggtcccgggatcagtgcaaagttttctttagtaaggctaggaagtgccttggacttgatctgatacatcctggaccagaaaatgaaagaacgtttacaggtgatgatgctaatggaagtggaagtggctctgaaaatgtctgtgctcgagaaatggggtcaggtatttgcagtgataagtcaggttctaaaatggatgaggacttgccattgtctgctgtgaagatgaagaatgatgaaactgacccagctgagaactttacttcactaactgcgcagagcaggtcagaggggaaaaatgaaagggagcaactaaacagtaaaagaaatatagacgcttcagaatctcagctgtctgattcatgtccaactcagagtgagtaggcccaatgtagtatctgtctgatggcgatagtaaaagaaacattgacgtacagagcaggttagaggaaaaaaatggaagggaacaactaagcagtaaaagaaacattggcgcttcagaaactcaggagagtaggcctaatgtagtgtctgatggcgatagtaaaagaaacatcgatgcttcagaatctcaggagagtaggcccaatgtagtgtctgatggtgatagtactatcacacaaggtgttggcgaagcaaaggttattcctatccaagaaacactccctgtgttgtccagtatagacacaggaagagatgatggggatgaacaagggacttctgttgcagaattggaatctgttagtgagggaaatgaaaatgataagctattcaatacagaatctgtggttgggaagaagcctgtagatgaagtatcttctgatgaacttgcgaacctaatggacaggctagatgagaagtgcaatgcaagtactagtgggcaaagcggcttagactctgtggtacaggattcaaattcaactggcaatgcttcccacatgacttctgatagaaactcctgttcgggattcagtctgaacccggactatcagcgtcaagtttctatagagttgaattccaaggaaaagtcttgtgtaatcccattggctcaagagattcctcttgtctctgcaaattctatatcgctgaactctggtgctattcggtgtcagaaaaatggtaatgaagataaaatgtcatcactggattttcaggagagcagagatgtgtgtcatatatctgtttgtaaagatgaatctaatgcccatgtaacaggtcttcctatattaaccgatgctcaatcctcccaggttctgagggcctgtccagtacgaatgaatgttaaagtagaggtgaatggggatgtcaggtgcagaaattcctctgaagttcaaggcctttccagctcagaaacaagtagcaatgcttctttattgcaaaattgctatctacaaaggtgcagcaatgtgaatccttcttgttcaacgactcagtttccactcatgtctcaaaatacagaacaaggaagtgatcgtcgaaaatctcgctcgcagagtttgtcggattcagaaaagccaagcaggatcggtggtgatgtgaaattgtttggtaagatacttactgctccatctttgccaaaggcggattccaattaccgggataacgaagaaaacgaagggagtaacaaccataagttgagcaaccagtctaacatgaagttcgggaacctccacaattcagatggaaattctaccctcttaaattttgatcataaaaattatttgggtattgagaatgttcaaatgaggaattactcttattgggatggaaacagattgcaagccacatttccatctgtgccggattctgcgattttgctggccaagtatcctgctgccttcagtaatttctctgctccctcatctacaatggagcagcagtcattgcagtcagttgtcaatagtaatgagctcgatgtgaacggcgtgtctgcttatccgaccagggagattagtaacagcaagggaatggttgattatcaggtgtaccggagccgagaggctgctaaagtgcagccatttactgtagatgtgaatcagagacaagacatgttctctgaggtgcaaagacggaatggaattgaaactatttccagctttcagcaccaaggaagagggatggttggaataaatgtcttggggaggggaggtattgttgtcggtggaggatgcaccacgggtgtgacggatcctgtggttgcgcttaaaagacactttgcaaaaactgagcagcaatatgggggccagagtagcagcattatcagagaggatgaatcttggagagggaatggggacatgagcaggtagtagatgttatgttatgccttttagatgaatggggtctcccgaacgcgggcagccctttcgagcggcaaattcttttcattgccgcccgttgtattatagtttttgtattggtcaacaatgaaatgataggggggcaatagaggggtttattttaagttcgtctttttggtaaagtaatcttgttagatgcgcttgtaatattccagcagctttgtatttgtatttgatataaaaaaaatacagaaaataattcgttaaaagttagtagtgggggggtagtaggaggttatttgattttgacttctttttacatctcattaatttatttcctcaagttctctctctcttccctttacaattatggttttgattttaatgacttctgcttcttttttgtcttttacctgaaaagccaaactctctctctctctctctctctcactattattaacttacatgcttgtctaggcaattctttcaacaccaaaaatatgcatttctgaaatgtggtggttttcgtgcgatggtgattttaaagtgaagttagtggtcatagcaattgacaaataaagctttgtagacaataggatctggtggtcgatttcaatacaaattaaagttgatacctgccaatttgcaaaaaagaaaaagcgaaaaggagaagggaaaagctttcatctatttcataaccgaaataaaatcaagtagaagagaatatattacttttctcctttttgttttgttcttccatcacttgtagtaaactaaaaccaagcaaagtgtatggaagatactttaacaattgttttataatttttttttcttggaggatattatactttaaatgcaggaggagcaaaaggagacgatacacctatatgactcaatacagtaatgaaacattacgcatcagcacaagcacatgctcacctgcatgttttatcaaacgcaaagataaaacaaaaagtcttgtaatctttctaactgctaactcatgcctatctttcttgcacttctttccgtgtccgaaggttgggtggaagaggcgctgagattatgatcacctgcttcattccattaaaagaacaaaaaaaatatcttacaagaacgatacatcgatgaggcttcatttgtttatttaagtttatatgaaaaaaataattaaaccgaataatctgacagtatattcattagaaggaccaatcgcagagaaccccaaagcaaaatgagaaaataaaagcaactggaggaatctcaagaaaaatgtacactaattgagagaagtataataaacaaagaactgcttgtgtgcattctaaactagtagcagttaatttttgaatgcttaatcctgcttacctcattggtggttggatgagatagtgtaactttatgagcatgtaagctgtagccacagtccccaggaacaggtttcgtaggtctcagaaaccctctgtacacaaatattgatagaaaataaaatgaaacaactttttttcaaaaagagattctatccattataggcaagggaaatcataaacacacccatctaatgcgaaattttcatccagatattcagaatctgagcgctgaggtccaccaccaacaacataaagagggtcaccttcaaaaagacaaaaaaagtagtacagagttcatgtctagttgtagcataaaagattgcttgggctacttctaattagcattgctctctagaagaggtattcattatcacttatttgcattgtctaaaacagctaaccggaatttttttaaagtaattgattaaaaatattataaatttcttttgagttacagagaagatactaattattgggttttatgccagaaactttagcatgggggggtcatgttggcctggcttcaactaactaatgcaaccaacttgttttctctctgacttctaaaattttcagactcactaaacaatactcaaaacatgcacatcaaaaaatgtttacctagtagagggtgtccaatgaaagcaagatgaatacgaatttggtgaggtcttccggactgaatctcaacctgttagatatgtcaacaagatatacgaatgagaaatcgataaaacataagaaagaagttaaagcacattatgagtaatatgaccaatgtaatccacctggaccaacgtgcaatttttttctgtgtctctctctaggacttcaactttgctaagcgctggttttcctggatcagttaaaaaataatggaagataaaatatttggatgatgttagatattagatgtatattagctgtaaaagaattagatattt

SEQ ID NO: 14922 - DNA, 8102 bp, Cannabis sativa
  modified_base (7934)..(7937): a, c, t, g, unknown or other
cttgctcaattggggatttcacggatctagatctgacagttctttgtttgtccatggcactggccaaaatttagtgatctttctcgtctatgtagacgatattttggtcactggacctaatgcagacctcattacaaaacttgttgctgatctgaataaaagtttttctctcaaagaccttggtccggttcactatttccttggggttgagattttcagggatgactcggacatgtacttaagtcagacaaagtatattgctgatttattaaacaaagttcatatggagggggctaagtcttgttcgaatcctgcaagtgctaatactaaactgtccatgactgaaggggaaccattccatgatgttactctgtaccgaagcaccataggggcattgcaatatctctctctcactcgtccggatgttgcttttattgtcaacaagttgagtcaatttttacaatctcctactactctgcactgggaagcctgcaagagattactcagatatctcaaagggactatcaaagaaggtttatgtcttaaacctgctgctgctcctacacttcatgcctattctgatgccgattgggcaagctgtgtagatgataggagatcaactggaggctacttggtatttttaggaggaaatctcatcagctggtctgtcaaaaagcaacaagttgttgcaaggtccagcactgaaagtgaatttcgtgcgttagctaatgccactgcagaacttaaatggatccgatctcttcttgctgaacttcaagtgtctttagctcactgtccagtagtttgggtcgacaatcaaagtgccactgcacttgcagccaatccggtgtttcatgctcgatccaagcatatagagatagacttgcacttcgttcgtgatcaaattctggccaagcaaatatcagtctgttatattcctgccatcgatcaggctgctgacattctcaccaaatctttgtccattaatcgctttacatatctgaagtccaaactaaaattggtctctaccccatttagtttgaggggggatgtaacagataactaattgtggttatgtaaagttgttaaatcagttagttgggatgtcttgtaactaactttctggtttttctgttatctggttttcttctttctttgtctatctctttgtataaatactggattagtctattcaataaagcaaggaattcatattctcttttcattttctctgttcttctttttctctgcttttctgtttcactacattaattgattgttctaattatttgatgagaaaatatacataactttctccttattaaaaggaacaagaaaaaattaaatgaactaattttgaagccactatcccattaattgattaattaattaacaataattttacaaaaaagtgaacaaatataaattgactgaaaaatcaagttattggatgcatacacacacacacaccaaaaagaaaaaagttgaaaattctagcacaaggagtgatgactggtgatcattaagatataggtaggttgtactaataaattagttggtgaagagtgtccttaagagctaaataaacagcctgccaaccctgctgagttgggtgtgcatcgtcccaaaagaatgcagattcaggctttccacaaatgctgtacatctttgtaccattctcattaacactcccacatgaatgcccactacttgttccaacacaacatggtttcaatggattctcaaactttatagtacctgcaaataagtagtgattaatgattataatgtgttgtaaaagagtaatttgttagtgttgtattaactaaaattacctaatgggtctcctttgttcttgaatacggacatgaaggaagaataaagatcgagaatgatgatattagaatcttttgaggtttcgttgtttagcttggccactgcttgttgcaacaagaggttgtggaggttgacgagggcgttttgggttccgttgcattgctggaacgagcttgccgccgttgctggtggaagacaacccaatggctcaagagctgtcactgctatcttcttcactcccaattcatggatttgtttcaagttcacgtatagctggttcaccactgatgtaataaaagctggaaaacccttttagcaaaaaacaaaagcaaaatattatgagttctctatgatggtgtatttggtggaatttcaaaacttgagtttgagactactctaaaaaataaacttaaaagtgggattgatccctttaatcataagtctttcactaaaatcatatcaaacacaaatttagttatacatttccaaatccccattacaaacatttagtaattattaagctaagaaacattttttttgtttttaggctaatttcattgagattgttacatttaaagacttttgtctaatttcattcaattttactatttttagtgattatttactaaactatgcttcccagactttgatttctatcaaatcatatttttcgaatttttacatgtactaaatcatgtcccctgaactttcatttatgttagacttttttctattaaatttagataaaagtttttaaatttaacaatcatagaagtaaaaatccaaattaatttgtttttaaataaaaattgctaagaactcggcacttttcaggtgtgatatcattaggcttaaacttatgacatttgcaatttaatattatgtttgacttgatatactaatggtgtgcatatatgatgcccattaataattagactttccacaaggaaaccactaccataactatttatgtatgaaccttagaaaaaaaaaaactatttacttatgaaaatataagtaatcaatgcaaaaagtgtcctatccaaatatatgattctatatcaacctaccttctagtggtatttatattttttccagaaacttaattgttatctgacattgattggttgggacaaataatttaatgaaaatgtaatatatacattataaaaacatagaaaaatcagaatgggctttcaagatacttaagagacaactcaaatttatgtgtcagttccaaatttgaccaaaatgaaagatatttgacagtcttttaaaatttcactgtaattgataataacctttgcaatgctacttttttttttaaatgaaaatatcaaaatgtaagtaattttatataagatgatattagatagtgtatttttagaaatttaatagtatcctgatatgaaaactgaaatatttaccgtatgcaaagtttgatatatcactttttcatcaaattaccaaaatttaaaataatttttaatatattaaactttgacatatatttcctaaggagtaactttttattcaaatagtaaaactgttatttctttagtacattaattaactttagaaaacgatgtatgtgattttttaaaatatattttctattgaaaataattgataactatagtgtaatcaactaatcattttctatttgaccttttgaagtagtgctaatattaggcaaggccccacctagaaaggattataatgaatataaagaagccacataattaattatgtatatatataagtacatgtgcgtgtagtatagtgtagtgtgaaaatatgcatgatacaatttataataataacaacaaaacactaagtccattcgagaagaagacactcgaacgagaccaggatttttctggaccagacagatataattctacctaacccattaacctaaacagagatgcccatttcctcctaataatttataaactatacatacatactcaaatcaagccccactttattctcaaattattcattttgttattgaactatatatatatatatatatatatatatataactagtatcatatataagattttacactaaaattatacaagcatctccatattaaaggggagaaaaataaatactattaaacaaaattaatgcatttttatgaaagaataatattaatatataaaatttgtacacacctcagcagtgccgtttctaaagatataagcaccgtagtcattgccggcgacggtgactaaagcgacggcggattcaaggtctttgggagtgaaaacagagtgactaatgaggttattgaaggcattgatctgaacagtcatgtttgggtccataaccaaggtgttgaacacaccagtcccaccatgggcaaagttcattccatacttcaagtgcttataacctacaaccttcctccattggtatggtattggagatttcactcccacaaacttggctgatcacaaaaacatatccccacatccaaatttttagatataattttaatttgagaaaaatgcttaatctaatcaattatatttgtataatattttgatgtacattttgtgtatgcataatcaatatatattttcttttaaagcaataaataaactctataaggactaaccaaaaattatttagctaaacaagttaatcaatcctaaaacatgcgcaactaattataatttgaattatgtaaataaataggtaattgatgttacaatcaatggtttatttaattttgttaatatattttccatttttatatatatatggtagcttagttacgaagtgagcgtactaagtattatcttattgtttgtgatcggggaggaaaatgctttttttgatcaaaagaatctcaaaaaagaaaagttagaaatttagaatgataaagttcttttaagaactaatatttccaattttttaaaacttcaaattatgtgtcaaatacaattgataatgactggtgacagaacataaagctaaccccaaaaacaagaaaaaagacagaatggcgctggcaatatctaataagcttttgatttacaatatactaaagtaaataaaacttatctctaatagtttaaatttaggctaattaagatttttgtctacggaattttgacatgtattaaattatgccctctgaatttttaaaatcattaaatgccccttgaacattgagattgttggacttaagacttttgtctaattttactcaattttattatttcagtgattgtttatgtactaaaccatgctctctcaactttgatatctaccaaatcatgaccctcgaactttgacatgtattaaattatacccctaaattttcatctatgttagacttttttactaaaatttaagaaaaaatctttaaatccaacaatctcaataatttagggggatttttaacgtccttaaaagttcagagagcatgattttatacatgtcaaaatttaatggacaaaaatcctaattagccttgaatttatagaagattttaattatttcatattattattacataaaactcgattataataaggttttattgttctaaacaatatttgtcggttaattaaggtgaaaagacatggaaagtgtgcagcttttctcacgtagccagcaaagactctaatacttatattatttgatcaaaactcaagagatagcactaatcaacaaaaactaaaattatttataaacaaaagaaagaaatgaaaaagaaagagtgttgattaaagggttcatttttaaattgagtatgattgggacaaaggtggggtaaactgtaaagtgagagccagagccaaagttttgggcaaacgaagcatgtatgtaagcacaattaattaaaaacactgaaaatgataatgtccaaagaaaaagaaaatgtttttaaagctgaaactatcacgtgagaaagtaaccaaaatgtatattatatgatggcataattctgacacataatatagtaagaaagagaaaaagtaatatagacttctcaaactcgatcaataatgcaaaaaattacacataaacatgcacaaaaaataaaagacccacgaacaaagcatagatagatcttttagaacaattcaataacgtcccaccactaatttaaagtctatttttacactattaattatttgaatgagtaaataaataaataaagaggcatttattaaagcaagtccattaaaaggaaaagaaggctaaagatagaccccactcaagtccaagttaaataaagaaaaagacaaaggagagagaaagagagtatagtacctaggaaatcggtcaagacacgaccgtcggaaaaacggccggtgggtttgccggggaaggtgattccatagggaaatttccaagaactggcttgggattttctgttgttgcctgtgtctgaataagaatctccgaacacaaaaagctttgttggcttaaagctaaacaggtgagaatcatgaccatggtggtgactgtgaccaaaaactatacatttaagaaacaaaaataaattagaattaactaacaaagtacagtgagactaataggggtgattaaggaaattaattaattaatttaattaacctgagagaagtgaggctaagatgaagaagaagcacttgaaaagggaattaaggttgagcttgtttgaatccatgtctttctttctttgtttttttcttttttgggtacacgagtaattattaagaggttgtaccaattttttttttctttttgttagttttaagaagaagaatgaacaagctttagcttctattgaagaagttgatagagttttgtgaagaatagacagttttttatgccttatttatagtacacgagctttgaatttttttatttttttttttgggaaaggatttccgttccgcgttggttctcaccgagctgtgacccagtaaggtcaacgctgattttgtttgacaaatatataaaattataaattggaaaaggagggccatcatttttctattttggaggaaagaaaaaattaagaattttatggatatattggagtatcaaagagggaggagtataaattataatatcttattataatttttttttaatttttgtatttgaaaatatatgttagaataatttttttaataataatattatttttataaatttttgagaaattctaaataatttatattagatgcagttgttaggtgctcatagttattttttttttaactaattctctatctaacctattcagcttgcatttgtagtacttttgcttagattcattaataaatgaaattcgtttcaataaattttcttctcttcattcttattctcaacatagtattagagtagcttttttttttctctccttcagtgcattgttctctctgattgtcttcttctctctctccattctctattcatttatgcttgcttcaatggccggccgctccaataactccaaccttcaatcatgttgtttttactcataatgtgtttgtgaagcttgatgacaataattgatcttctctggcatcctcaaattctctcagctattcgatcatcgactccaagacttcatttccgattttgttcaacctccacacaagtttctcacttaagaagacgaagtaccaggatagatcaatcccagatttcaagagtgggaatgtaatgaccgcatattagattatagattaataaagacagttagtgttaattattgaaatttaataactatatatgattttatatttgttgtggactccatttttagaaatggacattagaattataatttcttaatttaagagattttattaaactctaagagtattatttatacgaattataaattatacaattttcatgatttttgctcggtgacgatgaaaaatgcaatgaatggttgttagagtcacatgagtaagtttatgtaacgccccgatatcttgtcttacttcataaaaataccattttatatgcataatttgaaaagataaaaaaattcttgaaatgcaatagtggattttagaaattaaaatacaacaaagaagtatcattcatttgtaaaacaaaatatgatnnnnaaatgattttaaataatacatttccattgtctttttagatttatcaacttctttaaaataaaactaaggcaccaccggcgttttagatcgctttcgcgtccgtagccgctcacagtatacgtaccagaactgaccctgctcactatacatacttccctgtctaat

SEQ ID NO: 14923 - DNA, 8509 bp, Cannabis sativa
tcaacttttttctacagttttgctacagctgctttttctcacagcacagctacagttgctttttcccacagcacagctgtgctaaactggccctataaagggtatgaaattttggaggttttgacaaagacaaagacaccaatagtactagatttaattgacagagacactaacatttctcaaagattttgtgtaacattttgttaattattcgtctcctaagtgcacgaactgctaattcatgtgtgtgagcataataatcgaacaatgaccatgaatttgagatgttaactttgcaggcacatccgagcgcatcaaaacacgagcggaagactctttgcaggctaatagattgccgtaaactatcgccagaggcatcgctccacgcagcacagaacgagagattgccagtacgagccgtgatccaagtactattctcagaacaatccaagaacactagtagaaacaatgtgagcgattggagcgggtccttcagcggggcccgaagcccaaacccgggactcgagcaaccgacccggtgcttatcgaagcgggaaatgtctgtccagcaaatggagataaggaggcttaaagatgacgtgcttaggcttcaaagtatgtgcaattcaatgcaaattcaaattgagaaactttctgagaagaagaacaagtcttcttctaatggtgggttttttaggtggaagaagtttgggtttgtgcctttgtcaattaaatctaatagtactggtgtgagtaacagtgttggggatcataagaagaataatattgatcatgatcgtgatgatgttgttgggtttgatcatcatggacaacaaactccaattatgaacatgaaaaccaagttgatgatcagaagaggtaggagtccacccaaattgagaaaatccatgtcttaatatataataagtatgattatgtatttagaattacaatgtattaatttgtgttactgctttagtatgtaatgtaatatcatgtatatgttgcttaataatttgagttttattgccataaataataataagtttttgatattatatattttgatgatttgattaagcttatactttatctttagacagtcaaatagttaattgtacattattttaaaatttttaaaattttgtagatattttaaataattataatataaaatagtagtgcacattgttataatttttttccttcttaaatcatagtatagtgtaccaaagattttccactaaattaaactcattcaattcattatattatatattcaaaaaaattaatgatttataaactactgtctcaattcatcttatttcattagatccaattcaagatatgatatatttccgagtctttaagttagtagaaatgatcatacaaaaatactctccacaatttcgaacgagtttaaaattattagttcaaagctaacagctaacttggcaagatcaatccataaaagggattttttgatcttagcaaaaaggagatcctcacctatgcgaattgtatttttgatcggatatggactcaaagaaacaacctttgcttgaaaggtacctcagctagtattgaagtggctcgagagagagtaaggcaagcctacttcgattattatgcctttagtaatagcagcttagatagttcagattggcactcttttttggatagcagattgctaaaggtagaggttaatcttagaaaggtgtcatttgtaagctaaactttgtgcaattcatatggctctttcttgggccattgaaaacgattggaaagaactccatattctttcagattctagacaagtaattcaagctctggctaaaaactatattctcaaattggaagtctcttaacattttttgtctatcttaaatcttattaaacagtttaatatatgtagtttttttttattaagtgttgttttaactcttttgcagatggtttagctaaaaatgctagagttgctagctaactagctagttcgtgtcaaggggagagaattcctcccataattcctatctatctttcttaattaatgaacttggattccaaaaaaaaaaaaaaagcaaatagaataagtgataaatttaaaatgttcataaacaatatggtaaatatcataatcctcaaatttgacaaattaaacagcaacttaatttattcagaagaaaaaaaaaacagcaacttaatttatcaaagttcattcaaaatataaacacaaattcattaaattctgagaaatatgccccattttgatttaatgaggaacaaatttgacaaattgatctcctccactggtttttttgatcttgattcaagaccagatggagggtgagttcatgtttggtctacttaacttgtttgcaacatgtttaacttcaataattatataaaacataataattatataaagggataattgcggcaaaagtccccaaaaagttagggttgaagcagattaatccccaacctcaaaaattggcggtaataatccctaaggtcaccatttttgttagtccgttagtacctaagttaaatagtctgttaattgctataacaattaccacgtgtcaaaacattattagtacacttaataaatattattaaaaatttaaataattagaaattatataaaaaataaaatctataaaatttatttatgttctttttcttttattaaaattaaaaaaaccattatctaagaaaatataacaaaatcctataattaatacccaaatcccacccacctcgatccttctcttcttcttcttcaaagtgaaccactgtctccatcaagaacaccaacaactctctgcagagtcttaggaggagccaaattcacctcatcaagcaaaatccattcaccacttttcaacgcatttacaaaagccccctctacaaatgaaaatataattccagatgaaccatctaattgatcctcgaccatttcaagctttccagataaattctctaatcgaagttcatcctcttctgtcttctgtcgctttcttccacttttagttgatctgtcatcttggagaaatttaacaccgtgtcgaagcccttttataaccgatatccatttttttttggcgagattcttttgcaaaagggcaaaaaatgcatgatttgcctgaaatggcacacaaattatcagcataacagtaaaacaaatatatacatatatgcaagagtgatgtcgaaagtcgaataccttgatagattttttctccacgaagaggtctaaaaactctttatacaggggaaagcatataaactgagcatccataggtttaaatccacctaataaatcagcaacatcactttgctgactcaaattctgaaccaaacaaatatattagttaaagttaggaagctttgtaagtatatatctaatcatcaaaaatataaattgcaaagaagcgagcgagagaatggaatccataagaaacattaccagaactgttagtttctgaccaagcctcagggcaagatcctgtactagtgtagtctttcccgtgccagtttcaccaaccatgaggacaggctcattaaatttaactgacgcagctagtctctcaagcaaagtaagagaacttcggatctcaacaaaagattttctttttgcacgcatctgtaaaagtatgtgtaagtgtcaaaatgtaaaatatattaggtaatagatcgcaggatgctgaaataaagaaaaaatctccactaacagaagtttgagtgcgttgaagagaaactcggccaatttttatatcagtaagtgaatcctgcaacattttttaaaatattagaaatggatggtgccacccaaaaaaaaaaaggaaaaggaagttgcaatggctacatattttaattatggagacctgaattataggtttatcagcagaatacaaggtatctccaacagtacttggcggcacttgccacatccgggcaatatccttccttatagtcaagcgatgttcaactgaagttgacgaggcagcaaatatttcaacagcctgaaacacccaaacaagggattaaaaactatgacagcaaagagaaatcattcaccttacacaatggacaacaaagataaaagcctgcaaactaagttaaacctcttgatagatgcagtgacactcgtgagctgacagtgatgcacaattcatatcaaagctaaagcctagccctgctatgcgcttgcaccatttaagtagatccctgtcatcaagatccagatatttgaattttaaaaaatgcataaaaactctactgcaaaccttaaaacaatgaaatattcacttaccttaacgaaaacctgcttaggtaaccagcagaatccgaattctcgtactgaactccatcaagttgatcatatggagaagatttcaccctatcaaatgtttctggcagaaatgatactgttaggcgttggtcaaatgtattaatctgaaaaggtttgtaagatagtgtaactgacctacaagcttctcagcaataggttccagatttgggtaactttcctttactatttttttcaggtcctcaacttttggtggtccaagcattgctgtcctccaaaatacagaaatcgaatttccccctatcccaaacactcacacatttaatgacaatgtagacacattcaagtacaagatggatagcgaaatgtttgtcattttatgcaaacttaagaaagaactacttgtcccatgctttctcaatcaaagtggacataaaattttagaaagatcattatagagtaaacaactttttctaaaacgcttttacaaattaattcaatccaccattcggaaatgcacctcttggccacgaaccatcaccaacagcattcaaatattatgaaacattgaatgtattaagtagcagtaatcaattatggactctgcaatatgataggaaaagaccaacaacaccccaagcacaaaacccaataaaagagatggtgggtagatagtgattgtacctttaataatactagatacttcaagttttgatgttgaaatggtcgaaaataatcgaaaattttctgcaacccgtatctcctacaaacatcccccaacactttagtaccaaaccagtaagcaaatggataaaactaagtgttaaaacttaaggggggaaaacataaaaagtcctaaagaatttaagacccaagtgccaattaatatttaagatgcacagaaagttcttgaattacctctccatgtccagttatatatgagtttgtgccctccaatagaggtaataagatagcatgcacatcagagggtgctttgtcaatatcctcaaaaacaacccagtatccatttacaatggcctgtgaagagaaaaataaatcaataaaacatactcagagtgcatcagaatataagggcaacaggaaacaaacctggctaagagtccctggttgccatctaaattcaccaggtcgttctgtgcaaacgtaacttccaagtaatgtttttccatcaatctgatcatccataggtatagatacaactgcacaaatgaataaatcaatactactcacagttgcaaatctaacaatagatatacatggcatcaaaagcaaatgtgtgtctatacaaattatataatctaacgatatacatggcatcaaaagcatatgtgtgtctatgcaaattatataatgtaatgatctggtagctaaacacgacagtttaaagcatggaagtaggaactgcctgtaatacttacaagtgctaaatgaaacttaatatcgtgatttgtcttcttttgtattgttttctcataccagtaaatatataatagcatgtttcttctgtaatgaaatatatgtctgtgtgtgttggtgttgcattattctcataaaagatatcacattttccgtagtaaaacaataaatttctgagagatagaagacgaagatgtagtcaatatacagttaagcaacaagaattaccttgtctttcactgttcaggtgggccaacttgctaataagagaggtttttccgctaccactaggaccatacaagagcactggccacttttgacttactgccaatgatactgtttcaaaagttttctgcaccgctgatgttaaaacaaatgggtttccagaagatgatgcatgatcccttaaaatatatataaatacaaacagaagaaatcagatattgaaatggtgagttgaatgacaaaacaatagacaaagcacatagacacattaaaaaatggagggggtacagtcaagagttgacctcactctcattcccaattaagtagaaaccaaatacatagtctaactgcagatgtataaaaggagtgtccagacaaatgaaaaggatttaatttactatatagtacaacctaccaagctagccgttgaatcctaattggtggctctttaaacgaaacttgtgaggaacaaataggctcaggatccaatccaaaaaccttcacactgcttttcagagaaaaatcagacctctccaacgtatttgatctagatgatccactaatgtaccagccagccttctccaaggagacatcctggcagaatttctcccatctaaatatggcataaacaagatataacatcacagaattgcagcatataatttttcacaggttgaaaagtacacttctaaaattgaatattgaaaacaaataataattggtcacagtttgaaagtacacttctaaatttagatattgaagacaaacctcaagtaacaaaaaaaagattcttcttttccaattcctagcttttctgtcgctctatcacttaatttgagaacaaatgacagtatctttattgcacaccattttatatctgtaacaatctccactcgttcagtgcatctgcaaagatcgcagaccacttccacgttttcattacagctgcacatatccgagagaatctctacactttcagcacggctgctcatttcaggatttgttaattgtttaacaaggtccaaaaaacaggaccaatcccaaagtttagaaaaatcatcgaagttcattaagaggagtcgataagatgccctgacagccagtagcacatgacttccagcctaataaagagtagattgcataattgaaccaaaatttgaaagaaaaaaaattataaatgacacacaaatatatcacgagcaaattaatcaatgtccagcaacagcttaatttaaaaaaaaaaaaaagtttattacatatttctcagggaggcgtcaaaaaaactaactagtttagaaaaaattatatattttgaaagtattgtacacagatgcaagctaacattgaagtatcatacacagatgcaaaaatgtcattacttgagcactcactaactataaatttataagaaaagtaacaagtgtaaaattctcccatgagcatgtgaatgtttgtggaaggggacaagttcaaatcctaatacgtgtgcataattgttttttatatctggctacttctaaccaatcaagaaaaacaatggtggtctcctttaaataaataattgcatagggaatattgtaatactgtcacaattgccatgtatatcgttcaatcaactttaagatagcatcgaagaaagctatcgaaacttcagtcttacattataaaggatataacttaaggattgctaaagaacaaaaataaataaaattactattctggcagacagattttctgtatatgcaaaagaccagtttttgatgcacatgaaagtaggcttctgagcctctccataatcaccttctgagcctctccataatcaccttctgagcctctccataatcaccagctaaaagttctgacggcaagcctattgatgcttttagagttgaaaggtagtttgatgtttccatgtttaatatattattatatgaagttttggttaaagatggcctttcctatgcttacataattttcttctgtctttaatctttgatggtgtctaatcctatttttctcccaataaaatagcacatatttcatttaaaaacatgagcttgcaatgtaatttaaactgaaagtacaccaaataacattcttcaggtacataacataccttaacacagagctcagagattggctgtcccaccaaaatgcgttgaaatggaggaggagcaaattcaaaataacttaatacggacctgcaaaaaagaaaccgaacttgttttacatctattcctacaagagaattctctccctctcagcactctgacccaagaaatacaaacatgcatgcatctactttcttgtagattcaaagaaaagtacacagctacatgtgcatagataaatataaggaacacatctacatgaataacatgtaatgtcactaatgtatgcctgcgtatcatatatcttaccctgataaagaaggatccaaatcaagagcacgacagaaggcgaggcaagcaagctcgtggagatccaaacccttcccaatactattatagaactcaataacggaatgttcta

SEQ ID NO: 14924 - DNA, 5725 bp, Cannabis sativa
cttgagctccttcggtggagctcgaccctcttccttttgtcgcctaaacaaccccaatttcaccatagcttcgtcttctccggctaccagtgagtttttttttcgttttcttttttgtactaacttcactttggctttcacaactccatttttattgaattcgctttggaaatttgttttggtttagtatttaagcggttctccatctcctgtgcggtttcttttcgaccttgcattgatattcataaggtatctttacttccccttaggatctaaggcttttcccatttcatatatttcaggaaaagaaactatctttatgattttttgtagtagctgaattaagtttaatgatggaaaaatcatacaaagtttgggtttttaaattttctttttctttgtttggattggaattaaaagtatcatatttgttgttctttttatattatatttttccagggaagagtgaaacagattgtgggttcaacccttagtgattccaaagaagatggatcgagccttgtaactaattttgaatctgataagtcagctgctgagtatgcaaatttgtacaaagaagatggacttacaggtgggcatgtcatcatgctcggagcagatcctttgagcaaagctgcagctatagaagcattacatgcctatcctggtaagccacatgtgctgaatagcatagtcctttggtatgaagtcttcatgttgatcttttatttttcttccctactttgtgattgaaatttgctaaatattacttgatattagtataatattggactcagaatataagactccttttcataatgaatttctcgaacaggaaccgtttttcagtatcatagtatatataattatttcttgccaataaagcttgaaattactaataacgggctacaatcaattacttctgtcaagccatgatatttgctttctcattgcacacactgagatttcaagtcctctagtttactcgcttgctgtaagtcgataataattttaatagcttacagatttttcctctgctgaacttactgcgaggactggaaatgtctaggcggtctgcaagttggaggtgggattaattctgacaatgctttgagttacatagtggaaggcgctagccatgtgattgtcacttcggtatgaaacaaaattcattaaatgatcaactatcatcatagcagttcatactttgcataaccctgaattagcaatgtgatgtaggacatatgatctgattatggaaaactgtccctagtttggacttttttttcttttcaatatcttttaatcttttgatctttgttttattgtagtacgtattcaacaatgggaaaatggaccttgagaggcttaaggatcttgttcgtgttgttggaaaagaaagacttatattggaccttagctgcagaaagaaggtataggatctagtccaaaggatttatacccttatttcaggagtcatatatattaagatcttctcttttctactcgtttgtagctaagaaaagtcgctgaaccactgtagtatttgaacatctttctaaaagaattatagtatcctgagtttaatgatatctcaaatgcatgaaagccaatgttgagaaaattatatcagctaactactcttcctttgtcccatgtctgtttgttgtgattgacaggaaggtaaatatgcaattgtcactgacagatggcagaagttcagtgacgtgtatttggatgaggaagtattggattttcttgccaactatgcagatgaatttctggtccatggtgttgatgttgaagggaaaaagtaagttaatataaacaccattatacctcaactcgggttagtccttaatacctaaagtctggatatgataaattaagtacataataacagatttgtccatctttcccataaatatattcgattgtattatcactccatatccgtacagttatcatctgcctagatacatgacaaataaggtcattgctattgctggatcaaaatatttactgattcaaattagttattctttatcaagaaatgtggtacttatcatgtattactatttcttttgagtgtatacttctttgtgtccagcaatgactgttatttaataataaattatagaaaagttgaaagcccaagatagcgtatttttagagttagcaactacaatgaggcaaagctatgagaagcttcaaatgtactcgtctgtgatgatcctttaactgagagttaaaatgaatagtagtagaaagaaaaacgtctttttccccccttcaatcaacaactatctttgagcttctctaatatctctcttgcaggttgggcattgatgaagagcttgtagcattgcttggaaagcactctccggttagtaacctatggtttcaaatctaactactagattttgctgataacaatcttcatgtagatttagtcaattcaaactaaaaatgtggttttatctgccaatttttatgagttgaaaacctcttattcagcttgtgaaccactgttttgctgcttttatctgtcattgatgaaaagacttctacacagtaatggaaaacgcaattgctcacatcctcttattgaataaaacatgtacacttttaaattgaaaatcaatcttgctgtggttttgtggtgctagattccggtcacttatgctggtggtgtgacagtcatggccgatttggaggtgattagagtggcaggaaaggggcgtgtggatgtcacagtgggaagtgctttggacatctttggaggcaacttggcatacaaagatgtggttgattggcatgcccgtcaacggatcttgacagtctagtaccctactagtcccaacccattttcttttataagctgtacttttcatttctagcttcaaaatggattttgactactttttcttgtaatttatggacattggagtgtgagttgtgaactcaaagtcagcgcaacttaagctggctaacagagaaaactaccggactactaaaactgagtctgagactgtaactctcataaaaaaaacaagtcaaatataattcgaggttcctactcatgttttgtaatacaattatttcaaacctattcttatataaagatttgcattggaacacaatcataaaaattgtgcatatttagttaatttgttttcttgtgtcatttttttccccacatttgagataggtcttagaggatctaaaccagtaataataataaggttaattagaatttttatcttctcaattttgacatataccaaatcatgttccctgaaaggtcgttaaaaatatttcttgcactattaagattgttggatttaaggattttttttcgatttttaataaaaaagtctaacatggatgaaaagttcaaggaccatgatttagtacatgtcaaaattcaatgggtatgatttggtagatatcaaagttcgggaagcatagtttagtatataaacaataactgaaatagtaaaattcaataaaattagacaaaagcttttaaattcaacaatttcaataattcacggtgtatttttaacgaccttaaaagttcaagggtacatgtcaaagttcaagggacaaaaatcttaattagagtaaaaataatgatatgtgcacataaaacttgcattgcatagttttcaggttggggtaatgataacagagttaattgcttcatcatacataacaaacaagggtagtttcttttttatcacaaacaaacatgggtagtttgtattgtaagtaaacatttatgtttttaccagtaatctctacaagaacaaaccccatctttgaaatggtggaaacgagttgcatctctaacaataaactcacggtctgctattttactaaccaactttaaaaacaagtgacagtcatcacatgccctcaagttctttatcacaatgatctccatcccaggaagagtattcaaaagcccgaatgcaatcgccagtttctcgctatgaacattattctcaccgatcaaatgttgttcgtttttcattttgccaccaatcccattagactcacaaagttttcttactaaactttctagttcagccaacattctatatatgtcatctgtttgttgatgagttctgtcaccagccaagaaaatatgaacttctcctttgaattcgacatagctgtaacctggttcctttctaagctttcgctccctcatcatcgttctaacctttaatacaccctctgaattctctgcatccgaatatatattcgataacaaaacatagtaacctatattggcaggttcaagctcaataactctttcaaaagctaactctgctagctttacgtttttgtgaattttacaagcattcaagagggctccccacactgcaccatctggctttaccttcattgaccgaatgagttcctcggcttcctttaatcgccctgctcggcctaacaaatcaaccacgcaagagtaatgctctgaacctggctgcaagccatagcttctctccattgtagcaaaatattctagccccctatcagttaatccggaatggctgcaggcagaaagaatggttacaaacaatgttttatctggtttgattccagcttttatcatttcttcaaagagtttcacagcaagttccccatgtccatgcattccatatccacctatgattgctgtccatgatactaaacttctttctttcattgaagaaaaaattgaatgagcttttaccaaatttccacatctagcatacatgttaaccaaggaattcttcaaaaagggattggaaccaaagccacatagctcaattcgttgttcaacctcacggccaacaccatgggcaccaaggtgagtacaagaagacagaaccccaacaagagtcacagggtcaggagaaacaccaacaagcttcatctccctgtaaagatccaaaactcgggtggcgaatccgttttgtgagtacccagatatcatggcattccaagtaattaaacccttctcaggcatttcatcaaacacttttcgagcatactcaactgagccacattttacatacattgtaagcaaacaatttccaacagacgagtcaagtcccaatccaattttgatactacaacaatgaagactcttcccaagatctaaatccacaggtgaaaaacaaccagggatcaaacccaacaaggtaactgaattaactgacacaacttcctccctcatcctacaaaacaacacaaccgcatccaaaaactttgagttcaaaatgtacccagatatcaaagcattataacaaacagtaagctttctcgactcaggattttcatcaaacactttacgcgcattctcaacttgagagaatctacagtacattgatatcaaagaagtctgcacaaatggttcgggctcacacccagttttgagaacatggccatggaggagggctccagtgacggagaacgaaagggctgctgaagacttgagaacgaaagggaatgtgaaaacgttgggggattgaccggaacgtagcatccgacgataaagatggagagcatcggagaatagacattgcttggcgaactctctcaactgggtgttccataaagttgaggttggaggagctaagcttttggctatggcggcctgaacatgaacagtcatgcaagctatggcgtcttcagtctttatcgttatcgtcgttttgtttttaaa

SEQ ID NO: 14925 - DNA, 10397 bp, Cannabis sativa
tatacatatatatttctttttgtttgtctttcagttgacaataccataaagctcattggtgctggggcatttgcttttcatccaacattggagtggatatttgttggcgatcggcgaggtacacttcttgcatgggatgtgtcaactgagagacccagcatgattggaatgtaagttgatcttattagcaagacttgaaggcttgtaattcttataggcactcagatgcaaaagtttaagaaagggaaaacttatcaagagctctcttgtaaaaacacaaatttaggagttactgaagtgggaaactatttatttagggaatgtcatcctgattgagttaaggcataaatctttggtgtgtgattttaatgtatcaaagttgaacatttttgataattttgtaatttttggtttcaaacttgcatgtctacaatagattaaactactaaaatgaattaataaaatttaacttgccttaaccttttcttgtaagggctagctgcctgaaaatgattttatttattcaatagaactgaataaagacatcagagcttcattttaggttgtgtctctggctgaccaaaaggccttttgtttccgtatctgctgcttgcaaaatgatgcatgttctctaattgtatgggatgataagcttgagtcttggtaaggtagtgaagtgagtgttattctatgatcatagctctattattgtataggatgataagcttgagtcttggtaaggtagtgaagtgagtgttattctatgatcatagctctataacttttctttggaagctaagactgctatttttgttattatctttgttttcaaaatttatttttatgctttcattctcttctagttaacaaggttctaatcattgtactctaattgtaaatcagcacacaagtgggttctcaacctatttcatctgttgcttggcttccaatgttgcggatacttgtaactgtatccaaggatggaaatcttcaagcatggaagacacgggccgtagttaatcctaccagacctcctattgcagcaaatttttttgaggcagctggttagtgatttattacattttcttcttgatatgctttttttttttcagaataattcttgatgcggggagagttgtttcactcttaagaatcactttgctttcatttcagtattcttttcttgttattgagagatagtatgtgtacactcacgttatgttgttaacctgtgtacacttaatttagtttaaggacaatgcagtctttggatagttgactagtcataaatataaaagctgtatgtctacattaacgtataccatgctatacttgtggtgatttgacatccatcccagttgaatgctcactcatgtgcacactacttggttgtttacattgcttgttgacatttcctattgtttagtatctactgacttatataacatgaaatggttgtgcagctattgaatcaattgatatcccctgcatcctttctcaacagggtggagaagcagtttatcccttgccgcgaatcaaatctattgaagttcaccccaaattaaatttagcagcactgctgtttgtagtaagtacaagtactggcatcgttaataagtgaaaagttggagtgcaaactgttgaatttaattactagtacgctattgcagttatgaatcactttattatttcggtggcagaatatgacaggtggagacaatgcgaaaaatagggctgcatacaccagggaaggaagaaaacaactatttgcagttttacaaagtgcaagaggatcatcaggtgatgactactcaccaatttgtttctatttttttattctttgaaaaatagtatcccattgacacattattgagaagtacaatagccttacataggattggattatactccatttttcagcaattagttttaagtttgtacaccaatctttctcttaaaggtttatctcttcaaatgcaacatacatacacgatgtttcttccgacttagaggaaagagtaaattgtttcaaaacatttcttacccttactgtttagataagcatttgtatttgttgccatatgtttggattgttgatacagaaatcatattcataataattctgaatctcctcaactacttgactctatgatttattataaattgtctttttctataacacccctatctttgtgtgatgactttgttaataacaacttagtggatttcttttcaaaaaaaaaaaaaaaaggaactcagtggatttgtttcagatatctgaccctctctttctcctctcgctctttttcattcttgagagcagctttttatactttatcagacactttttcccatatgttttgttcttcatcctttgtcattctcttcctgatcgatgtttagactgtagttgttgccaaatcctataagcttgtattgttgtattttaaaatgcgtattgtgtgtgtgtgtgttttttttttctccactgctatcttgctgctggtgcagatgctgatggtgtaaatgttttgcagcttctgtgttgaaagaaaagctttcgtccttgggttcatctggaatcttagctgaacatcaacttcaggcacaattacaagagcatcatctgaaagggtgagttagggttatgcatgaactctatgaaaagattttcttttttgtaatgatagtttgatgttctagcaacaagaatatcttgaacaatttatgtcttttttaaatctgtggattctcttatctgtcccaaaaaacttatggtgttattacaaatttcacacgcagataagtatcaataaaggatattctttaattctttgctgtgttcttatatgctttgctcttccaaaattgctgatttgcaaaggggtttcaataagcatttcattatgatgtcttttttctttttcagcagacgtagtcaacttagcatatcagatgttgcaaggaaggcttttctgtatagtgtatgttgctttcccttccccctttctcactctatttcttgaagtattaaatgttctcgtggtccaacaaataaaatttcatgagttaatattttaaatctatgactaacttctgcattatttctatagcatttcatggaaggtcatgctaaaagtgctccaatttctcggctgccactcatcactatgttagatgttaaacatcatcttaaggacataccagtttgtcaggttagggtcattatgatcatatttcaattgctattttactttgtgacttacacatgtgtttcttgcagccattccatttggagcttaatttcttcaataaagaaaaccgagttctccattatcctgttagggcattttatgtggatggtgcaagccttatggcatataatctatgctcaggggcagatagtatctacaagaaactttataccacggtatgataaaattttacactaaattaatgacttgagtttgggttgtaacctctttatttttgcctctttgtatcttccagattcctggaaatgtggaataccatccaaaatacatgttctacagcaaaaagcaacatatattccttgttgtttatgagtttagcggctctgcaaatgaagtggtcgtttatcgagaaaatactgagtctcagtcagcaaacagtaaatgcactacagtgaaaggtctgctaaactataccatgtcttaatcttctattctgctgaattactttagtcacgaggggtaactaattcatccctgatttatgtctttgagttctgtaggtcgagatgcagcatttattggccccaatgaaaatcaatttgcaattcttgatgaagataaaactggattagctttatacatagtgcaaggaaagacttctcaggagggtagtgaaataaatggagcccttgaagaaaaccaacctgtggacactgatgttggctctattaaaggtccaatgcagtttatatttgaagatgatgttgatcgcatcttttctactccgctaggtgagcagatgatgtttttcccttgggcattttgatatgatatatattgtatgctgatcagtcttgtgtgattgtagagtcatccttgatatttgcttctcatgggaatcagattgggttggcaaagctggttcaaggatatcaaccaggtgctgatggtcattatataccgactaaaggtgaagggaaaaagtcaataaagttgaagttaaatgagactgtacttcaggtaattatttagctctgaaaaattaaattttgttttgtcattttcattttaagcattgctctttccaaaagcttcatattgttgctgcttcattagaatgaatattgttgtcagcatgttgcaagttgtgtaacgattaataacacagcttgaaagtggtgattaggataaagctatgatgtaaatacattgatgtatgtatactgttactataaaaatgcggtttcttttcgaacatgggaatactcatgaagcagacattgctgcataccagttttacgctttcctctgttatgtttcattgaagttggtagtgttacagccactgtgtgtccttagtttaattgataagctcttgttgtggataaagctggtctttctatttaaacgttgtttttcattcccttcaacaggttcagtggcaggaaactgttagaggttatgttgcaggtatattaaccacgacaagagtgctgctggtctcaacggaccttgatattcttgctagcagttcaacaaaatatgatatgggactaccttcaatatcctcaaactagatatttaattgcttttttcccctttcattatacttgctatttttaaacttgtagtgtttagtacttaaccaaggtgcactttagatcccttctgtgggtgggtcctgcacttctattttctactgccactgcaattagtgtgcttggctgggatgggaaagtgaggactattctctccataagtatgcctcatgcaggtagccttctgatgcctggactctattacatttttatcctttaacaataaccttaagagctctttggatcaatatgtcttattttgcctctgttacaccaccattgctcctctgactctccaaatgaaattgtacagttttggttggtgcactcaacgaccgtctgttgcttgctaatccaactgaaataaatcctagacagaagaaaggagttgagattaagagctgtctagtcgggctacttgaacctcttcttattggatttgctacaatgcaagaacgatttgaacagaagcttgacctttcagaagtattgtaccaaattacatcaaggttttcttctaactgacctatgcatgtgtctgttgcttggggatcttcatatttatcacgacttctattgtttgttggacttggatgtttaatcttatttttaggatctagtgcctatttcaacctatatatctcaataaatatgaaatcatacatgaaagaaagatgatagcacgattaacatctgaactctaagtttattttgactgaaggtttgacagcctgcgtattaccccgaagtctcttgatattttggctagaggccctcctgtctgtggagatcttgctgtgtctttatctcaagcaggaccacagttcacgcaagtgagtaactggttacatggttattttttagaaaaaaaaattagcctagtcttgtacttatttcaattttgattacttaatgtgttccactatgaaattaggtgtcacggggagtgtacgctattagagctctccgcttttctactgctctatctgttttaaaagatgagtttcttcgttctagagattatccaagatgccccccaacctctcatttgtttcatcgttttcgtcaattgggttatgcttgtatcaagtaagtagataagaaagctgttttcattcctattttctgatacggtgtgatttcttagaaagaaatatttaattctaatgacaagctctataaacttgttctctgctcttttcctccattactaataactggctttgtactgttacatgttcgtgtttactaaggcttccatgcttttattgcacttagttatgatatgagattagttttgtttttcctcttgagatttaattaaaatgggccacaaatttaggaacttgttgagacaactgggctttatcaattaccctgagcaagaaatatgcatgtgaacaagtacacgagttgaaacatttaaaaagtcaacaactagttcagcttttctagttaagtgagatttctgatgttatgtgaagtcaaaagctgagcgctcccaaaatcttctctattctatcttttaaaatgtattactaaaatctcccaatagcttgagtcacatttaactaataaagatgatagctaaagctttagcctgactttcaagtcggctggtcaaaactaaggatgctaattgtctatgcttgggtttgaggaatattcactatgtagtgttttttacttaatttttcctcccgtctaaaaatggaaaaattgatagtttttccttgaagcttatgttgaacctacagaatgttttggatttgttatattgtaaaatatatattacaataataataatatattttatacagacttctaattttatttatttcttatatgcacatttaacttttattatgtctctcattgctgatggactgatgtttctgttactttcaattttgtttattgataaaatgcttgcaggttttctcagtttgacagtgcaaaagaaacttttgaagttatatcagactatgaaagcatgcttgacctcttcatatgccacctaaaccctagtgcaatgcgtcgtcttgcccaaaaattggaagaagatggtactgattcagaattgaggcgatactgtgaaaggatattaagagttcgctctactgggtggacacaaggcatttttgccaactttgctgccgaaagtatggttcctaaaggacctgaatggggtggtggaaactgggaaattaaaacccctactaacttgaaggctatacctcagtgggagttggcagctgaggtgatgccatacatgaagacagatgatggcactattccctccataatttctgatcacattggtgtttacttgggctcaattaaaggaagaggcaacattgtagaagtaagggaagatagcctggtcagagttcttgctcctcctgcagctggagataagccaagtggtcttccattggtttctgatgtacctaataagtccaaagttgctgatggtgattccaagggcaatttgctgatgggtctagaagcactcaacaaacagatttctggttccactgcttcagatgagcaggctaaagctgaagaagaatttaaaaaatctatgtatggtcctgctgatggtagtagcagtgatgaggaaggagcatcaaaaactaaaaagctacacattagaatacgtgataagccaattgcgtctactacagtggatgtgaataagatcaaagaagccacaaagcagttagggttgggtctacccataagcaggacaaagtcattagctagtggctcgcaagaccttggccagatgttcaatgcaccaaacaatgcaccagtatctgcaccaattgtttctacacctgttgatccatttggtacaatctctttgacacaacctgcaaccgtaccacaacctactcctgcgctagtgggttctggtgttgccactggtcccattccagaggacttcttccagcatacaataccatcactacaggttgcagcctcactgccacctccaggaacttatctttcaaaaatgagccaagctcctcaaggggctgagaaccaaaattttgtatctaatcaggttcatcaatcccaagctgatattggtcttcctgatggtggtgttccccctcaaacccttcaacaacctgttgttccaatggattcttttggacttcctgatggtggtgtcccaccacaatcctcagtccaggctcctggcttgccacaacctcttgcacaggcacctcaggtcccactttccacacagcctcttgatcttagtatccttggaggtgatgctggaaagccttcagtgcgtccaacttccccaccatcttctgtgcgtcctggacaggtaagacagatatccacatgtatcagtcgttttggaaagttcaagatgcggggatatcataacatttccgctataaattttcctattacaggttccccgtggtgctgctgctcctgtgtgttttaagattggaattgcccacctagaacagaatcaactttccgatgcattatcatgttttgatgaagcttttctcgctctggcgaaagatcagtcccgtggagctgatattaaagcccaagcaaccatttgtgctcagtacaaattggcagttaatctgctacaggtacagtaattactaatcccacatcaaataaagtatacaatgatgagcttgagtttaggattgttgaggccagtcatcttaagaactacaggaaaacctaagttagtactgaagtcatcttccttatgatgctgtcttagagcatctccaatcgcggctaaattagtgatgtagcgatttattttaaaatgtttcagtgtgaaaataatttgtcaactttgacacaaaatatagcatacgtccgattttgcacaacattgaatgacctgatttttatctgttcatttttttttctatgcgaactttaaattttcatttatttattttaaagtcaaaataatattttcaaaattagaatttttttatatgtttttaataaatattaaatgaacattcattataacttcatcttttttgcttgaacattatagcttcatctcgctttgttaatttgcatccatgtgcattcgagcaccattacaaatattgtgccaaatatataatttcttgctaaatttgatacttattcgtatcatttttattggagatggtcttatgctgtaaatatcacttggtaaataataacagcattaagaactattgcaccattagaaggttggtcttgggttagaccctggtatcttaaatgatattgtaatttagtggtcagttttgggtcccttccacttctctcttccaaacttcctattaggcccaccaaatattttagtagggaaatgattggtggaaatcgtttctttgttaggtgtctggccataaaatgccaaattatgcttttctctcagaattctttgtcctgttatttgaaaagattgtgtctaatgtcttcatcttatcttggagtcagtcaccgatcatgatagtgagaaatatattgggataaataatacaagttaaactattcttttgaattttactacaggaaatcgggcggctacagaaagtcaaaggtgccagtgctatcagcgcaaaaggtgagatggcaagactttcgcgtcatctaggttcattgcctcttctagcaaaacatcggataaattgcattcgaactgccatcaaacggaacatggaagtgcagaattatgcttattccaagcagatgcttgaactcctattatctaaagcacctccaagcaagcaagatgagctaaggagcttaatcgacatgtgtgttcagaggggtttgtccaacaagtccattgatccattggaagatccctctcagttttgctatgccactcttagtcgtctatcaactattggatacgacgtatgtgatctctgcggggccaagttttccgctctctcagcacctggatgcattatatgtggcatgggaagcattaaaaggtctgatgcactagctggaccaggaccagttccttcaccatttggctgaagttttataagtcggtagtttgcgccttttatatccacctttcttgagtagcagggcggacccgatggatctcatacgaaattgcttcaaaacgcccttttgatttcgagggtgttagaacatagaagttataacaaagggggagaaagtagcagcgtggcgatagtgtaatttgttttgttgagcttgtgtagtgtcatattgattttttttttttgtttcgtatcactagtaaatacttcatatttacaattttgtaaagtaattttctctgtaatatcattattcatttttttccgttttctttattcaaatgtcttcacatgggtttaagacaagtgttgaaaaggtaagccaccttgaaatgaatgaagcatgctattttttttttttgatggaatgctatatgaaaattggtttgttataaattctactccaattattacacttgtatctaacgcaaatagttttgtatcgtgcatatttttggttattagaaaatatgtaagagtaaaaaggtcgaaaaaaatga

SEQ ID NO: 14926 - DNA, 4503 bp, Cannabis sativa
aaaaaaaaatatttgtatagaaaaattcaattactatttttattttacataataaatacatatttttaatttattttcactttttgattatacgtaaaatataaaatatattttaaatattcaactaaaaaaattatatgaaatttcccaagtaaactaaaaattaatccacctatttttggaataaaaatataaattaaacatttaagattttttacccccgaactatgatttatatattattatacactgaattttttagcccgttgaaattggtttcacaatgttgtaaattagtccttcgattaagtttcgtcacacgtgacaaacaatataatggcatgtcacgttaatgttagtactatattaacgccacatgtgtaattaatttgaaaaaataatttattttttcaatcattaattattttttagtttaataaaattttaaaatatatagttttattctttttgatattaaatgatacatgtggcgttgatgtagcaaattgttaagcagtcatatcatcattttgtttacaacgtgttacaaaatttgattgaatgactaatttataacactgtaaataattcatgaactatttgtaaaatgctaaaaatttaagggacaataatgtatatgttatagttggggagccaaaatctagttttatttttaatatgaaaataagatattcacataaaaaaacaattattaaaatttatataaagaaaatgaattttaaagaatttttttatttattttgaaataggaatgtaaaagaaaaattaaatattaataaattaattcaagtaaaattattttgggtgtaagatgatgaagaagaagctctgtgattatcagaagactgtgaagtgagaaagaagaacacttccgccattgttatgttcaagaaaaccttatgtcaacttcaaaagcactcgactttaacttcttcaccacatttcaaatcactacacacaaattcctcaaaaaacttgaaacaatttctgaactttccaagcaccgaattagctttgcaagcttgttgtgaccatggtcttgttcgtcaaggcaagcaagttcatgctcagttggttgttaatggcggcacaaaaaacaatcttttgggtactaagcttttggcaatgtatgttttgtgtggaagctttttacatgccaaaaatgtgttttttagatacctcgaattgggttttgcctcaccttggaattggatgattagagggtttactaatcagggtttgtttaattatgctttgagattttatttcaagatgttgggttatggaatttcacctgataagtatacttttcctccattgattaaagcttgtggtggtttgaataatttagggttgattaaacatgttcatgagagaattagattgatgggtttggaattagatgtgtttgtggggagttctttgattaaattatatgctgagaatggttgtatttatgatgctagacaagtgtttgataaaatgcctgaaagagatagtgtgttatggaatgttatgattaatggttatgttagaaattgtgatacaaaaagatgtgttgagattttcttgagaatgagagagagtaatgtgaagcctaattcagttacttatgcttgtgttttgtctgtttgtggtggatcagaagagttgatttgttttggggttcagattcatgggcttgttttttcatgtgggttggaattggattctcctgttgctaacacattgttggctatgtattcgaaatctcaatgtttgtttgaggcttgtaaagtgtttaatttgatgcctcaaactgatttagtaacttggaatggaatgatatctggttatgtacagaatggtttcatggttgaagcttcgaattgttttcgagatatggtatctgcaagtatcgagcctgactcggttactttcgcgagttttcttccatgtgtaactgaatctggtaatcttaaacaaggtaaggaaattcattgctatatcataagacatggtgtgtcaatagatgtgttcttgaaaggtgcacttattgatttatacttcaagtgcagaaatgtggaaatggcttgtaagattcttgaccaaagtaatgcagtggatgtcattgtttttacatcaatgatttcagggtttgtccttaatggtatgaattgtaatgctttggagattttcaggcgattacttcgagtgaaaatgagaccgaattcagttactttggcgagtatttttcctgctttttcaggtatgactgctttgaaattgggaaaggaattgcatggtaacaccattaaaatggggcttgacaagttatgctatgtgggaagttcaatcacagacatgtatgcaaaatgtggaagattggatcttgcccgtcgagtatttcaaagaatgcccgaaagggatgctatttgttggaactcgatgattaccaattgttctcagaatggcaaaccagaggaagccattgatctgtttcgtcgaatggggttagaaggaatcaagtatgattgtgtgagtatctcggctgctctttcgagctgtgcaaacttaccagctctccatcatgggaaagaaattcatggtttcatgattagaagaagagcattcagctctgatattttctctggaagtgctctgatagacatgtatgcaaaatgtggaaacttgaatgttgctcgtcgggtatttaacgaaatggaaaacaagaatgaagtttcatggaacagcataattgctgcttatggaaaccatggtcaccttgaggaatccctcatactatttcatgacatgttagagaaacgaatcccacctgatcatgtcacattcctcggtataatttcagcctgcggccatgctggtagaatcgacgatgggattcacttttttcgtctaatgaccgagagctatcaaatcccggctagaatggagcattatgcatgcatggttgatttgtttgggcgtgctggaaggttaaccgaagcattcgagacaataaaaaacatgcccttttcacccgaggcaagcgtttggggaacattacttggagcttgtcgagttcatggcaacgttgaactcgctgaagaggcatcgaaacatcttctcgaattagacccttacaattccggctactacattttgctttcgaacattcatgctggcgtcggagactggagaagcgtgcttaagatacgaaatttgatgaaagaaagaggagtacagaaggtgcctggatatagctggattgatatcaacaacataagtcatatgtttgttgcaggagatggaagccatcctgattcagttgagatatattcattgcttaataaccttcttgaagagctgaggaaagagggttatgttcctcaactttacctaccaatgcatccacaaacattagggatatgaatctttgaagaacagtttcaccatctttaaccttctgagaatttttaccacctgaactatgacacttacagggttttgcctttttgtaaaatgttctcataaaaatatgaaaataactgcaaattcggttgtattttgttcattttttcaaatagttcaatcatgttatacatcaaatgcaaaaagattgatccgccattaaaatactataattcgagtttttagacgaaaaataattgcataaataactttaacaattaaatttgggagtgtgtatttgtaattttagagttaatatttgaatgtttaaattattatacttaattccaacttagtttaaatttaagtaattaaattacaggtgattgaagagtatacatttcagttcagttcctcctgcatagataaaatctgaagccatttttgctgattgagtcaatgagatgaaaaaaaatgttgtctttcttcttcttcttcttccttgtgatgtaagtaacttgattccttggctccttcctttgaaaagatcttcagttcattctgaagcaaagggaatttctttgatggagcaggcagagagaacagaacatctcgtgaataagaagatcgttatgtgcctagaaaaggcggtacgacaactcccttcctcctccactcttgttcttctaaattcgctttttctacacttccattcccaacctgttatgatcgaactaaccgagcagcgaaagatccatcgagtgaatgctttactgggaacgaagagtagaaaccctgtgatgttacgaaatcgcttggaacatatttttcgactgattctatattgaattcctgtaacacaagtagaaagtaggaaactttagtaacttttcttgaacatagcaaggtaaagaaaaacccgagcagaagatcttaccggatgccttagaagaaatgcagctactctatcttcattttcttcgggatcaattgagcaggtgctgtatattagaactccccccggcttcaccaatctaaggatgcataacaaagtacagtctatagtgaaaagaaaagaaaattttaagggtg

SEQ ID NO: 14927 - DNA, 2217 bp, Cannabis sativa
  modified_base (587)..(598): a, c, t, g, unknown or other
  modified_base (1049)..(1055): a, c, t, g, unknown or other
  modified_base (1172)..(1175): a, c, t, g, unknown or other
caaacagagcaaagaaaagtcaaatgcaaagcttaacaaggaagtaaaggacacggcttgaagcatcaaaacgacatcatcaagatgaaaaacgctggattggaaccagatttgtgagagtacaggagaaccggagatacgggatttcgccccactagaaagttccagaaagtctcttttttataataaagtttttacaatttgcatatgaatgtatatgtatgtatatatgtaaatactatatttataatgtactattaatatttgattgactacatataaataataaatatatgattgaaatgatgtttggctacacgtacatcatttcccaactaatcagggtgtgatcgagtctcctatttggtttgattaaatagttggtatacaaatggaagagatgagcacagaaatttcaagcaactaatatataattttattgtttttctttcaactatgattatatatacatacatttatatgttgggtttattaatcgatataattgagtaagttgatgcctaaaacactttaatcctggtccttaatcactacgaaaaacaggtacttttagtgataattttttnnnnnnnnnnnnaattttttgtgactaaatatgatttttggtcacaacaaaaaactactcgtgactataacataatatttagacacaatttatcactaatttacttttagttataacaagataatatatttagtcacatatagagataataattaataattagtcacaattttttttagtccataaaatattttttataaggaagtttacatatattagaggctaagaataagaatattgacttgggtatatatagtcaatatggttgcactattgttctttactcataaatcaatattataatatttatctcgtttgccattcgagctacctatgtttaatgtccttttgcatttgttcttattatcaattattatccattttgacatacatagattagtagtgtagtaagactcgccaaaatttataaggctcgttttggaatgtcgtattaggtcgtatnnnnnnntattatattatattgaattaaattatatatcatatttttatataatactatattaaactttaatttatactaaaatattacatatttaagtatctataaaagttaataccacatatnnnnttacataaaaatattacataaaatacaatttaatataatattatacaatacaatgcggcgtaccaacgaaccctataattataatcatatctcatactttaactaattatatttaaacaattattaaagaaaattatgtttaaataaggacatagtgtagtataagttcgttgattgaaggtaagattatcagtcgttctgcctaaatgtaagctcaaataattttctaataatacaaaaagactaatatcatatgtatgcttggagggtcagccctaggcatagacgaactaggcccgtacttaggacccacacttttttaagggcccaaaataaaaaataaaaaatttcattaagcttttatttaaataaaattaaagggtaaaatctattttgaaccatgtgttttgcaaaaattacaaattagacactctgttttgttaaatgacaaaataaaccctatattttctaaaatagaaacaataggaccttgagctcaattttcaataattttatttttcaatataaccaactttaagacaatttctaacacgaacagatatggaaaatataattagttttgtcataacatctctagataagattattattaagttttattttgacaaaaaatcagtttagggtcctatttgtacaattttagaaaatgcagggtctattttatcatttaacaaaacagaaggtccaatttataacttttgtaaatcataaggtccaaatggtatttacccaaaattaaatgtattataaacaataaatattcatagtttagttggttgggtgtacgatattatacaatgttatgggttcgaatctcatgacactcattttcaatattttttatatatatttttgaaagtgagggtccaaaaatctaattcgccttaggatcatatattctcatggtcggtcctgtatgctcatatagtcttttacatgctattattcattaaaaaatacgagatggagtaataaaatgagagattttttaagaaaaaatggaagagagagagagagagag

SEQ ID NO: 14928 - DNA, 14121 bp, Cannabis sativa
atatatacatatttcataattaatgcaacgttctgtattttgagtaacatttttttatcaatatttaattatatctacactatttttttcaaagaaaagcaatgaacagttgaactgcttaaacctgtaatatggcaggactctgttcttcctctgctgcagaaacaactgcctccactccttccaaattgtagacattgaatgcacctatagcatatccaccctcctctgcactctatatagaagaagaaattcagtataggcggacgcaatgattctatgaaactttaaattgggtgattattaccaaaagaagctcttttgctgatgaaagcctggctgggcgagcccaagatttcactagctctgctacggcgttactgtcaccaacatttcctaagagaacaaacagtttgagaacatcagtcaaaaggacattttaacagtaaaagactcaatggagatatcagcattaaagtgacaagagttgagaactcggagttaccgggaaacactatatatggaactcctggatgtctactttcaggacctagctgccacaagggaacaccagccatggcctgtcccacaattttcgcacattttacttcgagggcttttgtagcaatgtctgatgacgtgattccaccctaccacagaaattatcgttgaatgtcttgtacacgattcattaagtatagccaagagcaaacttaggaacagctaaagatttcataaggtttgatgcatcttctaaagaagtatttgctgtagaaaatcttatgatccatcaatttattaagtaaagaacacactgttttctcctgaatgttcagaagatgctacagcataaattaaaacaacaaaactgaagtctaatattttcgtgtattaagcaaggtcaccctcactccgtggatacatattttcattaaattaactcttaatgatgattacttgattctccatattataatcagaactcttacattctaactcgttaaccttgtagggcattttaagtcattatttagtcataccagtgtggtcttaagcaagtaggactgtaatttatcacacccaccatataaaatgtggaaatatatgatgatttgaaaacttggaattaccttggcaagaatataacgtggttttatagtaatcttcctaactatttccaccagcgcagaactcactttgaagtttatctccaaactctcagaggaagctgcgaacaaaaataattttgcatttgatgaataatgaaagaataaataaaagaatacgtaacttaagctaaagtaattagagtggggaaaggaatgagtagtccatgttattttctagtaaaaagtcaagtgattaagaaaaagaaagttgatgatgctctcatgaattagatccattagtataatatttatcctaaacattcatatttttcaaaaaaaatatttattggctaacagttaaacaagttgaagaagctcttttgcatatgattcattactataaaaagaactacatgatatcaaagaaaaagagaaaagaaaaaaaataaaaaataacagagagactaactttttccagtgataagctctctactggtcattataagggtatccttgcgacaccttaggtaagcatctgccatctcagctgctctaatgatttcctcagccctctcttctgtggatcccatagcaagtttagccacagacacctatggacaaagacaggtcattttcagattttgtatgtacagaaggtgaaaagaatatgaaaccaaattcaatcctgatatcccattatcagttcaaccacagatgcgcagcatattatatgtatgaaatgactgtcagtccattcatatatggttaacattccatatctttttcatccctttctaagaaaatgatactaataggtccttcaaaaaggtagagtaatataaattctctcagaaattaaacttcaagaagtcggaaagtttgtaaatttaaataattcattcaaggacaagaaactcattttggtcagtccaatgacacattcaatcatttgattattgcatcacaaacagccttagataaaactgtaacaataatttctgagctgtatattaaacatcaacaaaaatatatctaaatattaggtaagtaggtaagtagatcacctcaatacttcttaaactctggtcacattgtaatttaagctcttcaacctgtgttcaaggttgacacaattaggaaataatgaaaatagcatacatgaaggcaggcattagaaatcaacagattgctagtccaacctgtttcgtggtttttgggacatatgatcccacaactatgagaccaccattcctttgcttgttaattcctatatccttgggcaaaattggagcttttgagacaattccaacacgcgaagatacaaaactagcagcagtccggcataagtatcgctttcccttcatttctgcctgcatattaaaaaagtgacgagaagctaagaaaagagaaaaaaaaaatcaattaacgacaaagaagagcatcaaagtagaaagctactagcctttatcattcctgctgcaaaaacagccacatctctatcactagctgcattaactatgcatgttgacccctgtttcatttactaaattgaatcagagagagaaaaacatagctaaaatacacattcccatttgagtattactagcacatattttaaacaattaagcacaatactataagtagcatcaatgatcaatcaaatctcaattacacagggaatactgaaaagtgaagcgtaatatcaaaatataatatattatgttaaacaaataagccatgctctttagtaggtaagcccaagttcaaaagtccaaatttgtatgtcatttattttttcactgcttttttaacacgtacaaacaccatattgactttggaacaagaaatgtaagtgttcgacttgtatgtattgtggcaagttcatgtttgccgcaacaaatgtataccttctccaaactacatagacgctcacaaacagcctctggcccaccttttctcagaagctgaatagaaatagaagcaacactactggctggaacgcgaccacctgttttctcttctacccactaaatttttcataaaggtatcaattacagtacacaatctttaaagtatagtatattctgcataaaaagaaaactgattccaagtagactatgaatttagacctcgcggagattagaagatttgtagccaaaagaagcatcttttgcaaactctgtgtctccagcaggaacaagcctgcatatgtcattatccatcaaggccttacactggtagatgtcagagatggactattatccaaaaaaaaaagagagcagagtattacttatcagaatcagctacatagtgaatatctccaatagtgtaacggcctccttgaaggaaaaaggggcaaatgatccatgcatccatctcacctagtaccgaactagcagcatcagcttcctaaaagagagcaaggaaaattcacttgatgttatgaatttgaagtatacatcttaagagttaaagcagtgataaaaaccatataaaagttacttgcctctggaaaatgacctcgtaaggttgaatcacctcgcaaaactacagtataatcagcattttttactgagtcagctgcagcttgcaagttctggcatatatctttaatcaattcagtggcctgtagatcatttctatacttgtcagtgtcacttttaaacaattagaaattaaattacagttatgtttggttagactgtcttttttctctgctacatatgcttagaaattgaataacaacacttactttttcagggctcaatgccctggaattggttaaaatgaaaaagcatttaggagcttttttgaattgctcagtaagtgagttaacagtcctgcaaaaataaattaaaattttacattgagctgagaaataactttaatcaaggttctctttcctttgtacaatgaatttcacagaggcttcacttatatcaaagaactgaaactcggaaaattagataataattagaacaacttattacaggagacctgcagcaacacctaagaataacatatattagtcacttattatgtttaaatattgaactgaacacgtataaaaagggacaggaaaggccagataccattcagttaagacctcaatgtcatgaacagtttgggttcctgttggatcatcatcaagaacgaccaaagtttttgaagaattctgattaagtgtttgtatgtcattaatgggatcaactggccactcagatggaagggaagcaaggacggtttctttcttaagtaacggaagtttcccctcaaccttaacaccagttattgtctcatagacctgaaaaaatatgaaaaaatttagtaaaccatttttttctgagtccaatccagctgatgcaggtagttcaaataacaaaaaaaaaatctaatagcttattctagaatttgaaattttttgaaacggtgatagggatcagtagctcttaaataaatcaaatttgacgcttctctaattaaagtagaattcatacagttaaatatgaatattctagagaatagtaataaaaataacacaagatctaacagtcagcaaaataactatttctgccacacaatcactttactttttttattctttgggggagggtgttccaaatttcgaacaggataacttaatgttttatttaccacagaaggcatcatcaatttgacaaacaaggttcaccaactcaatttttaaaacagagaaagatcttacacaatgcatgcatgaccttccttactaaatttaaatatatcttaagagggaagtctgcccattaaaagaaaagcaagacacacttaaagtcatgacaccttatgattaagaaatattcttttcaccaaaaatgcatgtgtgactttgatgaaccaagttgaatagaatgccagaacttaagcagctaaagtttagtcacagacataatttataaattataataattaatcgaagatggaagaaggctgaaggtatactctgcaccagctcaaatcttatttgacaaaagctagcataaaaacaaacattaccgtaactaatcatacattttatcaatctttccctatatgtttaattttctatctccatcgtcaaagtaaaaagtagatgtgccataccttaactacaccagcatcatcctgtcgaccccagcctcctgcagaacctgctagattgttgcatcaaatgtaagtattataggtatttgataaatcaatatgcatgcaatggacaacattgaacacataacaaggacagagaacgttctttcccgatgccttatttgaccaaaagctaaattgagaaacaacaagggcaaccacattaatggctaaatttttaatggctttttattcttgtaaagttttgcacatgatgatttattattatataaatttgagagtactcgtgaaaaatgccacacaagttgatgcaatgagaaatgacaactatatgaattctaaatgaaaagattacacagcacctaaaaggaacagttggtgtgcaaccgttgaaatatgcagcggtactcttcgggatgaacactcgcgagaaacaatgccctttaaataataataacaggattagatcagtctgctaatcgcttatcacatgaatcaattctagcaatttattgtggggactataaattttaccagatccttaacaaagatgtcaagcgcagaataaggtgtataatcattgtccagcatgtgtggaacacgattctcaaacatcctgcaacatgcatactaaataaattaatctaaccttagtagcacacttacttgaagactaaatcaaacaagtctacataattaagcttcacttcttaagacaaacaaaataaccaaacatctatttttttaacaagagctccaccatagatgcaacttaacattcagtcataaaggctaatgagaaaacattttgcaatgcaaagtctaacggaatttccctactgaacagttgcttggatactaagtcagcaaagagccaaacactcaatgcacgtaccaggatgttccccttctatttgtgatgacatcaaacaatatccttgtattgagacctaatcgagctccaaatgccatagcctctgctgcagaagctatatgaacaccagcaagcaactggttgaccatctttacgacgctagagaagagaaaatggacaaaataagtatttttttatagaacagacaaaataagtaatgaaagttaaaggcttatgtatcaaaaaattaaaaccaaaatatggatgaatacaacaaatatttttggacaaatgatcttgcaggatgtcaaatagcttattacatgacaaacaaacatgaatgagaagtaccttccagcaccacaacctcctttaatgacataaagcttctcacttaaggctgttcatagttcacaatcgaatattagtaacaaattcaattctagaattcctgtgactcaataattggaagactatccatctggaccttaaactgtagaagcaatacctgacaggactaaaccagtactcttaagagcttcatctgcaccagatgcaattatctgaaagaagtatacaagttcaccaaaacagagtaaacaaaaaaattaagctttgtttgggtctcggaaaattttgtttttcctcaccgtcaaagttcccaatgaggccttcttaacaccaccagaaacaggtgcatcaaccaatttcaaatccttgccttcatctgtattgaagattaaatattatcatgttatcacaaagtaagcacaagtatgacagataaaagtagatatgagcacaaaaattcttagagataaaccattcaaaaagacaggctatgatattatagccataactatttcagtctttcaattctatttccacttctgaattggggttcttggatgacgcatagtagcatattggtatatatcaatttcatatcctaagaatgccatatttgaaataaaatctcctctgttcttccaaaatataatatatatatatatatataaatatatatctatagaactgccccagcctttcaattctatttccacttgtgaattggggtacttggatgacacatagtagcatattggtatatattatttcgtatcctaagaatgtcatatttgaaataaaatctcctctgttctaccaaaatataatatatatataaagatatacatttatagaactgccccaatgctttcccttaagaaagcacagatggtatatcgaacccaggacctttggcccttagctagagtttccattacaatatgtgcaaggcctggagcaagtagagcatacagtataccatgtaactaaagcaggtttagcgtgatattaaaggagaaagaggatccctcaaaaaaacttgtaatcaaaagcaattaggtttaatacgttatcaaatatttctatataagcagaattcttgctttgggtattcaaatggccaactttatctttattacatactacagactattaattacatgaccagaagccagaaacacaatataacaaacagcataaaaataatcttaaatgtatgtcattgcaattatctgaagaaaaaaaaaatccacttcacataaataaaacagattgttattggacataggacatacttagcaagcggcgttctagttggctcacaaatcctggagaaactgtggatgaaagtatgattgatgccccagctggaagggctgcaaataagaaaaatatatatgaatacacatatatataattatatagggcaatttctagtagtatcaagtatataaaaaaaaggaagaatatcaagaggtgtttgcgcacctgaaatggcaccagaatcaccaaataaagcattctcggcttgactttcatttgtgaccatgattacaagcacatcgacatctagaagagaatgcataagaaaccaaaaagataaatgaaaatacttattcccaatagagagacttcagagattttctaatagacatcttgttatcttgggggaatgtatgaaactaagtgtggataaggcaagaatccatactgcagactttagattgcatctaacataaatatttcaactttctcttaatggagtcctaatatatacataaccagaaacacataaagcatacgctagaaagagaaacactccaaaaatatagccagtgggaaaaagaaaataaacaaacatcagagagtagactgttaagctttcgaccatttcttcattttcattcatattcacatgcctttatacaacttttaacctcctccaacgtacctttagaaacttctgctggagaatttccaattagaccaccaatgtcagaaaatctagtttgtgttggtttataaacctgcatccaaggaaagatgcaaagagggatgatgaatcaaacctcgacctttaatacatcatgtatggcatataaggaatatgtacatcattaagaaagaaaggaaaggtgaaacatgcatccacaccccaaaagagaccatgctttttgcatgtatatgtaaatataaacagaccatgctttatatcattaagccatgaccatagtttacaggcaaatattaaaagtcagaacaaggatgacaaagttatgattatagctacaaaaatatataatttttcaagaacactcagaggagcaaacagatgcagacaacaaataatttacctaatgaaagaagagaatatatatttattacaaatatggtatagctaagaaaaagggttccctttactaatttgaagtagtcctataaggtttcaactgataaaaatttggaaaaatgaagatgacagtgaggttgacatttttctctgttaagagttaagagtactttggtttcatttagttctaaaatcagtcccaacagcttattagtttctaatgggtgtaaactagaatgattggcagtttattcctgataagttttatcttatatttgattaagaggtatgaaaaataaccttaaaagtggtaagtctacctcaaaaagaaaagtacactagttcaatcaggtaaagtcaggaaaatttgagttatgaaggatgagaattacgtcaaaaccgataactgaaaagtttgatttcaaaaggtgagacgccatgccgaatcccattgccccaagaccaataaaaccaattcggttaacactatctgcactggaagttatttggctcgctagctgctcagggttgtaagattcaacattcattgcagctgaaatatttactcccatcattctttcgcaggcctgtatgtcatagaataacagaaaactgtaatgataaatatgaaaaacatctataggatgatttgggctgtaatatggcatgaattcaatccatccactaatgtcgttattaaattatttttgcaaatcatttgaaatgacctttattaatgaagcatcttcaccctctccaatgtgggaagatcctgaaaaggttaagtgtatacatatgagattaaccatgacacttcaaagattcattcaataatatataaaagcaaattcagggcttaaaaatatatatatataaaaatatatatatatccctaccaaggattaattgctggtgtgcaactgacaatagaagagcaggaaacgtaagggattttgcctgatccaagacagtaccctggagtacggacattacaataatcttgatgtaatcaaaaggtgccaacaagaaattttttaaaaaaaaaaaaaaactatgaatgtttggctcaccaacatccaacttcctgtattgaaatgttagtacagaactgatacagcagtatcagcacaccaagaaacagagacttagcttcaataacaattggcaattgctaagcatatcggaactacgaaactaattcaacaagaagtgatgatcggggatgaattctagggttctttgtatcctacactccattaagaaatcctcttgaaatttatgtcctttaatttatggttttgccaccatagcacacagaaaagtgcacaaaatcttacctctaataatactaccaaatcccttggtaatttcattttccaactccataatcgctgatttttttttttcatacatttatattatctttaatttcataactgaacttctgcacatcttcaacatttaaaaatgaagaatttcatgtaaacttggtgatttatatctaaattctatctttttttttattttagggttacagtaccaatgcagaggccagtgaggcttgttctaagattggtattatgaaaagctgaaagtttgaaaaactctgtaagtctgaaacttgtagagtgtgccattaaatttctatagcaaagaataatgtgtttttatatatttaatttaatgatgcagaagaaacaggactaccaatgtcacttagtaacagagaaaaagaaagattatctttaatgagaatttcttaccaatttttgaatagaagtattgaggtaatgttgtttggtaatgccctgtagaaactggggaacttggttcttgaaaaccctgcatattaagtaaaaagaacctccctcgtcaaaggatagtatataatcattatatatagacacacacatacagagagagagaaagaaaattgaatggaaacaaatcttttaaaataaagtaaaagagcatgatccgaggagagtttgctgcactttagaagctttatcttttaccaggtacatttttcgttttggctgagactataagacaaagtgaaggtattctaaatgaagagaaatttctttgaggctaaagttcattaattaaatagctaaatgatgatattaaaacaattcatccttctatttataaactaaggtgatcataagtaatttaggaaaaacttcatgaatgaaagaaaaaggaataaccctgtacacaaattataatcaattctgtagaaattcaaggacatatatattgggaaagtagtagtctcaacaattctcccaattactttgatataatatcttttttttctgaaatcatacgtaagtaggccaacattagctttggagcatgacaacattaaatgaggggaaaaggactatgttgaagcagaactgcataccatgaattcccagcggcatttgaaataatatcatagattatcaacggatgaattccagctttcgaaccaagtgacattgcctccatagaagcaacaagatgaataccctcaagcagttcattgaccagattaattttactaccacagtcaaaatagatacaaaaagaaggtaagagagtatagcctaaaattaaatcaaattacacgaaccatgagttcctgaaaacaacttcaaatcttgtaataaaatttgacatattaaaaaaattgattgttataataaatcacaatacaatttttcattttccattcaagtgatataacagaagtacagatcaaggactgagaaggtaccaaaagaatacattttactgttaggcttgttcatgataataagaactttgtaaaactaacgagaatacaaaccttccagcaccaacttcaccctcaaaagtgtaaagtttttcacacattgctgcaaacaaaagacagaacctcaacagacaatcatacagcaatatcaagaaaattgagtttaagaattgtccaaaaaaagaacaaaagagagaattgtacactgacaattttaatttagaacaaccgaattacctgacagaaaaggctgtgcccttgcagttgcatcggaccttcctgaagatgtaatctaaataaaaaatatataatagcactgatgttaagcatagaagagattagattagacgtcccccaccagacaaattttagtttagggtataatattaagcaaggatgagaatgtagtgtcaccattattttcccatttagttcttcagacactcccttcacaatatatgcatccacaaaataagctgcctcatttttatctgtgagattgtggaagaatctgaatttcaggtcagttagaaagaaatttactattctttaaagaattatctaagtgctttttctaagcaaatgtatggagaaaaatatcatattttctaaagggaatgtctataaatacaatcactactgtctacataaccaataatatcaacttgaaaattgcctgtaaaacacttctcaagtctcttgatgtctgatggcaataaggttgatgactgaagaataaacaccgcatccttctgcaatcctgtgtatccataaacttttcacatttttcatattgacatagaaaatgagaaatacaaatggaaatttttatatacaaatgcatataacattgattgaattgaataaaataagaccttctaaagcaccattgttagcaaggatcacatcgtcaatttgatccgcattagaaataaacacaactaaagcaacagcatctgcaagcaaggaagaaaaaaagaagataagtccatctatcatgctttcaagtttagtcaaggttcgagaatcaatcctacaacataaactgtaattgaaacaaaacactacatatccaaatatcacatactctacatgactataacagttacacgtctatttagtgattaaaatttacaactccttactaaacagttataacattgtacattacccaattgtttcgatttatcttgaaaagttgcacttaggaagagtttgacctcaactaagctagcctcaatttgaaccctctcacacactcaaccaatcaatcactcgagctagcctcatcaagtggctaactccaataataaacccacactagcaccctcaccaacctaacaacttgatctagactctcaaaagtggctaaccacaccagtttactttgtagacttgctcaaccaaccacttcactccactctcatacactcataaccaattgtcattttgatcaaaacgggaaaatgtaaacagaatcaaactaagcatgtgcatctagaaaccacgcacagccaaaaaaaaacattcaaacttaaacattttcgtagcaattcaattattagcgttgcatgatcctaatattgctataagtgtatataatatatataaatatatacatacctttccctgtgtcgagtggagtggcacatctaagtccacctagcgtcaaaaactcatttagcaaaggctcattagtctgcacacagatgcaccaaacaatcttaagcatgatcaattgaatttaaatacaaattatacagttgactcttccgatcaataaaaaaacctcaaacgcttgaacttgatatccagcttgaagaagcttggtagccatttcgaagctaaactcattgagaccgacgaagccaacaacaccgagagacgacgccattgtagacacacagagagagttcttcttcctcttctgtaagagttcgatcacagaattgaatccgatccaatctgagcttggttgaagtaatttatatcggacaagtatagtagagtagagtagaccaaataaaaaaatggattaagaaagaaagaaagtcagagtagacagaggaaagagagcgtttgggatgcacgctctctggtttcgtatcgtaattcgtaactgttgttgttatgattagttttcaactctcaattttcataagtgtgtgaatttgtaccatttatttctgacaaacaaggaaacttcaaagattgccagtaccaattcataattatcctattaaaaattaaaatcacctttattagttttccctcttgatttttatttttttcacctaataaagaaaatactaatgaaaatgcatggataagtgcacaataaattgaaagatacagatttatgtaaaaaaaaattcaatattaaaagataagattggaatatcaaaagataaaattaagaaagataatgaagattcttttgtttagggtcattgtgttagaattttttttttattattttatttaaaatagaataaataattattttaatgtaagatgtgaaaaattt

SEQ ID NO: 14929 - DNA, 5238 bp, Cannabis sativa
  modified_base (2114)..(2116): a, c, t, g, unknown or other
tattacagaaacaatgctggtgtaatgttttgcccattccagctttcagaagatgggatagagatgcagtttgcaaccaatcatctaggtataattaagatttagttaccaacaagtttttaacttttttgttttttttttctttctctaatagaaattaagaattatgtgtgatttcatgattatttgatttatgaacaggtcatttcctcttaacaagccttctccttgataaaatgaaagacacagccagaaccactggtattgaaggaaggattgtgaatctatcctctatagcccatctccacacttatgaaggaggaattcgtttccaaaagatcaatgatgaaagaaggtatgtatgagggtgcaataaatttaaaaatgaatattgttctgtataagtagatatatatttataatcatttttattgggtttcagttattctgacaaaagagcttatggccaatccaaactagccaacatattacacgccaaagaactatcccgtcggttgcaggtcattaagaatctttttatgtcaaattggattgttagtaaaataataaaataataaaaaaaaaagaagatataattacatttgatattattgcaggaagtcggagcaaacatcacagtgaattctgtccaccctggattgataatgacacctcttatgaggcactctgctcttctgatgagtgtgtttatgatgcttcacctttattttacaagtatattatatagttacaatcacaacacatgacatgatgcatatatatatatatataatgtatgtatttgcaggaattttgaagttttttacatgtctcctatggaagaatgtacctcaggtaaagtcctgaatgagtgaatcatatgcatttttgtttggaaagttctttatatatgtatggacagggggcttccacaacatgctacgtggcattggatccaaggctgaaaggtgtaagtgggaaatactacctggattgtaacgagatggagccaagtgcatatgccagagaccaaaagctggctaaggagctctgggacttcagcaacaagttggttgcttctactgcaaagtcttgatcaaaacaactacttatcctcatttcaccattaatcgtaatgctgtgttcataattagaaaaattcatcataataagagtgtgcgtgagacagagtcttagtattattcacgattcatcattatgtcttggaggtctcgagttatttatttactggaatggattgtgttcgttgtttccattaatatttgatataatagcaatttctttctttcttttgcacttgtgtgtattgtgtgtaacatatgaagattgaagaataaatattacccttgtaaagttgtaacgaaaattgagaactttcaaggctttagtgagaagaaaaaggaaagaaaaaatgaaccaaaaaaactatggtatatctatgtatataggtatgtatacaagcaacataaacatccaagtggactaataagaatgagcatcgtcctcccacaaggcagctgctcgaaccaaaaaggcggagccagcaacaaccactgctgcaaagactggtggcacgagaagatcgattttggacttggtgaagagataggatggcaagcagaacacttgtccaggcatgtctagcggaactctgatggccttattggtgtggcaggcatggaaggacgaggtgggagaaatggccgagacaaatgcaacctcgggagagaaggatgccactgccacggtcagggtgaggactgtggtccagctgatggcatagatgagcagtggccaacggcggaggatgtggtagatgagcacgttcgtcattgaaatgttatgatgagcagaaggaatacggaacattgtttggtttgttttctgttttgttggggaacaggtgaggagtacttggttggtttatgtatatatatgataaaagtggcaacctaatctcaacgacttttctaagttaggagtttaggtgtgtgtgtgagagacaaaggacgagggatggagtggtttgactactgctgacgtggttttgtgttgggttaggacaggagaccaactctctctctctctctctnnntctctctctctcacacacacaattaagctcaacaagaagctatcttgatatggagaatggaccaatatttggtcaacagcttatcttttcttcgaagttctaagatgattgccctaaacataacggagtaaatgggggcgaatctgtcttcacatcaaaatgcaataattctacattcaaggtgttggtttcataaatcataatgggataaactactaaagtggcgttgtgggttacatcaggagacaaagaataaatgtacacaacaaacacgtcagcattacattctttaggatggctggccctctcctgtctaatgaagaaacgtaccacaacttgtgaaatatgcctatcgtccacaaccacatgaccatgttttgaaaaacattttcaactgtcaacatcactttcatcaatactaccacgctcacccatgttattacttataaccattgccgtcccatggttgctctactgtacaggcaaatcgcccattgtagtacggcacattcataaccatcttccattcccagtccccactctctcatataaatatatatttctatatacatgcatttgtttatctaaagttccatgctacttaccattggggaaagtaaacatatattgtaatcattcttgaccagatttacaagaagcttcagcatggcagtatatatcagtttatatatacatacctatgtatgtaattagtctgttttgtgcttaaaatattacaaactgggtggtgaaaatactctctccatcaaaagagtcagaacaagaaacccaccataggagatgcatattccagctatcaaaatcaacagcattgcctgcagtgaaatgtgtggacttagaaagaaaacgactgctatagatgcgctctgccacaccttcagctgtgaaaatgctccttcctgtcccccaaatgcaacagttaattattaaatattccaactcaactgattaacttatcaagcgcaatcacgaacttcagaagaacagatataaaagcaaatacttcagaaatatcagaagttcaatcagtaccgtgtcatgcttgaagagtattccaatcaaagcattaagctgtgtattaagtactccatcaccaatgcccaatagagctgccatgagaagtgggtataagacaccgagtactccactagttgcactgcaggatggcatggtaaaacaaccaagtcagaacaacaaaaagttattctaaagaattaatatgagtccatatgaacacaaggataacctgtacttgaggaggagccagaggaatacgatagcatgagcgaaaacacctccggatactatcagagtgatggacttcagaccagaagtaagtcgaccagccaccagcgaacactgagacaatattaccacaatctgagactacaatatatcaagatttactaaagtacagagtggaagactttttctttcaactttacttcatctcatttgacaacaaattttaagggtgtccatatgatatgaataaaaaaagaattgtgcatttcaaatgtccaccactgatcagaaggtgataagcaagagcagtgagataattgctgtgcaagataagaaagtttgttcccatgagcggatcatcaattttttacattagaactttcatattttagtatcaaacgaaataaataagtaacctggttgtgagctcttatttgactttgttttgagaaattatgaacctcatgatgcctacctatttattctcaattaataatattccaaatttcatgcaacaataaataaatgaatttaatgtggatattaatgctataccccaagacagttgaataggatacaagagatcaaataaaaagggtatttgagtcattgtattgagggtgggtttgtgagtgagaataggttctacatataggtaagggaagaaatgaggcatgcaatgtattgattaattctctatttgcatcagttgtaatcagcttttctcatatactaatatcaataattctctactgtttggctaccgttctattgctattagattcattgggctcaggagtatactcggttcttatcaattacttgcaaaaaggcacacttaaaattgaattcagcaaaagtagcagttttgttagtggtaaaaaatgtttgcttgctactgcatacttactattgcatcaaaagccccataaactgccattgaacctccaacaccagatacacccagtgcaggggttacaatatactcggtaaattcagccctaaaattaaaacacatcttccttgattaaaaaattaattttgaaagataaaatgagaaaataaaagagctaaacaacaatggttttgttgaaagtagataaaatggcttaatgaagacttaccacacaaatgcttgttgtagccctgaatatgccataagaggaataatcaatagcatccgagcacttaacaaaggagtgatgacagacttcagcagcgatataagtgagtcatataaggatactgaagaagactcggggacctcctctcccttaccatcccgtttttgtaggaagcacataagtacagtacccaaagtcatactgcaaaggaacacaacatacaataaagttgtcccgctcgtacttccatcctgcagcgacatgacatgatcaaagcaaattattacatgaaacaaacttgaagacagagtgtaagtatactcggttaagactaaaaagtttaacaaatgcttgtcttccaatttttacataggttagttatgtcattccttgcagacaaattatatacaaaggtcttcctactaataaagctactcatatctaactcgtgacacatcaaactaaataaatatataaacttgcagtagtattagatagaagtgtaaccacgttatagtaaattgaacaagatacagaatccgaaactataatataatgatgacacatactgttccatctcttaggagggcaagcgagagaagattcccaaaaaactgcaatgaataaagttgtcacttcaggctatacaacacagaacagaacaagagaaatcatagatagcagcaaaagaaatattcaaattttaattgggttgacctggtgaccggcaaa

SEQ ID NO: 14930 - DNA, 9011 bp, Cannabis sativa
ttttttttttttttgaattttgagtgttctgtctaaattcttaatatctttttaatatgaattaaagaaactagaaattatttagtttttaatcaatttctgcgaagaaaatggggacgaaaaggtttatataatagggaaggaggaggaaaggcgtgttaaacctcgagcaagtttcggggatcaaaacgaacagatctgatctcaaccgttgatttagagagcgagagaaaagcaaggcaatggtacttttgaaagatggaagtgcgaaatttgtgtggtcgtggggtgggaaatgggaattggattcattcgatcccctccctcctctttttctttttcttacttaagcctccattagattagaggctatatttttttaatggtgaaattttaatacaaatcaaataactattttctaaaattatttgtcagaagaattttttacaaaaaaaatatgtttaataacttattgtaatttctatatgacatttctccagttttcgtttttatataatattacaattggacgatagatttcaattggggatgtagctcaaatggtagagcgctcgctttgcatgcgagaggtacagggttcgatcccctgcatctccattttttttcaactataataattatctgacaaagttgattaaatgtgatatttattcttctattaaatattttagttgactaacaaattgattaaaggtgatagttattcttctattaaatatttcagttgcaccaacctgactgatcatttattttagtagtggtagcgtttaatgattgtgtttattatcacttcatgtaggtttgtctaaaacattgtatgttgcacaaaaagtataactatactcaaatactcttattgtttgtgtagggttatatgtatttacattctcttcaattgaattatattgtctaaagttaaagaatcttatatattaattttaaaaataaaataaaaatattttttattatctctattaaatgttaaaaataaaataattatttagaataaattaataaatattaaagaaatagtaccaaaaaattcccttttattttagctaaattctaatttgtactctctcttaaaaataagaagcgagagagtacagaaaaataggctcgcccagttgaaacaagaatattgaagatcattgacaaaactacagaggttgtaaaaaactgtttcacaactagagttgggtatatgctttttgaggtgcactttttaaacctttaaacatatgttgttgacttagaaaaaaaaatatgcaattgtaggagataccaacttcctggaatctcatatggtcatgcgttgtattatatatatatactggtgaggggtttagaagttatggactttgtccatgattattacaaaaaagatgcatttttgacagcatatgaaggaattatatatcctatgccaagccttgatttgtggccagaaaaaggtaagaatccaatttattcaccaactccaactaatttacctggtagaccaaaaaaacatagaaggagagagaaggatgcaagtgcaacaaaagttagaagatttaaacagataaagagttgctcaaattgtaattattagctgatatagttgtccgttaagttaggtttagttagttacaaagttagttaattctgttcctatatagtcagttgtatataaggttgttagaccttttctttagcttttctttctttgctttgttgtaattcaaaattgtaacaaactcatctaatataaatagcagagccttaatcataatgaattgatcaagcatttccaattcttagtactgttttctaaactaactgatttctataatccttcatggtatcagagcacattgactcacgtccatggaaatagcttcatccgatgattctcaaggtcatggttctgccatgtttggaaacaacaactatactccggcaagctctgctacaccggcaacaaattcttcatggaatccattctcaaattctctcacatcatcactcaccattaaactcgatcgaacgaattacttagcttggaaatcgcaagtcgtaccaacggttacaggacatgatcttgatgagattttgttcagcaatgttcgcccaccaactactctggttactggataagcaaatccggccttcgatcaatggaagagacgtgaccaactcttgttgtcatggctaagatcatcaatgagtgaaggcattcttggatctgttgccacctactccacctcctttgatgtttggagatctcttgaacaaaaattttcaggccaatcaaaggccaggctactgcaataaaagggacaattaacaaatattcagaaaggtaacatgtcaatatctgactatgttgataaaataaagtctatttgtgataatcttgccattgctggatgtgttgttaatgatcaagacattgaattgcaattactcaatgatcttggacctatgattcagtggtctctaaaatcacttccagcaatgaatccaagagtcttgaagaaatccaagccctgttaatggcccatgaatgtcgactcgaaaggcaccactccgtttctgatatcaacaataaaatggctgctaatcttgttgttggcaattcaagaaccgggtacaacaacaacaggaataataatttcagaacttcgtatcagcaagggcgactgaattcgaatgaaacagcaagaaactcaacgaattttcctcccagatatccaaactccaactcaagaccgatttgtcaagtttgtttgaagattggacatactgcattgatctgtcactataggtttgacaaacattttgttacaccaaagaacaactttcactctccaaaagcctacattgcagaacaagaatcacctgaagttaatgaccctcaagcctactcaactgcatctgttccagaatttggtgatgatataagatggtatgtggatactggggccacaaaccatgtttctcttggcatggaatatctagacagtgctacaccttatcaaggatctgagacattagcagttggagatggtaagcaactttatatatctcatattggcaaaaaaatgcattcactctaactcctctccatctctaaaattaaaatctattttaaatgtccctgctattaccaaaaacttggttagtgtctctaaactcacccatgataacaatgtatttcttgagtttcacaaaaattgttgttttgtgaaggacaagtacacggggaaggtactggtttgagggaaacttaagagcggcctgtacgttcttgaggaaaacagctcaaaattttcacaagctgccattcaatgccaattagccaccatttcaaaagcaaatctgtcagtggaagctccttctagcagtattaataatgattgtaaatctgattgtataatcaatactatgagcattagctcaccaacaaattgtaacaatcaaatcatcaataaagattccatttcttttgaatttgaatctcaagcattgttaactactgctggttgtgatgttaatctatggcatagaaaattaggccaccctgcaccaaacacattaaaacaaattttatctagcctatctatccctacctccttgaaagatctacaattttgtgatgcatgtcaaaagggcaaaagccacaaacaacctttccctctgtcatatactagagccactaaaccattagaactaattcatactgatgtgtgggggccctctcacactccatcattagatggttttaagtactacattcattttatagatgattttagcaggttcacatggatattccctcttacacttagatctcaggcttatgatgtgtttacccaattcaaaaaactagttgaaaaccaattttccttatctattaaatctgttcaatctgactggggaggagagtatagagtgtttgctaaatttttgcaggaacagggtattcattttcagcatccatgtccacattcacatgagcaaaatggtcgtgcaaaaagaaaacatcgacacattacagaaattggtcttacactcctagctcaagctaatcttgatatgtcatactggtggcatgcattttaatgtggagtgtatactatcaactgaatgcccacaagagttcttggaaatgaaagcccctatcaatgtttattccaaaaaccacccgagtatcagtctctcaagacctttggatgcatctgttatccccacctcagaccatacaactcccacaaactaagttttcgatctgaagcctgcagatttctgggatattcaccaaatcacaaaggtttcatttgtgaaagctctacaagcagaaggtatattgccagggatgtcacattcaatgaacaacaatttttgttccctaccaatccaacagcaacaaccacaacaccagatcctgcatctcctgccctttcatctcaactgcccagtcacaagttcaccactgtcatgccatctgctcatccagaaaataatgacccatccatctctccacttccccctgatcaaagagcatcaatcgaccatcaacaacacactacaagttctgcttcttcctctgcagttgcatctgcaactcccagcagttcacaacataatacagaccccatcactgctgctacttcagaaactccacctcctgttcgcactcatgccatgactactcgatctcaaaggggcatcttcaaaccgaaatcatacatggccacaaaacatcaacttccctctagcttgcttccatatgaaccgagaacattaaaagaagctcttgctaaccctcgatggaatgcatcaatgaatgatgaatatgttgctctcaaacgacaaaatacatggacccttgtcccttatacaccaaatatgcaagttcttactaataaatgggtgcataggataaaactaaatgcagatggtactgtgaacagatacaaatctcggttagttgcaaaggattttctccaaactcatgacatagatttcgaagacactttcagccctgtggtaaagcctgcaacagttcggacagtcctcaccatagttgtgtccaaaggatgggatgtcactcaactagatgtaagcaatgcattccttcatggcacattaaatgaacttgtctacatgcaacaaccagctggttttgttgatgcttcttatcccaatcatgtgtgcaaattaaacaaggctctctatggcctcaagcaggcccctcgtgcttggaatgacaaactcaaaatgaccttacaacaatggggattcactcaatcaaagtcagacaactctctctttatctatggttcgggttccacacttgtcttgcttttggtctatgttgatgatctgctaattacatcaccaaatactgaactcaaacatcaactcatccgagatctaagcactcatttttctctcaaaaaccttggctctttacattatttcttgggtgttgaaattgtacgcaattcagttggcatgtacctctctcaatcaaagtatatcactgatctattagttaaacttcatcttgatggtatcaaaccgtgtgccaatccaactagttctgctcacaagctatctctcactgttggagatcctttccgagacattcatctctaccgaagcaccattggtgcattacaatatctcactctgaccaggcccgatgttgcgtatatcatcaataagttaagtcagttccttcatgccctaacaacaactcactgggaagccactaaacgactgctacgatacttaaaaggcacactcacagagggtcttctcatcaaaccaacaccctttcttacattgtatggctactcggatgctgattgggccagctgccccgatgatcgtcgctccactggaggctacaccatattcttaggaggcaatttgatctcctggtccgccaaaaaacaggctgtggttgctcgatcaagcacggaaagtgagttccgcgccttagctaatgcaacatctgaaataaaatggcttgtttctcttttgtccgagcttcagctcaagctgcacgaaccaccaatcctttgggttgacaaccaaagtgctgcggccctcgccgccaatcctgttttccacgcacgcagcaaacatatcgaaattgatatgcactttgtccgtgatctcattctcgccaacaagcttcatgttcgatatgttccctccgttaatcaagtagcagacctcctcaccaaggctctcacaaccgatcgttttcactatctcaaaaccaaactcaatgtagtcaccactccctttcgtttgaggggggataatagctgatatagttgtccgttaagttaggtttagttagttacagagttagttaattctgttcctatatagtcggttgtatataaggttgttagacccttttctttagcttttctttccttgcttcgatgtaattcaagactgtaacaaactcatctaatataaatagcagagccttgatcataatgaattgatcaagcatttccaattctcagtactgttttctaaactaactgatttctataatccttcagtaagcaatctggccatattcgacttacttgcacaaactccaccgtaaatgaggtatgtcatattttattttaataatacaacaaacacttgagtagaattggttaatgatcaattgtgtaaatgcagcctcgtcgtgttaagacgagaggtcgtccaccaactgccaatccaactcatgaaacttcaagaggaaggagcggttgagaaagcaaaaagctaaacaatcttaagcaaattccacacctgtaattaggcaagctgcaagagaagaaggcagtagctcacaagttatctagatgatactctgacaatgctttttgttttattttgtttttattttggggcatatatgctcaattagaaaattgctgagttatagtacaaacagcataatgttagtaaattattatattattagtcattttttaattatttatttttagtttatattaatcaaatgaaaattatattaaaaaaatgacatggcctattattatgtggcaatattaagtgacgtgcccatctgagtagaagcctccgtttagtcattaacagcaagtactattattgctccattttcaaaacaaaatgtattattaccgcaaataaaaaaatttgagtattattgtcacaaatatatatccatatattttataaataaaaatattttattttgatacaatttatggtttttttttttaggaattaggagcaaagttgaaaagaaatgaagaaaaaaattagcattttttgttgaagtccaaagcaaccgaacccaaaaaggtcaatattagcccatgaagcccctcatcaattttatctcttctaaagcatgtgatgcaatgagagtaagtctaggtcatcatcaaccctattttcctcttccacactcaaccttcatccaaagagtagaaaacaaatcacaatgaaaacaaaaattaatattaattttatttttgatttcaaatgtcaaattcaatattaatatttattttataatctcaaactttcatttatttatttttggtcctttaatggctctataaataggagctcattttagtaatgaatggtgtaatttttacagtaaagaaactatagcaaaatttctctccacttttcttctcatcttttttctttagaaattttatgagaatgattagcataatggcctaatcttccttggaaggctagggatgattccatatccaaggttattttgtatttttgattcacatgtaatttatttgaatgatgcaagtttttattctacttttatttttatgttcttcttccatctatatatatactattacatattaaatatttaaagacttagtcatactctttctatatacttttatttagtaattatagtaatggtagtattgctcattgctatttttatttactttttgttaaatgatatataggtttatttatgctctctctatgtatctaaaattaatataagtaatattaatgttcatttccttcaaggtaaatactaaaaattaatgtccaaagcaacccaacccaaaaaggtcaatactagaccatgaagcccatcatcaattttatctcttccaaagcatgtgatgcaatgatgataagtctaggtcatcatcaaccctatttccctcttccacactcaaccttcatccaaagagtagaagacaaaaaagacaatgataacaaaaataatattaattttatttttgatttcaaatgtcaaatttaatattaatagttattttataatcctaaactttcatttatttattttttgtccttttataggtctataaatagaagctcattttactagtgaagggtgtaatttttagagtaaataaactatagcgaaatttctctccacttttcttctcatcttttctctttagaaaatttatgagaatgattagcataatggcctaatcttccttggaaggctagggatgattccacatgcaaagtgaggttattttgtatctttgattcacatgtaatatttatttgagtgatatgcaagtttttattctatttttatttttatgttcttcttccatctataaatatatactattatatactaaatatttatagacatagtcatgctctttctatatatttttatttagcaattatagtaatggtagtattgctcattgctatcttttatgttcatttttatttactttttattaaatgatatataggtttagttatgctctctctatgtgtctaaaagtttataaaagtaatattaatgttcatttccttcaagatcaatactaaaaattaatgtccaaagcaacccaatctaaaaaggtcaatactagcccatgaagcccatcatcaattttatctcttccaaagcatgtgatgcaatgatgataagtctaggtcatcat

SEQ ID NO: 14931 - DNA, 6391 bp, Cannabis sativa
actatatatggcagcacgagccctttgctctctccgcttccccccaccccagtcccccctgcctctgctccgaccaccattctcacctccacggtaagctccgctacggggataatctcgacgatgagtggttcactgtatttctcctctttgaaatctctagaaggttcccggacctctcaatccgagtttgggataccgacggtgagttcttgctcattgaagctgctttccacctccctcgttggctcaaccctgacaacagcctcaaccgggtcttcgtccgccgtggtgacctccatattgttccgaaggaccgtctccccagccctactctcgacgattcgctgaagtttatcaatcattctggggatgtgtcgcgggcgccggagccagtccaaaccgccgtgaagaatcggatatcggagtatcccgacagagcgaggttgaatacccataaggttagggttttagttccagtttcggttgctcaagtgctgaagcacgagccttgcttgatttcactagcggtcgaggctttctacgaccgggatatcgactcaatgaagtacgcggcaaaaatggagaagttcttgagcaaaggtaaggaggaagaacttgttcgggtatcggtgaagatgtcgagggccatgtatgctcagctggttcagcagacgtttcaagcacccaaatgttatccaatgcccagtaggtctgaaacttcggcttatctcgaagctgaattggggatgaaaatcgcttgtggattcgagatgatgtaccagcagcggcttcgagaggggtctgaaggtaaagggagtacttgggaagcgttcaaggagagtttggagaagagtggctactttgaagggcagcttccggggtcccaagagtacaggaggttgatgcacaatgcggagcaacagtttaagaacagttatttgtcttcgaacgtcaggtacttgttgattttgtaactcttccagcaaattgtatgttaaagtttcatgttttaaccatatttgaaaaatgttggtctgatttatttgtattgcaaaactttgatgtgccatcgttggtttaatcagtggtaagtaatttttgattagaagtgatggtatttagttcgtcttacttttagggagcgaactatagagatgttatactctgtttcaaggttattggtatatctagttgtttgaagtgttagttttgatgcagtgagatgataaaagctccattgaaacgcattgatgagattctagctttacctcattcggaaaatgattttaagggtcatggtgttagtccttctgatgacgatacctggctttataatggagaagatgagttaaactctgctctttcagagagacaaaaagagcttgagctttacaatgcgaagcacaaggacaagaagaagtcaaaagtgcagcaagatgatagtgaatcacgcagcactaatgttgatgagtttgatcctagtgatatagcaaaaactatgaaggcatttgtcactaaagtttcaagctataaaggggctgaggttcctgaggacaggtttgtgttaccatctgaatcatcaagtttttcaattccactatctacaaaaacacaacacaggaataagcacacatgcatttgtactttagcatgcacttttgtctcaaaattttccaatgtatttgtaatttctgttgcttctgaaaccagagccttgttcattgtcaaatgtgaaccttattcgcctgtttattatagtttatgcctctttaaaagttattatcctttcccttcaatttgattgctatctttcaggcttagctgtaatgagagtgagtttgcaccatgctgcttgaacgtatcttcataattctctgttatttttgtaattgacactatgtagcgcctggccgaacactcttagtttttaaatcttgctgtttcggttaggaaagaataaaagttgctacgcttacttttcaactggtcctagcaataaggttttagaggttgaaacaatataacttttggaaaagtatttggggcttaggtttaggcagtatttttctctttgatttggaaactcatctacttctatgtaggctcttgaattggactgaatcttatgattgagtgactggaaattggtttgtatatttcgtgttgggtgtacattccaagctactcttttttctaaaccccattgctgaaattcttttagtgagttgcccgttgatttttattaatgaaattctgaatggaaatttgcttcaggctgcaaccaaatactttgctcaagctgtaatgaaagtcaagtgatcctttatttaagtgaccatgctttgtttcttttgttcctgtcgcataagcagctcatccaacactaatttttttttaaaggaacctaaaagaggtgaacctagatgtggaccgttttattaaagacatggaatcagtgatgaagcaacaaggttttgaagacattgctagtgatgatgatattgaagaaggatcctcgtctgaccttgattttggtatgttttgcaacgtatatattagtggaataagccagctttgtttaatgaactgttttttattagtgcaaatgtctcttagaagcactctgctattgtctccctggttgttttcagaaacaacctcttttaaaagcaagattttcagaatgaattgagaaaaaaaaaattccttaagaaatatattttgttattattggaggcacttataattctgtatttgtgcatttattttgatgacaacatttcttggaaaaatcttataagatgttttttctggcttgagaagttgagattatgtagaatgtttcagtaaaagagatatacgttatgctttggtgtgcactcgttgtctttgttgcataatttaaacataaacgtattctgtgtctcgtctttgctttgtgttcatcctacattttctaacgtgttaatgaggatgacatctcgaatatcagcctgtacacgtttcttctgaaacagagaacacaattgaaataaattattgtagttctattttttgggatctttttaatttcaagttttaatatttataatcacagaagaatcagaagatgaaagtgatgaagcagaaccttctgaaggcaatgaggatggtggggatacttttatgcaatcttactctgatgttttgaatgaggagttgaagtccagcacacttgagaaaagttttgttcgtgctaaggaacaagttgccaaaaaagacgaggtatagttctcactctctgcacagactattacagtcaagtttccatatatattgataatcatactctttctgtaaataattaaaaattagattgaatggttggactgtgggagaaaaagcaaagaatgaatcaatcaatccccatctgtgcaacaaacatatgtacactgcaaataaatgcaccaccaaaatttttgttaagaaaagtttacaaaagaaaaagattaccaagatctctctatcctgaagaacttataactacactctatttaaaccaaattgatatatttgctgttaagataaatgatagactagttctgtattctagcttttgtttgtctaaatgttatattgaccattttgcagggaacgtcaaataccagcacagccgacatggaagaggattttactcctgttgatgccgacgtgaaccttgttaaaagctttctggattccttttcttcccaagaaggccttcctggtcctgcttctaatttgcttggtcttatgggactacaactaaaagatgccaacaagaagggcaagtgaatttagtttagttttatgtattctatgtatttgggtgttgtacatgctttttcctttcgacgagttttgtcttgaaaactagctgtcttttttttgggagaatttgaaagaaatttaggttttttcttttaaaatgtacaaataatatgaaagaaacaagcttgctttgcttatttattactccgagataagcgtcttttggactagatatattatgttgaggagtgctaaggaaactcttttttgtactctctccataattgaatgataaatgtcaaatttttagattgatttatttgtgtctattaattaatcataatcttactattttattacaattatgctatcctaatgaaattaatacactaattatttatttgtagttgaattaatcttgttaaaaatgaataatggagactttgaataatgaacacaatatatatttgtatactgaataaaataggagtcaaaactaaaaaaattaggagtcaaaataacattcatacattcatttgccaatttaaattcattcaaaataatattaaaattatcaaaagataaatacataagacataaataaacataaatatcatgtagtaatagagaagtgcttcataatcattattgcattctatttgaaggtagttcttggttagtgtgcataaatgattcaaaatttgtgacaaaagagcaattttagaaaagatatataaaatttcatactattatttattatatataataagatattcaaatgtataccatctttcatatacgatccaaaacttgtacattgtgagtattgtgtagaaatatgttttaatacgtcattttctcccagaaaaatgcatgttaactttagtataataaaattaattttttattaaaattaataaaattatatataaaatatttaccgttccatttatacattcatcatcattgagaaaaatatattccctactatcttgcttaagttgctacaaaaataaaaatagttaacataagcacaaatataattaaataagttacataattaaaattactaaaataaatttataaattattaattaatacacaagttaatattatttaataccatttcttccaagtttagatgtagagtgtctgtacaagtagtacttttatcctttgaaattgcatccctatttataaaataaaattatttttatcaccaattagtttcattatatctaaaaaattaattaataagaaataatagattaataaaaagatgtacctttttggacttgtcattggattttcttttgcgtgagttttcaagtccgctctttattcgtttcggtgcaccttttgtttttgacacttcaagatcatgtattgattttttttttaccatcagagtgcaatactctcactaatagaatgattctccttgacacacttatctaatgcatcattcaaagcacaacatgcaatatcaaaactcttttgagataaggatccttcttcaattagtttgatggctttacaatatagttcatcataccattgtttcttggattggactttggaatatgaccagctgagtataaaatctttgcatctttagtccatcttttcaatatatactgtggtggaacattgaaaataccaaaagatcgaagaacacacatagcatgcctacaaagaaatccatagtattcaaacattcggcataaacaactttctctatcatagttgaccacttatattcaaattcctcagctacccatgaattataaacacaactgttgaaatctctcataaaatgttcatttgtctttatcacagaaccaagtttttcaagaatcttccttaagatatgccatagacaaaagcgatgccttgtatttgggaaaacatcactaatggctgctttcatagctttgtcttgatttgtcaatatagaaattggagctttcccacccatagctctaagccatgtttttattagccaaacaaatgttgatttagtctcatgtgcaagtaatgcacagccaagcaatgaagtttgaaaatggttgtttacaccaatgaatggagcaaatggcattttatatttatttgtgatgtatgtggtgtcaaatgagacaacatctccaaaaattttataatcttctcgactttttgcatccacccagaagacatttttaaggcgttgctcttcatccaagtcaattgcataaaagaaattagaatcttcttcttgcatatgcatgaaaagctcttgcatcgcactagcatcccccgaagctagtgccaagcgtttttccttgtccaaatgatttcttatgtctttctccaaacatccaatgttttcatatccattatttgattttgccataacaacaaaaattttagttgtgcttaccccaactgcatgtggagtgttaatggtctccttgtttgaaggtttgatgcttctatgacatgtgaaataatgagcttgagctggataaacttcatgattatgttctttgataaaattataaacataccactttccttctaatctccttttaagatgcaatgttgctttacaatctatctt

SEQ ID NO: 14932 - DNA, 6865 bp, Cannabis sativa
ttgtataaagtttttgacttcttgattggatatgcaaatgtgtattacaccattggttatgaaatggtggcttgtttggcatgatattctgcttcttttctgcaggcgataagaacaggatgggtgcatccaaacatcaacttggaaaacccagatgacggtgtggtatgtagccttatcccagtctatttttcagctaacacgatgtccctttacaatgctaacaagattttaacagttgtatacaagcatgtgattatatgatgtatttgaagaaatgccccttctttaatcgtcttagggatctcttccttcattattctaaaactgttgaaattatgccctcccagattgttcccctagggacaaacatacccattcatgtgatttgaaaagtctgtatatattgaccaatgcaattagccttggggagacatgcatgttggttagaatacatctcaaattttgcgcttcatggaccaccaattttcttcaatatttttcgcagtagttctcaaagtcgagacatatatatacctctatagatattaagggtttttgtgctattacaggatagaaatttgctagtgggatcaactaaagagaggctagacattaaagtggcactatcaaattcatttggtttcggtggtcataactcctcaatcttgtttgctcctttcgaatgaaacagacccaagtgggctactactaccttgatgtaatcacgcacaaggtatgatcctaaatctgtctcctattcttttctgaagagacttgatgtgtatattgatgagctacatgttcaatgatttagtgttggactttcaaaatcgtcaaaaaaggaagaaccatgaagattcatgatgaatatcatagattcataacataggaaagcatgagcttattttacgtagggaaagcttgtacctgaaactacattatgtcttgggttgtgaagtggatattaataatgggatggctatgtcttgcagttaccgatagaacgcatttgtatctgatcttctctttggttggaatgggtgcatactactactactactactaccatgctaaccaaatttggttccacagccacaaggaatagaagtatcaaagacaaaccatgctgaatggaaatgagagatacacagctcacaatattttacccattggaacattgttgtctaaaaaattttctctttcctattttcataaagtagagcccatacaaggcttgtgatctaatcgatgttagctatgtgtttggactaaagctaatatacaatactggttttttccttggtttttttgcttccttatacaggtagatggccgatcagactaaaggcagttattttgagaaaagtaggaaaaaattatgacatcccaaaatgcacaaatcaaaaccatttctttcctgtttttttatccttggaagatgaaaccatctgatttacattcattttatggtacatttatgttcttgtatttggcaaaattcaacaaaaaatcaaaagcagaacactattgaatgaaagcatcacatttctaattgaaaagccaaccagctcaaataaaacatcatggaaagataactgagttgaaggaatactttcttttctctacaagttttcatgtgaacatatctcaaaacacaacacattcctcggacaacattataattacaatgtgtactccaaacaagtaaagaaaaaaaaaattctttcaaaaaaatacaagtaaaaaattaattaataaccacacattcgatgcagttgtcaaaaatttgagtacccatttgtactccagtaactattggtaaactgaaaagggaaaaagaaaattacaatcttaacagctctacttatttaataaggcatttgattcaagacaatatgatttaacaatggtgcctcacttgcttttcttcttaccacttttcttatggcttttcttaaacttcaagcctccagaggacagcaagctagaggcacttttcccttcaagcctctttgtcatcttcaccacactagccattcctttctttgcagatgcccgatgttctggtctgcggctcatcatcttgcgatcaagtggccaatatgcatatggttcaagtttgtctttcttctgcaaatctccaccagccttcttgttagcatactcgttccctgtgtaagcccatccagagtctgatgtcttctgccgcttctgagttttctttgtgcttgcagaccgtctactacctgcttcactcttcctatccgattcaggttcaaaggatttttccattttctggtttccttcttcttgaattatcatgcgtccatcagcgtcaaattctggctcattgtccgatacattttttcgtttcaggttttctgttgatcgaagagctgatcttgttctttgtcgatcaagcaagtcaagtggctcgtcatcttctatttgaccaaccaaatgccctggcaagttcttattccctctagctctagacctgaaaaataagtaattaataagtattaggtctcaaggaaagatcagatagtcaaaaagtgattacaagatgagaggatgcaactatatggaatcctatcatttggatagtaatctaaaaaccaactacacaaatatttttaataacgcagttgtgcttgccaaagatgaattaacaaaaccgcagaatcaaaaaaaaaaaaaccgcagactctactggctaaatttctaagcattaattgtcagtttaaacattctggggatggattaccaataccaaccctctgattttaaaataacaactattggacgtactttactgaaatcctttatttattgaaaataacattcttgggatgtattaccaaccctctgatttgaaaataacaactctttacatacaccaaaatattaacagcataaaatcacaactgaccgctgtaaagatgctttagattttaattgtgaggaagcctttccccgcctgccagaaactgtctggtcatccatgtactctaactcactattttccgtttcctcatcaccaaaatcagaaaatattttggtatggttccacctgctctgcctgaaatggtattaaaagaagagttagataagtctaagtgagcagttccacaacagcattttcacagcatttttccttcacatacttcacagttagatgaaaataatcaatttttaaattggttggaggtactgatatggaatggaaaaaaattaattttatttcattcctttatttggctgtatttaaagtattctaatgtcattccatctttttactctactttggtggaatgctattccattttgaaatagaaggaaaaaccattacaatgcacaatatgaaaaaatttaataatttttgctatacattttaaatgttattccatttgtatacctaatcctatctctctcattcctattcctgtgttttcgttcctaccaaccaaatgtacccttgctgtttttctaccaataacaatattcacattactcaaatgcacaacttaaaaattagtccctagggtaaaagatacttcgatggctttgtatagtttcaacagttggaaaacattgaacagatgcatttgtcaccaataagtttcctgagatacaaaatttcatagcacatcataactgataaaaattagtacctggatgtagtggcttttgagaaatgagatttagcttcttcagacggagcagccagttttttctcctttcgttccttgatcttaacaaaacaagttttaaacatcttacaaatatgtttgggaaaaattagtaacgttagaaaattatgtaattcagtataccttccgtatattggtaaggagtttcatgtgctcttcaggcatcacagccttaacagcatcaagtccacattttttcactagcatttccaatagaagcttaacctgaaaacatgcaaaatgaccaacaagtcaagaatttgtaccgctagttcagtaaagcacaagcttaagcacggtcatatgtcatcaaggaatatcatgctgggtcaaacctaccttagctttgaagtgtgttttagtatcatcttgccacatcatcaagccttcaaccatgcccttcaagtgtatttgtagtgcctcagcttttgacttagccactagaaccttcagtaagcctaaattagcctgcacaataaaattaaattattaagcaatatttagaccaaaaaaaaaaaaaagaagagagaaagcaaataatatataagaaacaataacaaccaattgaaatgtttaaaagaatagtcatcatttctgtagacgaaaaaagaaaatctgggacaaattacaggcaaataacaaatcctctataatcaaagtttaaactataagatttaaaaggcctttcaaaattgttcgaattatacaaagatgagaggaaacaaactttgactatttctctgttctttctccgaaggagtagaaatgtggatggaagcaaattgcaagcagtcgaaacaagatcagaaaactcataaaccaatcgtgccaagcctttcactgcagcacttatcatatgaggagtctccccagccaagcctccagctacctgtgaaattgaaatagcaagttttttattatatggacaatgttacctaaagaccaacaatacaggtcacccagaaatattacacagttaaaaaagaattaacaataccatgttaaaaaactgattcaagttttctctttttccccctttatcttcatctccaaaagcatggccaatctcgacaacaatatcatacgctctgcttcttgtttttttattagcctgcaaaagtaaacttagttttcagaaaggttgcagtagtactaaacaattcacatcatgatggtaaaagagagtgaaaaaaatcccaaacattttcagtacctaaaatgacacacacacaaacaaaatgcaatatgcatttaaaaaatatgataccaaatttacgcctacatagcacctgctgtatcatattgataaactttcaagacttatcaaaaagaatggaatgcagacatcacatgcaaaaacagaccacagatgtccacatctgttgtttacagatcatatgtaacagtagaactaacatgggtttgatgaagcccagattagtataagttcacagtttcaattaatttaaaaaagatatgaacattacctctttaagtgcaagaattatttcagttaggaatgatcctatgatgtcacgccgcctctgctcagtattgacctatagacaagggcacaagtttaaggagtgaggcatatatacttctcaaattcaaacctagatcaattttgtagtgaaagattttatgatacattggtgcatcttaaattgataataatcatttacagaccttggatacatgaactatcaaaaagtacagacaatcaagcctatggcgttttgcagaaaaattgcatgaaggcagcacttcaatcataagttgaagtatttcatcaagcttcgaagcaaggaatgcatcactggtctgccaaataaacagtgcaacaatatcgagagttagtaaactgcaattcatttattaataatagagtccatgtgatagcagagatgacaactttcacatacagatgttaaaatcagtaaaccatgaacccattagatgtcatagaatgtagctatggatgagcatgattagcaattgtgagtgatattcattactcaaaaagctttttgcataccttgagaataagtgacaagactttgtaagccttcttttgtattaatccttcaccatcctgcagtcagagatagttaagctactgcttcatttccaattaatagagaaaaggagctccctccataaacaaccaagccaagaaaagcacaggcaaatggacatacctgaagtgcaggctttatcgcagtgaataaaagcttaacctcttcagaatttaaaccaggtaaaagtgaagcagccaggtcaagaagtttccccctgtaattaagatacagaagttactaaactaacagaaactgcagttatctgttttgaagtcacgaaatatgttcacaaagacccaagttatacaaacgagtgtacatcagactggagataacaagacaagaaatggcaaaaaatagagcaaaaagaataaaaataaagaacctcatagctgaaggggaactttcatctgatggctcatcaatggccatggaatcagacttctttgaatattctgcttttccagcattttgagtgaccttcaaaagcttttgcattgtgtttttaaataaccttgacacaactcctttatctgatattgaagcaaactcacctatagcagactttttggaaaatgcaaaatatataattagtccaaaattttattatcaatcttgccatatatatgcaacaagttaagcaaccaatgctctttagaaggcaagaaattctagatattgctaggcaaatctagtaggaatctgaaccgcaaaccatggtccaaactagtaacctacccttggggtcaacaattggttctaataaaaaataatgataataaatttgctctgccacatgcaatgttttgaaaggcggaaacgggttctgaggcgcttgccatagtaccacgaggcgtaagcctcaacaataagaacaaaaaattcataaacattatcataaaattcataagaaaaaacacataatttcataataaagtcataaaattcatgaaattactatagctacaagtcttaaaatataactaaaggcataaaaggttcaaaattaaaatcctaattaatagacaaatgataaatttgaagtctaaagtttcaaacataaagatt

SEQ ID NO: 14933 - DNA, 16629 bp, Cannabis sativa
gagagagagagagaaggagagaagagactgaatgagaggaaggagactgaatgagagagatgtagctagggtttggttttattaattagtcggttatactcgacgatttaaaattgtcgggtacaactgactattaaaaattgcgataaacctataaaataccgcgaattgccctcctgagagttttgaaccgtcagaaatactcaatttttcccgacagtttaaaatagtcacttaatattgatacagttcccgaaaaaattatttttgggaccgtcgcgaattcttgtttttatagtagggtttattataattaaatgtaaatcttctacatccttcttcctataaatagtggatcatattcactattaagaggaccaagttcagtattctgaagagagccaaaactctgcagaaatatttgtaaccttgagatacagcaagaaactcacatgacaaggttcatgttatcttgttattcttaaaaatacaacaaaaaggaaaatagactattaccattgacaggggtcgaacctctataaatttattgtgtcgtttgtagctttttaattatctttattattagacacttatattatcgctttactgactccgcatcgttggctaaaaataatgtcaatagataccaaatgaaattttatattttatttaccaatttatttttaaattaaatacgaaataataatattggcattgaaacacttattctgtagctgcagaacataactctgtaactgtagaatacaataaaaaataaatagtgcagacaaataaaaacatacaaagtttttaatacatggtgtcaagaatccttgcatattgttacttgttcaagagaccacgccatagagatatgattgattagatagatttcaaaaatataaagtaattgacttatgcataaataaactccctcttattatatgccatgcgttccaccttctcaaacgaagttggttgaaacttcaagtgctcgaactcctttcgatttgcttgaagagtgtttgcttcctcccaaggcaagacttgagaaactttcttcctaaagcttaaagaaccttctcccgaaggttaaggttgacactgctgttcttcttctttgtaaacttgattacagactcaagacaataccaaagacataaacacagaagtagagtcgaacatactcttctctacacaacaaagacattctttattaataatatgaatgaaattcaaagtgaataaaagatctaataaacctagctgctaatatgagtatttataatcattatattaggcaacacatacacgatttagacaggagcatgaatcacaagaaacttccttaaaacatatcttcaatcaatctagaaattttcgattttgtactttcagaatcgtgagtagtaagtacaattttcgttttatataacaaaaagtgaatgattttcttcaaatattaaaatatttgatttcttcattaaaatttactatttatgtctaacttttcaaaaaattagaaaagctagacacttaatacacactattaacgaaataaacaaataaaatatttatatggaaatacacaaaacatctttcgattcaagatgaaactattgaacatcttttttttgcttgtaaatatagcatggattgttggctgaaacttaaagattggttagcatggaggactaaagacgtggatataccaagcatcattaagtggttggctcgatcaaaagtttcaaagacaaagaaaaattagttatggcagctgtcatagctgctcttgtgtgcagcttttggatgaacagaaatgaaattttgtggaatgataaatgtttgacagttgatacacttgtaaaaaaaaagtaaaatatgatgtcaaagctaaacttagtttgtttaccaaaaaaaaaaaaaaaagtgagccaagtggatagagtttggattaaaagattgtaattagttgccaggcttttcataagggccagatagaaattgtaaagatgtttagagaattagttccataagaaaaaggaaaaatgtttgttgtttcagataaaaaaaaataaaaaaattgtttgtttttcagtcatattagagtagcagaaaaacgtttattatcttctatttgttgtgtgagctaggctggcaatagctgatttttctttttatcctaaaaaaaagcgggccatgcattgagcccattaacttggcgtattcttttggttatgttttactatttattggttatacccacattattatgcagtgttgagtttgattatttgctaccttatgttccgggcgtgaccttcttaaaatgtttgttctgttcaatgaaactttcaacttccctattaataatatatccttactctataaactcgaaaatcacctcaagtctcttcagaataatgaagatttgagttattttaatcaaaatggaagcacagtattgtccatttgaagtttagatctgcatcaccattatgcttaatggtcattaattggcttaaattgttgggatgctaccatctttaatgaagtagtagattcacaaattatgttcccatgaactgtgtgcataatgacaaaaagaaaccaaatacaagaaattgatatattttatatacttaactgcttaagttgtttcccacttcattgacaagaggaaaaaaaagaagaagaattgaaattgaaaaaaaaaaaaaagaaaaagaaaagaaaaaggggtagggggttgggaacaaattcctttttgggcaatgggcatcaacttttcaactccttacttggcctttacaacactcttgccatttcttctatttgcagccactgcagaagcagataccaaggaaaatccttaataatattacaatgtcatttccaatttcttccttgtaaatcacctgccaataattaaggatattttatagaaaaaagataacaggtaattacaaatatcacatctttatttaaatgattttggagcttgagagttgaaaagagaacactgcagatggccttgataatcataaataaatttaaaagaaaaaaaaaagaaacactgtagagggccttacctggctcctgcgaggctgaatatttggtcattggggattgatacagatcaacatgcttccccattgccgattctccctgcaagaattaccattaaactatatcatgacagagattttattctttagaaaaatatcatgtcagagattattaaaagtaaaatagagcatatagaagaggaaagaggcttgtgagagtaaaataccctatgtgttgcagaaaagccttgagaatggtcaactacattatccattaaagctttgctcctagaaaaagttgactttttctgcagaattggaataaaattattagtatatatatatttatatccaaaaccagcacaccctacacacacaaatatacatacatagatatatatacatggtatcttattaattaagaatgatataagtgatattgccttggaaacaggggagctagcagtgtcatctagacaagaacgatgctcttcttctgtacatttttctttcatcttagatttcatcatcttcttcttatccttgtttgttgatttgttataggcccaagaagaagagaaagaaatataggagccattttcgttgtagtcatgatcatgatcatcttcatgataatggggaggtccagaagaagcatcggacaccattgataagtcctcctcctccccctcctcataaccacaatcattttctttttcctccttatgatctatccttaacttatcagcttctgaaatatttgattcttccaagtaaagggtccaaccagattcacacccactaccactgaattttgatgttgatatattcattatttctcttttcactctatttttatttctaattaaactcccaaagagtaattcatgagctgatgtcttctctctattcatgcctagtgttcctccatataaataagtggaatgaaagaaagaaaggagaagaatggagggagaaaaaaccaagaaaatcgcattcaaatcctagactacatttgtcctttttcatatcttttggcctaattatttcatctctttgtgaatgaatcaaaactgccagttggctttatgtatgtgtacgtgtaagttgagagagagagagaagaaataaaaaggaaaacaaacagtagtgtgattttacaaaaaggtaatagtagttttgatccatgtagttgtagtaacaccaaagctagctccttgtacttaacgagtgtgttgtcctttcaaaaataattattaataataaataagtgattgtcatattggtacgtgtggcaattttttttttaaaaaaaaaattaacaatcttttatataaatataaattatatttatatatatacatatttttgttttaacgtggtcataattgatcatgagttggacaaaagctggctgtggtcgtcctccttaagcctccacagcctcatattcataaatcataattcatctcaacatgtacacaagagaagagaggacatatatatcgtgattgtatggagataagtttccctagtgtagttccaacaatttcattttgacaaaaaaaagaccctttataagggtcagctaggtaggcaaattacaaagtaataatagatgagatatataaagcttttctttgtctgtattgggaaaatatatatgctgtatatatatatatatatatatttatatatatataagtagttaaaaattataataaatgaagggtataaagtaaaaatggacaatactggtcgaaaatagtgtctttcagcagaaagtaattgaataaattataaaaaaaattactttacatattatttctttttcacttttattttaaatttacggtgtaggtttttaaagtggtttttcgggtaatttttatgtgggtttctatatgattacgatttaagttgtttcgttaattgtaataagaatttttatgtaatattcggtaaaaatatatatataaaaaaatactcttttaaactgtgaaaatgaagaaacccctaaattataatgaaagaaagcattatattattatatttggcagagctctctctattctctataaatcatgcattttatccattaattagaattctatactagtgtgacacatatatataaatataatcctcatcttgttaaccgatttcaaatatatatatatatatatatataaatatttatatggtttggcagagaaactttccttaaagaattgggcatcttttctttgttttaaattaaagcattaatcactactacgagttccacacgacaactgattgataaagtgctacacacaaggttttcatgcaataatgagtttgtattagaaaacaatcccgacgttgattgaccatttagacagctaattaattataataacataaattaattatattagaagcaaaaccaatagtatatattattattattatcttacatgcatacgaataacgacagataacagtaacatcaatttgtgtaccaagtttttacacgttcataccttatttcaaatcacatgttatagtgcaaaatggtttggtgtaattttatccttataattattaggactatttaccatgaatatgtttgttaggatatttgtgtgcgagctagctagctagcatatgatcgatctagataatggtgatgcaagagaggttgaaaatagtattaagatatattttggtggttacgtacagtttaattattgaaagtatatatacacacatacatagtaacagtagtattcatgggtttgattgaatctacagtagtcatcatcatattcttattatttatatgactcttttagggttgatatatcgctttacttggggggagactaggtcttccttgttgtcttttatactttgtgcttgacagtaagccctcatgactttattaagatttgaataaaccccacaacagatttttatttttatttttatattttcccttcctctcttgccccagcgctcatctagattatatatattatatgggagggagctgggcttgattgattgaccctttttatttttcatatatttatgtgtgtttttatggaagaattatattcgtacaacttaccattttctaataattatctcttatacatgacatcaaaagccacaataaatgaaccagctactctggacctataagaaaaaaacaaagaaaaaaataacatcgcgatatataaatattacaaactgcacgattgtattatataaatatacataaatgaggaatttagttggcgacgagagccattttctcattttaagtagaaaaatcggttccatgtagacccctatatataacctttcttgggtcccttctaataatggattcttctcctttttagttttttttttatatttttttatttcataattttttttttgtgttaaatattgctcggaacaaaacaccaaatggatctctctttattttccttactagctagcaacattttttgctgatatcataattaaaaattagaaaaacaaaaaagatacccctatctataaaaatgttccatgatacaccaacttgagatatgtatataacaaaaaactaaagataagaaaggaaaataataatgtgcaatatgcatggtatttggtaactactatatataattatatgaagaaaattaaatgctcatttttgtcaatacctgacaataatatttataaactgttgagagtccaacattattaatgtatgaaaagataataaaatatataagaataatgggttactacaattggttttgagatggaacattcacctcttattcccaaattctaaaatcaactgtatatatatgaaaaattaagaaataatatacattattaattagggatatattaatacgagaaaataatttttcccgggggcttggggtggtaaaaagggtaattaattagaagttcttaagagcgacaaaaaaatgatactactggaattgtacaaaatgcgaaaagccagctgcatatataaatttaaatttatatatatcaatcatcgattacgacataagactctaatagtaaaatcacgtggcctgatcatatgtattatgtaaataacatatataaataaaaatatagtctttttctgtctgaaatgaaaatcaatgccacatactataacttggctgatcaggacatgaccctttaattttttccaagcctgtgtggcccgaatcccttatagccactccatgattttgagttctgacccatttatcatttgagatctatataatggtcctacgtacgtcaatgggggtctcaagccattaatcactcaactcaaactttgtcaatttttttttgtttgtttgtttaaattaatagttagtgcctgtatgtaaatatatatataaatgccctacatttatattatattaattattagtagtagtttaatatattaattcttttatagccatctatatttaatttgcgtacgtttcctattattactatgttttttttacagtttctaattacttatatcatatatataagatataatccctgtttatttcaaataattgaggtattacttatttatttttatttataatttcactcaaaactatatatatcactccattgaatacagtatgggcaaataaggctctttctgcagcttgagctggccaagatggtcgcccaactacagaagagaagtcaaaagttgctagaagctacacacacagagatatatatatatgtatttatatatatatgtgaaatatataatggtactgtagaggtctaatactacaatacactacactaccgaccatcaatcttttaaattaattatcctttgttacatattacacttcttttttcttccttccaaataaacatttcactttcatgcatggttcattccaacatttccatgtgtctgcatcaacttgataaaaaaaaaaagtcaaatacctcaacttttcgtggaaattttgtgaagaaaatcaagaatatatggtaacaaaaagaccatcctgtacatattaatcaaatcttttttttcttttaattaatgattactactgtcactgtaccaacaactacttaataaaattattggcttcctttttttttttttaaggagtcttaattaaagaaaaagagtataaccaacaaaagaatggaagtgataattgtaaattacgcttaaaatgaaattcaaaaacagaatgcgagtgaaatcatgatgttttgggtgctctaatttaataatttcactaaaaccctaatagaagaagcaagcatgttatgttgttataacttgagtgtcgctttacatgtcagcaaagaaagctagaactttgcttgcgtggaaaagctatccacggttttgatatgctgacaaactaaatgattttgtctcttttactatatattaaattaatcagagtgttgggttttgctatagctaggtagctagctcttgcttatgatgatgttattatgattgacatgattttggaaagtgtaatttgttcaatccagaaatctatgacgaaaaccaactttaataaggaatgcgaaaaaaaatacagctgggaacaggtgttgggggattgatcagttgagtttgcttgattttatggttgagtccttgtagttgtagaattagatatactatggtttggtgaaagtgaaattttcaagcttttccaaactgggttatgatgtcatatatatatatatagttgtagttgatatataaatgtcaggtagcaatttatgatggaggaggattcaccatatcaaaccttacctgatgattattgctgaacagtgacgtggtgagactgaaaaatacttcaaattattttcttttcaagtcattcagaaatgctttagaaactgttcttcttataatattatgtacagtaccaaaaaaataaataaataaaatagaacaaatacttatttatggtttgcaggggaatacattcaagcctgctgctgctgttggtttggtatgagtaatggtgtaagttaaatcgtttcccagatttgagtgttgaaatcccggtatatatatgtccaactgatcaatcggcatgttcttgactaaagatactatataatagtttgaaaagtcatgttatctaaaaacattataccatcatctatcaaagaaacttattttcatgctcttctttctcgaagtattttgtcttgcctacttggactctctctttctctttttcactatgttacaaaaacaataaaaacgtacatatgcagaatttttaattaatagtacgtataagaaaaaaaataactgcatataaactacagtcaagccaagtgaatttctcatttatggttccccttattggactataattaaaggaaggagtgtgaggaactgctcagattcagacagaatttgcagaaacaaagtatgaaaaaaaattaggtttaattaaagggctgggaaaagcttatccaagttaaatggcaatgcgtagaattcatcgttcctgacatctgaaccatataaactgaacttctcccaccaatgcaagccactgtcttttctggttgaatcattttctcgaaaaagtgtgcaatccaagatcaaaacaaccaaagcagccaccgtggtatgagacataaagacaaccatcactaagtcattgaactggaaatgcagaaagtttcgttaacaaggtcatggtggaaatatttgcttatgaaaggaaaaaaaattacattggaatataaaggactacattatgttatatttcagaaagctcacccatccagcaggtttgtgctctttccaaaaatatgattctgtgtgataatattccctaaaatattgtggtattgaaattcccatgaagaaagagaaacccaatataaattttgtcctgaaactattcaagttgcaaaactggagaaaaccaagtccagcggaagctgcaaccaaaataacagatcatgagtatgaaattatgtcatctgtatggaaacagaagattaatagcaaatgccaagggttgaagaaacttagtacataccgacatagctaaataaaacacaatatgatgctgctataataggcagaggaattgaagcgaaaagggctccaaactttcctgttttagaagcatataaattgagcattatgagtatcaacttaaagaaatataaagtggaatggtatagtaatagccattacagaaaagaaatagttcgttaactatgcagtagcttcaatttcaacctttctagtttctgtagaattgcacaatcttgtggcagagaatataaaaatgaacacaaactcttgcggattaagttattctaaaccaaagatgaactgtgtcataccaaatatggagaagaaaatcatgaagccagctgagatctggattactcttcggcttccaacttttgtcagtgctaatagaccagcattttcactacacacgaaagttgcatatttatgaagccaacttagtgaaacaaaatggttataagatgtaacaaccacctattccctactgcattttagtagaggtagtcaaatttaatctcacttttcaagtggtttgaatattgttaaaaagaaaatttaagtttcttagatttcagcagaggtttgaaggcattacactgatgcagtagtaccagttagacaaccgaacatgccatttagtaaaacacctataccctgaaaattgaaatcatgaaaacaaattcaggatggagagaaaatcattagaaaatatatgaacaatgcataccctaccagccagccaacacctcggctaattacagatggtggaacaggtgtggcacttccatatcttgctgtagcgaaaaaaataccagtggactgcaaataattaaaccataatctcagcaccggtattgttctcaaaactattttacagcaaacaaactcaaccataaactccatttaatctttacaagcttaaagttcaacactaacctcaaagagagaaacaaacgaagctgccatcattgcaaaagcttctccagcattgaaggtagggctaccccattgaaagggataaggcatgtacaccctgcaaaaaacaagtcctcaaatacttacttccagcaaaagaatagttctgaaatagttgcaactctccgctaatggcataatagttgtatataaaatatatagagagagcgaaaagcattatttaacagaatatcaggacaacaggttatagacccttttattttctcaccaaggagctctttcaatgagcccggctttatcagtacggcaactaagttgagtatggattggtttattgttgtacagacaacttgatgtcaatactagtgcgtaaagccatccaattaaaaccgagaagagcaatgaaaatctatcacatttttgtgtctttgactgtatataacgaggaagatactgcaagaccattgatcacaagaacacactcattaacatgtggaacataaataagtgactatcagatcatcagtataacaggaggaaaaaaataataataaggcaagtgttcgattccatggaagaaaaagtaatgaacatggagtttttattatttaataaaaatgtaatataagccctgttttaagctgccacctgcctgtgagacaaatacaaagacgatcaacactggaagcccgacctcaacacacttcgccagctacaagaggagaaacagtcagcgcaacagaagttgaagaacgaaaaagcatagcagacaagctatctaataaaattgtacagagagcttaaaaatttgcagtctatgaagaaaacttctaaaactatgattatgactgcacttgaaccataagtattaaaattgttaagtatgagggaaagagtagcagaggatcaagaaatatttaccatggggaaaccaagacgatataggctaagtccagcaaaagttacaagtgggacaacagaaaggggactaagaaacctaaaccagtaaattagaaaacaatgattacaaagatcagatatattcagtagcaacaattttgaaaagttgaataagccactcaaagctttgatacaaagttacctcacaacatttctccacaggcccaggaaacccatgactatctgaaaacatgaggttatgattagagcaccctgtatacctctcattgtttgtacaaacctctgtaagaaaagaaaataaataaaaattaacccaagaaagtcaatgataaagaagtcaaaaccagattagaaaagttcagtagcaattctagcttcaataacctgcattaaaatacctcttttgggtctgggattatgttgtatctggtggataaaaggatagaagttgtgggaataacatacgtataagaacccactaccatagttggtaatcgagtaccaaataatgactgaaaaagcgtgctgaagcctgaaacaaacagacaggtttgaatcaccttagccttttcaacctgtgaccaaaagacaagaaaataaattagtgtaatatgtcaaaatcatacacaattaaataaattaatttaaacagctaaaatccttacatctccacctcccatctgaggaacaattatacttggaatcaaaactgtaattccaagactcaaaagataatgctgtattcccaacactacagcttcagctgcacggattaagataagttttaaaaagatttagaagcacgtgccccatggaaaacataaagaacaacatccactaaagtaaagcatgcacttgtatataataagagtgtatgtatatactaacaccatggaggaggactgttaacacagtactgaacaccaggcaactgctccttcaatgggtgtggttcaacctcgtttgccatcttctctccactgcttccacccccgccactgctgtaaacagtgttattgttgcagcaactacagactgattgggtcatgtctagctcatcaaacactagagaatatggtatatatgttcaaacttcactactgcaacgtttgcctaattaattaaaaaaaaaactacctggaaatgaaaacgttacaattgcagatttcctataatataattaaatggccgttattattggaggttagcaacaagattaggtgaagatttgtattaaattagataatgattcattgccgaagtcagcttcaatatattttttttccctcctttgctttcttttttatcggctcagttgctattgatatgaattctcaactcatagagtaattgttcaagaataataaaaaataaaaaacaatcccaggtagataggattggatttctgattaatttggttcgtcaaatgaaattagttaaataaactaacacaatatcctttcactaaaactcaaaccaatcattaacaaggacggatcatctctagctattgtttcttctttgtcttttttgtttcttgttagatttaaattacaaatattgttgagttttgcaagaaacaactaaaacgtaaatgatttagttgaaggccgtaatgaactaatgattaatttgttaaaccattagaaagttacaactgaaagataaacctactacaactcaatttttaaaaaaagaaaatcacaaaaaaaaattacaaaatagataatatttgaatgtatatttttttattttgtgtacaaaatattttatataaatataattttatgttaaaaaccataccatatatattatgatttttttggaggttttttcacttttacacttcataatatattttttttttttttcatttttacagaatttcacatagaaactcatattgcaactaacagagcaacttaaattgtaaccaaaatccgtataggaactcatatagaaactatcggaaaaatcatttgaggaacccgaaccgtaaatttgaaaaaaaaaaacaaaaaaaaagagtaatttttttttttacatttataaatataatttgaaaagactataaaatatttttaaattattttcaaaaggatataaattcaaacttatgtaaaaaagtaataaataaagacatttagaatgtgaaaattatgtataagtttatatatttgttgttataatgaattagattataatctctttataattaaaattttcatacaattttttaaatttataatttagtaatttttcttttttacttatggagctatagcgtgtttgtttctcacagcatagtcaccaatttggccctacgtgcctatgcctgtttttggcacaagggttgaaaccaaggtgatgggaaatagtaataataacctatatatatacgtgcaaatttaatgtgatgaaatagtttaaagctaattgtatgctggcgtgaaagtaaacaactttaataaactttgtaaaacctaattaatttcttaatacttaattctatatgtttaaatatatgataacaagcaaataaacaaaaacctacaatattatattattctcatatctcattcataaactcaaagatgctcactagcctatttattgtgaactaaaaatggggcgagaaagagaatatataatctctaatctataaatagtatacgttacagcaccatcaatacaaaattaaaaccttatatataaatataaattcaccattattaagctactaagaaagtgtactgtgtaaccgaatatttatatatagagctaaagcaaaactatactatatatatatatatataataatgttctaacgttgatttttacatctgtatctttcacaaaatgtccttaatcctagaataagatcctttgtaatttcagaaatagtatcctatgtacaaaagcatgccaccttcgtcagatattctctgcataaaaaaggaaagaaaaaatgccaaaagaaacatattcattattcaaccttgaaattgcaaagtaataatattgaacgaaacagttctttggtgtctttttttttcaagaataataaagagtagtaaccttgcactgtttcttttgaacaatcattatgcgtaatactagaccgggattctcatctctttttaaagtagggtataaagaaagagttcgaaacagaccaacttttggtaaatctagtaaaagtgtgaagatttacgcgttgaaagagggacaatcaagtgtcatacgcattgttatttgaaagtaaggttacaaaagtcaatagatgcatatagtagatttgattggaatttttcatataaaaaaacattgaatggaattttttttttttttttgaatgaacattgaatggaattaaatattagataaatatgagaaagaaaaaaatggttggccaacgttaataaacatttattaaaaatactacattttattattatatcgaattgggtacgacactgtgcaaaatcaaaaaatttagacatgtccaatgcaaaatcaagaaatgtagacatgtccaatgcaaaatcaaaaaatagtgtgtaaattttgtgttgaattaggattagaaaatgaattaatactatattttgcccatagtttattataattgtgctccaaatgcacacgggtcaaaaaattaagaggaactgctcctctgtctccatctctgttaaatattttaatgttcatccctgcttatttctcatcgaggataaagagagaaatctcttaatgggataggaagttgcttaatataagaataaaatttattttaaaaatttaaatgtataaaaaatattcaaatattacacattattcattatttattattatttaatatactagttattatccaaaacacaatttacaaatttataaaaagaatacaaagtcataatcccatgataaagttttggaattggataaatatatttggtgtgattttatcaaaaaaaaataaaataaaatattatttgtttaccgaaattttcaaaaaccaataatttgaatataagtcaaagaaatataattcaaagaaaataaaataagaacactcaaggttttcacatggctatggtgttaataattagccttagtttacgagtcaatattattaagagatgctagaaaagcctaagggattaaaataaggtatgagcactctattttgcatgagcaagtgagccaagaatttctaaccctttgcatgtagggtttgtgtagtatttatagtgcatagaggtcatactaattaccattttttctctaatggagagtttacaaataacatattgactttgggcttttttagtgaagcccggcccatggggtgccttgagtatgataatgtggatacaacatcatgatgccagttgtcaaaactgtgttttatcttcgtggataactaatgacatattaattacttgattgtcaattactctatttccttatttagtaagatattgttctttatccgagattctggggatacaatccctaatcttatgcgatttggtagaaagcatgaaactatattgggcttctgtgtacatgatgatagtgttggaatttattttaccagaatct

SEQ ID NO: 14934 - DNA, 3518 bp, Cannabis sativa
tcacacgagaccttcattttttccctctcgttgagaaaaaaaaaaaaaaagaagatgatttttcaatggcttcctagtcgcattagaaatatatgagatttcctcatataaatagaagacttcatcattcactctcattcactccgagagctctactaggacttgcttcatcttgctttgagattttagctccatcaggtaattccttttaatcttgaagaatgcgactctacgattctagaggtactaacagacttttaaacttatatgcggatccatctaaaattaaaaaattagaaagattttgctttcttgttgaagcttcatttcaatttccacaatcaaaaatatctttgtgtgagctgaatcgagttgatttaagctgaatcgatctagggttaggctaattaaactagaggaatcatcttgagatgagaaatgtgtcattgtaaacaaacacgaagactaccaactcgtctggacccttatactgcccaatacatcagagcaaagcaaacaaagtcacatttcttaattttactcacttttcgaaaaagaaatattatcaatgactagataaagtcatagaaaaaaaaatacccaaattcttctttgattttcagagttgtattgataaatgggattagaaaaacaagttttcaacaacgaaattatgttatctttggataggttttaggaccttattttgctttcatttttaactttttagttcataaaataagactggggtggctggaaagatgaaggaaaataagaagaaggagaggataaggctgggagcgagataggagaaagaagaaagaagaaggagaagaagaaaaatggggttggtgtgactgggatttcctggtgtgcgcaactactagaaaatgaaggaagaagagatgagggagagaattaaatgggccggctaagattttttttttctttttgaattttgagacataatattggcaggtccactgagaactacctagttaggatattaagaataccctatctcggttgaccccttgagattgggcctccaacaatatttatttatttatttattttaaagaatcaccaatcttggcgactttttataaaaatcactaagataactcatctttcttgtagtgggtgggtggtggatggtggtgattctctatagtatgatgaagaagaatgaagaagaagaataaaattggaaaaaaaaaaaaaaaagaaaaaaaaggtgcaaatagaatgcgtgtaaaaaggaaagaattagaaggaagaaagaaattaaaataaaaaataattaaaaaaatatatttttaaaagagtatataaaataaaatgtttaataaagtttttaattttaacaatgcgacgtaatgtgattttgagtgacatggcaataacgtattgacttgggacttagtatttcgggccaaataagtaaataatcgagacaaatgaatggaagtgatgaattggtaacagtataggggttttggagattttactattaaaattataattagagttaattactactgaggtgaaattattagaggttttatcacaattaactgataggatatttattgtcatttattagagttgttgtaccaaaaatgaaaaattacataccaacagtaaaactattggagtggagtggtctaaataactaaacagagatgaactaacacatatgatatgttcgagagagatttttgtgggcaacgtaaattttaattgaaaaaattttgagttatggatattgttaataaaaatgcatattttattcgatcaaaagtcttcaaaattatgcagcagaaataatttaaaaacctaggttcaagggattgatattttatatatgcgtaatttgaaaagaacttgtcattattttagtacactaatctttcaattttaaattgttttaggtagagctatatccctagtttggccgttaatttatacaaaattatgtgacagcatcaaatatcgatcaccaaccaaagaacgaatgattagatagctggtacggtttatactttataattgtggatttgactttttatttatttatttatttttctgaatgatagattgaaattttgatttcacattgatctttcagatcatatattatattataaatatagagactaatcattgtaatgtcactcattgacaaacatattacacataaattgattttttttttatttgaaactccacaaaaattaaattaataatgttgccatgtatgcgctcccctggtgtaatctaaattagtcatttaaatttttggaagtacggatgaaagacaacaaatattatatataaagattttgagcaatgtgaaccttggggtttcttctcaaatccatctaagtttccttattaattaattgaattgctagtattattggctttttttttttttcaatcacgcatatagcataatctaattatcaagagttttagtattattgatgttgatattaaatagatagtttacttccttttggatgtgacaatatttaaatttttaatctattactaaaattatctatttgtcatccgacatctaattatttaataaataattatataattatacacatgaataagaggtttttttttttttttaagaaaataaatttttttattaatagataaatcagaaaaaattcattacatgataaaatcgctcaaagatagaatcaacaaaattatgcaaataatgtcgttaaaccataatagcatttccaacttaagaactaataagttatcaagggtgaaatatcaaagaagtgtgaagaaaaatattagatttgtcatccaaataaacatgttataaattacacctatcaatgataagcagcaaaagatcttctaatgaaatttaggaaaaactagaaccattattcaaaattgtaataagtggcaataccaaacgaccaactataaagaggcaaacaaacacaagagatttgaaaatcatagcacatagggccaatagacaaatctgaacgaaaagaatagaattaatggcaccccattttggtccaatcgacaacacactgatcacccaatatagatcaaactcttctccatgtgttaaatcaataacaatccctactaaaaaaagtaggtaagtgagaaaacataaaaaaatgaagttgttaacaggaaaaaataggtgcagaacatatactaaccaaatcccaaaacaatgccaccaaagaaatcaaatattaaggcatcaccccacaccccatagccaccacaacctcaagacaagagccacaaaccatacacccacacacccacaacacctaactccaccaaccaacccatatctaagaccttgactaaggacttgccagatctagagaataacgatccactggagcaacaaaactgttggaatatattttaccagaatctagatttactaacaactatgttattaacatcctaatatgaatttctaaaacgataaaaataaacacataaaa

SEQ ID NO: 14935 - DNA, 2844 bp, Cannabis sativa
  modified_base (2631)..(2631): a, c, t, g, unknown or other
aattgccgccatttacccttttttttatttgtagaaagtagaattagtcaaaggagctagttccatatttgcatattcaaggaacctagttcaatatttgagaatatatcatatgggagcaaatttagtaccttttaaggaacgcatctggttcattccccttaatggttgggttcatccaatggttgtcaatcattgaaagccaaagcaaattaaactaactttagagtacatttgaccttgatttaagtacttaaaacaaagtttgtaggatataacagaaatgcattctcttaagaaatggtataccatcatgtaagaaatagaaaattgctatgtattcgtgtattaaaatattaaggccttggttggttaggctttaagaagcacttttgggctttagaattttgaaagtcatttaaaagcttggttggatttacatgcactttagtttttagtacaaaaagctcttccccatgaaactactcgttgtagattagcaaagcccaaagaaaaagtgttgccaaccaaagcctaaaagtacatataggtagtgattgaaaacaatcactatccaacaattttatatttatatattgatatgtattgtatacatatttatatctatatagatcaagagatatgcctttgtgtaagttttagtatcaatgacgagctatcatgagagtgtattttatgaccaaatatgtgatctcaattatagggatgtggtctctgggattgttcatctgcatgaacttggcattatacatcgagacttgaaaccccagaatgttttgatcaacaaagatagatttttaactgcaaaactttctgatatgggaattagtaaaagactcccaggagatcaatcttccataacacagcatgctactggtaagaatcttatttgttaaaatttaggcaggttacgttatggagttcaaatctaataattttttttaaccataggaaatggaagttcaggctggcaagctccggaacaacttcttcataagcgccaaacgcgggccgtagatttatttagcttaggatgtgttctcttcttttgtgttactgggggtaaacacccgtatggtgacaatatcgagcgtgatgtaaatattgttaatgaccgtaaggacctgttcttggtggagaatatgccagaagctatggatctttttatccgtctcttggatcccaatcctgacttgaggtaaggttctatctcattcgtagtatattattggagaaacttcggataaattaactaaggtttatgctatgaggtatacacatgtttttgtggaaaaaagcaatcctttttttttctttaacgatttttgtatgcatatgtatttgatgataggtactttttgaatatatgtatatatcagagattttacttctataatatttttttaaaattttttttgggaaggaagaaagacttgtagatagtaaaatggttaaaaaggtctatcaaagatagttattttagaaaaattatctcttcagtttgttcattttgataagtgcaacaatttgtaggccaaaagccatggatgtactgcatcatcctttcttttggagttctgagatgagactctcgtttctacgagacgctagcgatcgcgttgaactagaagatagagagaatgaatctgagctgttgaatgcgttggaaagtacagcagctgtcgcgttgaatgggaaatgggatgaaaagttggaagctgctttcatcaataacattggccgataccggcggtacaagtatggcagcgttcgagacttgttacgtgtcattcggaacaagttgaatcactaccgcgaacttccccaagaaattcaagaattgttagggtctgttcctgagggattcgatggttatttctcaagtcgatttccaacactccttattgaggtttataaagtgatgcacaagcattgtgtagacgaagaattctttgtcaagtacaccacaaccaatctcatgtaatttaaatattttctttgtttgattgtaactatgtaaaagaaactgtataatataatttaacactaaaatagtaaactgtaactgaatatactaatattgaaagtgttgtcttcacttcactatagtttagattactaaagagccaaacaatagtcacttttgcgcatattcttaagagatgagtttcgcatatcatgaaaatttgatgtattcttaagagtttcgcatatcattatctattacaaaattagaaacacatgtcttaactttaaaacaaaagtaattatgtcatattttttttgcgatgaatgtgctgtgcggattctaatatacagatttggtttcttcatcattaagtttagtttttgagttgtactaactaaatccgtatatcacaacatttaatctctctatttgaaaatatatatatcggaatgtatttgttttaattacaatatcatctttataaattttttataaaatttgaaataatttacagtattgaaaataaatttgatgacttttgaacacgtatagtaaactaatctactaagggtccgtttggcagaacttttagaaaagttaaagttgctttttgaaaaagctgtgataaaattgtgtttggnaaacagtcaaaaaatagctttttgaataattttagagaagctacagctaaaagctgaagctgatccaacccaacttttaaaaaaaataacttttaaaaaaaagttgttttgatgaaaacaacactataataatttttttttactaaaaccatatttacttatttattacatattaaaagaataaaaaaaataaaataaactaattataataaa

SEQ ID NO: 14936 - DNA, 4722 bp, Cannabis sativa
  modified_base (4673)..(4697): a, c, t, g, unknown or other
ataataattgtaatgacgtttcacgaacacattatgatgctacacaggagggcctttgtttgtacctgtatcattgcccatttgtctaaatagaggttgcttttttgggctgaatgtgagttgctaggatattggaattatgcagcactgtttaaaaaagaagggctcgaaatcttcttctcaaccaccatggctactgctcaagggagctttttttttccccgctctctggattcggttcataggattaggccgttgaaaaactcgtgctcaagtcccaaattgttgaaccctgatgctagaagtgcactggccccaagtatctgaactttccctataatatgattacatatacctgaccaaaaatggaacacgagaaagatgtcaggtcatgtgttttggcataaaaagagagcaaagtttataaatcatttgtttcttattgagatcaaatcagatttgagcagtcatactatagagaataggatcaacaagcaagatcaaacttgtataaatttgtggtcttacctaagacttctgtattttgttgcggtttcactaatgtctcgatcagctcctttgggttcttattatctatgaataaggccctttgtgttcgcatattatgtataccaggtcttggccttgtcttttcatttaaattttctgatatctgatctattgtgtccaagtcttcgctatcactttcatatgtacttgtcattgtaggcacttgtgaacactgtagctcttgttctgatacattcatctctgtaagaaattgtgaacattgtaaatcttgttgtgatactgactctgtcatctccgtaggcaatagtaaacattgtaggtcttgttctgatactgacattgatgagcctgaatcatctcttgtttcaaacgtacagtgggatattttagatggagagaatttgcaacatgaattcttttctggaaaggtagtttctggggattgtgctctgccttccttctgcattgtaaatgtttggttgaccctgccaccatcttgattcatatcataacaacttccccagattttgggtggagaacgtaagttgctctggctttcctccataaacatatctcccaagctttttgtgtgtagtattgtctcaccatttagtgtttctggtggatattttgagtcacatattgagtgcgcatcgataatattttccatatttgttggaggtttatgaatttctacttgtttcaaccttccagatcctaaaacatcaacataactttcatgtttttcattgtttgcaatcgttttctttgtgaacttatagttatgtttcttctctggggcaggaattgctagaacccttttgcttttttgagaagtagtactcaccgtaggttcattcttgtgcaaacgaagccagttgtcaacttttgaaaagtttgtagagataaagctatttttctttccttttccatatccatcactgctgacaaggcaacccttttgctgagttgaactctttgatgatatttcatgttccatgaatattatactttttatatcacattcagttgcatcctgactgtattctgtttcatctgcattacttttcacattcaaatcccccaaacagctatttcttgagatactgcattctgaattgttttctgatctacgttttacagggaaactcacagactcagcacgatgggacgatggccttcttcttcttgcagggaatttcactttctcttcagacgtttggctgtctgctccatattttcttgtgctacaaacagtaggcttcataaatcttggtatcctcgataaaggagcttctttagtttctgttgtttttctccttgttgcttcaagattatgttggttaaatttgctcaacaaatgagaagcctctaattgatcattagaagatggagctgtccctgttagtttctgtaattcttcattaaacttttcaatctttcctctgacatcttggcgttcatcttcaatcattttcatttttttctgcatgtgtgctattgcaatttccttttgtgctctttcttcctgttattcaatatttcagtctagtgaattagtgtagctgataattttaaagacaacaatatttatatttctttggatgatgatcggagaggatactccgagcaaccaaaccaggtactaatagtttgttgcctttaaagaaattaatgaaatgcattctctaaaataattagctgataatatgaaagattatcacctgattttatattaatatctgttatgtgtttggaacttttgttcttatatttatgtaaaatgttatgcctcaagagttatttcgggtatattaaaatttattacatcctattgagagtggtcaaatattatataagttttatgagtcagatcagatcaaatatttaaaggactaaatatttagtttagactttcatgcatgcttagttgatatagtctaacaagttgtgtttataatagatcaatatgtacttcgttagaggataacaaaaacctccgttttgttttgactaaattagacaacactcttcaggtgttttttagaaacatctaggactgagtgtctaatttagccaataaacataacgaaagttctttgcaattatctcttatttgtttatacacctttgtacatgagctgcaccatcttgagagaaagacattattgcgcatatgtaggagtaaacactaaacagcttatcaaatgattatgtaaagagaaaatagcttcgtttgtaccatactgtttatgttacaggtttatagaattatctgaagaggtctaagaaacagaatgataacttttacttacatttgaatccatgttccccaaatgaatgcttctcacccttgttgcaaaatttaaagagcacaatgtctcgcatatatcttcttccttttgactaacatgcactaacatcagggttttcgaatcttctcctgaaattgtgaagattacgtagtcaagaaaagaagctagtcagcataggaaatttaaatgtgaacaaacaactcttgctcattgcaacaaatgaatctgtccatttttctagaataaccattttccctgtacatcttccaggatagtgtttaattacagtatagtcatgcttgctctccttgaagtggaggaccttgaaagtaagatcagtacatcctcattcatgcagtatgtattgtaagtagagttattctagtatcttgatacctgttaagtttaaacagttcagtacatgttcaagggagggaatgattaccaagggagtctttaagaacttgtgttagcttgctgttcctgttagaagcaacaaacaaatttcattacactttgttttgtaatgctgaagaacccaaataaattggcaacagttgtatataattatttaaaaagaacatagaatgcctgctctaagaaagtttggaagcttaaatagctcttgaaatcttgtcatgtcaactttgtatcagtctagtactgcatcttagtattttagtaaaggatatgaccttaattatattttacttttgcaattgacgtgtaatttatttaaattgtatggattaatgattgagtgaacgttgcagttacctataaggtacatgacaatttttcttttgaagtgcatggatgacatccccaagagcagaaagtgacaaattgatggccttcccttcatcaagtcttcttcctgaagcctttgtcttaagcacgcgctcacttccgccaaggtcgacaaaccataatttatttgtttctctgcgcctctcaggagcatcaagacatgtgattgataggcaaatcaagctagaaagcagcattagaaatgttaagtattgcttctttttctttctaaactcgttcccaattctgaaaaatggagttgactagtattttagtaagttgttaccaatgtgatctgcttgatgttttgtttgaatttgtagaagcagttgatctaaaccggcatcctaatttgtacagcttcaatgcttggttgacgtcagtcactggaatagccacaaggttgtcaatgtcaatccctcccttaggatctgtttggattgagagactgttatcagaagaatgaactcatgttagaaacgatttaatgtatccaacaatggaagtgtttaagagagcagaggtgccaagaaattcatacaatatgcaagatgagaggacctattgactgaaaattgtgtgtaagaagcatatcatactccacagtaatatagatgaagcaataaataaaagctgagagtaactttattgaatacaaaaaaatttcaagagacctggcttctcttctggaactattgcttgatacaaaataagaataggcataccacacacttatactctcatctaatttatcctcctatgctttcccaaaaaagccgattagaggaaatctttagacaagtcaatcagatatgtccttttatcttccattctcttgatcagtcacagtcatgctgccacttacagatcattgctactcaggtgtgtgactgaatctatcacattatttgatatagaagttgtttgaaattggtgtaaacagggttactctttatattgtttgtttaatttgcatgttggaaaacattgtctcacatggattaaatgtaaaagtannnnnnnnnnnnnnnnnnnnnnnnntactccactcattgccaattggttt

SEQ ID NO: 14937 - DNA, 6645 bp, Cannabis sativa
ctctctctctctctctttatttgtttctctggccattatcggatctgattcacaaaccgaaacccacatagttccaggtccttccttgtccgatctctgcaaattccaacgactggtttctctttctctagtacagtccactgttccaaaagcagatcgaagtgagagaaaatagaaaaggtgaaggaagcagtcggtgggcgggtctgatcgatccgatcgatgagtcttagagttggggcattttcattctaatacgaatgggaatgcccgacaaacgatgagcaaaacaggggacgaagaagacgaagacgagtgcttctacgagtcccttgatcgcattgtctcctcgtcttgctcttgctccacttccaactctgactccgaagataaccccaacctcagttccgacgccagttcccccaattatgcttctggtaaccacttcccaatccctaaatttccaatgggcatctcccactacgatatttggatctccgagccttcttctgtctctgaacgacgtcgtcggctcctccgcgaaatgggcctcagtaaggacccggcactgtcccgggacaaacaggacgagttcggtcgatcggtgtcgtcggatcggttgacccgtcaggagcagagcggtggagccgttaacggagtggtccgatcgaaatcagacggcggcgatcagtgtaattgttcttcttcttctactactgctaattctacttcttttcttggttctccaattctttcaattcattcggtctcgtcggagactggttcatttgtaaatagtcaaagcaacaacagcaaccactgtgtttataaatcgcgaagcggcagaagcaatggatctcctgttgctgataccacttcgttaaataaaccaccctcgggaaagaatttcaagagggtggatgagattcgaagcaatctcacgccatcaaattcggcgtcgaatcggaattcgggaaactcggaagttgaggaggtttttgaaagtaatgagtctgaagtcaaggacgatgaatcagaagtattcctaccctgtactattagggatcttgataatggtaaagagtttgtagtgaacgaggaagatggtactttgaacaagcttaaggaagttggaacgggaaggcagtttactttagaggagtttcaaatgatttgtgttggccattcgccaattgttcaagaattgatgcggcggcaaaatgtggaagagggtcataaagatggttcagattcgaatattaatgggtccaacgggggcggttccaagatgaaaaagaaagggagttggttcaagagtatcaagaatgttgcaagcaccatgagaggtcagaaagagaggaggagcagtgatgagagggacacatcgtcggagaagggtggtcgtcggtcgagttctgccactgatgatagccaggattcgtcgtttcatggtcctgaaaaagtgagggttcggcagtatgggaaatcttccaaggaagtcaccgctatgtacaagacccaagagattcatgctcataatgggtccatatggagcatcaaatttagtttggatgggaagtaccttgctagtgctggcgaggactgtgtaattcatgtctggcaggttgtagaatcagagaagaagggggaattgttgatggaaaaaacagatgaaaataacttaaatatgttctttgtagccaacggatcaccagaaccaaattcaatgtcaccaaatgtggacaaaaatccggagaagaaaagaagagggagggcatcaattagtcgaaaatcgttaagcttagaccatatgtttgtgccagagactgtatttgcgctatcagaaaaaccagtttgttcatttcaaggacatcttaatgatgttcttgacttatcatggtctaagtctaaggtcagttacaatgttgcttccttattacatacatactgttttactgcatctttaggttactttgaatagtaacttcagatttgactctccttaggattgtgatttggttgaattgaatcttatctttgaacacattcttcttcaaaaatcattgaagacactagttgtatatattctgtttatttgtgcggtaaacattgaggtcgttgtactagggaacttttcattgtttcagacataatatcatagggaaaatggttgctttttcgcaatttatttggatgtagaagtacaagaatggaagttcgaatgcattttaattagattttcagaatatttgcttcgttacagaaatacttaattagccaagtgttaaatcttgttaggtaaaggaaataatattccattttctgccaaataggagagacttaaatattccttatttactagataggccagctgtaaaccatgtatttcaattaggagagtatacttgttttttttttttgctggaaaggagagtatactagttacagttgaaagaaatgatttagccttgagagcagatttggattttgatgtgctcattctcatgaacattagtagattgggtattaaaatttaggcagtggacggttgatgacaaagaagagatgcgtactggtaggtttttcaaataatgtccccattgttctaattgagttgatgaaagtgaatgatgagactgcagtgtggagctttcaagatttcttgctaagagcatatgtatatatataaatatatatgagaggaaaagataaactaatctatttacaacttacttccttcactaaatttacatgaacttccctaaaattatatatatgtaataatatatatatatatatgtatttagggtggaggggtgtcattcattcctggtcttctatttcctttcattgtggtcactgataaaatgatacattcttcatatgctatgattaagatcagccatttgttgatgagattataatgatacaaattgatacgttttgcagaatctgttgagttccagtgaatgtaatttaacttcatatagaaagtttgtgatggcatggcacttgctttacattgtaaaacattgatatttgcattattagttgtgatcatggagctgtttaaacatttaagaaatagcaacgtgtatgtttttctcttaaaaaaataatgataatggaattatgtgcttaagataaagaggattgcggatgactcgaaatgtcttattctttattagaatggatctaacagattgtaacactagcttgatgtcctcattctcattatttttttctgttcttttccccagctgctgctctcatcttcaatggataaaacagtgcgactgtgggatttgtctagcaagtcttgtttgaatattttttctcacagtgattatggtaaatatttatcgtctgcatatttactatatagctttattttttcaaccccctcttttagtttgaggaccttttgtacactgtggtgaatgctcttatatattagggggggtgacctcttcataattaaagttaactcttaattgaattggaaggattttatgaagaaaaaaaaatcaataaatctgttaaactatgtaatttattatggtttttatatttgttataggttgttttgttctttaactaaaagagccgagtcaattttagtaagaaacaatttttttttatgtatatctttattttttacatcttccgtcatttgtttctaatgcctagtgttatttgcatgtgccttgatgcagtaacttgcatccagttcaatcctgttgatgatagatacttcattagtggatcacttgatgctaaggtccgcatatggaacattaaagatggtcaagtggtcgactggaatgatttgcatgagatggtcactgctgcttgctataccccagatggtcaggttgggataatcgttccaccggttattatattaagcgcttgtaattatgatgctaagtgatttattttttgtcctgtagggtgccctcgttggttcatataaagggagctgtcgattatacaacacatctggtatgagtccatctttgactcatctttccatctgtgcatgcatttactgaagtggtgccttttttaagtttttctgtatcccgaagaacggagtaatgataattttttttgtaacgttttcactctcagagaacaagctacaacataaaagccatataaatctgcagaacaagaaaaagaaatctcatcacaagaaaatcactggtttccaggtaattttattggctttagcctatttctattttttcaagttaacacagaattattagagaattgctaaagtgcaccatgtggtgtcgaaaacattatgcttctgtttatttaattgctaaagtcatttaaattaatttaatttgaattttgtggaacctgctacttaattgccaaaatgataatattccacatcctaggtgttgggcactatggttgccttatctttgagcatgagtttgcttgattcttttcagttgctgatcagtttcagtgaacagtttgcaccagggagctcttcagaagtactcattacatcatcagattcacggatcagggtggttgataatgttgatctggttcacaagttcaaaggtgtgttacaatcatataaatatgtacacatatatatgtacatatatcaattgctggatttcttgttttagccattatctaaacttccaaaacataattcagttgaccatgcgagaatggggatttctcttagaagtattgtgaatgtgtttaccacccattccgtttggaacttgaattttaggaaggagaaaaaaaaattaattctcattttctttttttaatcatcattattagtatacgtgtgaatcaagtttttcacttctttaccatgtcttgcattccctcttttcttgcatgacaatggctcttgaagatattctgattggtgaaaatttaacaagattggagcatactcattaattagtttcatagtttgaaaagagattttctgcttattttgtggcagggtttcgtaacaccaacacccaaatttcagcctctgtcacggcaaatggtagatatgtggttgctgccagtgaggattctcatgtatatatatggaaacatgaagcagattctcgacctagcagaagcaaaggtgtgactgtaactcgctcgtatgagcattttcactgccaagatgtatcagtggccatcccttggcctggaatagatgatgaagagatatccacagccaaccatcccccgacacctgttgaggttgctattgccaatgaaggttcacaatcagcatctggttgcagcagtagtcctcttcatggaacaatttccagtgcatccaacagttacttctttgatagaattgcagcgacttggcccgaggagaaactccttttagcaactaggaaccgaagccctcgtgttagcattgattatagcaatgggataagtagtaacatgtctgcctggggtttggtgattgtaactgccggtcttcgtggggaaattagaactttccaaaattttgggctgccaattcggatttaagggtttaaagatttggactctttggaggggaaatgaagttgctataaaagtataggttaaaaaaagagtttgatttcccctttaatgattggcaaaaattgtgtacagagagaaatattgggtgagaattgtactattagctgagttgcatttctttccttctgcttgttgcctgtcggatttggagctcagatgggagagccttgaccgatttggtctcaagaaagaaaatagatttgttaaaaaagaaattcaaaaaaaaaaaaaaaaaaactacaccatgaaattagggaaaagaaaccgatggatttgtgtaatcggaaattgtagagtttatgagcacatggcatggcagaagcctattgaattattaaaatggaaattcttttactatttatttgtacacagcacctttttttcatccatttttacgtactttaccttatttatttattttgaccaggtcatgcaccgggacatgtatctaagaaatgaatccaattatataggtgcaatttagctattgcattttattacccgaaataatcaatattctttttgttctaagtggacatatatacatttgtcttcaaactatgttagcaattggatagagttgtgatagcctaatagagtgtggaaggcaatctggaatcctagaacacacatgcaaggcagtcttgctctttggagacgagctgtttgctcagtgaacatgaatatgaaatagcacttcaactcttcaagaactgtctagtggcaaagactttctttctgtccctgagagtagataacattgattgattctgacaacatgtgcttcattgagcaagcttctacagacctaaaagaagataggaccgtgagatttctatcttacacggattgcttgtttccccttctttggcttcaaaggcatttgccctcaagaccaatgtgagcaaggctagctaagatgtctttccaggccgcatttgtaaaaataatgaactttgtaccactgataactcttgagtaaagagttatttgatatcactttaagcatgttttttatgtaattgtgtgtcatttaaattatgtttgtctcttaatttgtgaaagttt

SEQ ID NO: 14938 - DNA, 3177 bp, Cannabis sativa
  modified_base (43)..(55): a, c, t, g, unknown or other
  modified_base (381)..(381): a, c, t, g, unknown or other
aatggaaattttatttgatagttaattttaattattaaataannnnnnnnnnnnnttaaatggttagaattagaaaaatagccttttttgagcaaaataaggaaaaatttgtcaaaagtggaaaaattccaaagtggggcccattactatggccgaccacttctatggggatttccacttcatttttctattattttaatgcctaataaatctcaacctaaacctaggtggttgcctataaatagatagtgattgctcacacttaaaagatgatgaaatttcttgccttcagaaaaattttcctgagccatccttccttttattttcgaaccagtccctctcttccttcttcatattattttcataccttgagtgatagantgagtgcccacacacatcaaatggtatctcaatcatagtgtgtaagattgtgaagaatccagaataaagagaaggacattcgggctcagatcttggcgatactctgctacagacaggatacaaatgttagagatctgagtgaatggagccattaatattccgttgcacccactgtaaggtatcctaaactttatatgtgtttatttacattgttttagaaatttatatttaggatgttaaataacatacacggtagtaaatctagatcgtggtaaaacatattccaacagaaatattatcgacattatttacttagttaatttttttgtttgaaaaataacatgttgttcatggtatatcgacagtatgtcgatacttttattgatggtttgtcgacactatgactaagcgggtttctcacaaacagagcatttgtcgatgatatatcgaccgttttttgactatttcattttttgtgcctattgacaaactatcgacaacgtatcgacatattatcgataaatgcacattgcatgacaagtacgtgtacaattggacatttaatattaattaatttttgatatttgttatctcaccttcctaacaactattctggtctataaaaaaatttctacttcataagttatatatctttcttattctttaaccctacaatattcttctcttttaagttttaaatgtctagtaacgagagcaaacagaaacatagtgaagaatatcatcgcgctctacaaaaagagcatttggaatttttggagcgttttaaaaatgaaaggttagcgaacgaatggaggtttctacgctatgaaataatagtaatctcacttatccaccaccagggttccctcaagggtgccatcattgtagattagattatgttaacggcgaaccaatcaagcctgggtcgttgtgcgtgtattgcatgcatcacccaaactctagagacttttaaattgttatgattgtttaggaattacttttaacatttgttttgcctttatttatgtttaatagttttcacttgtttcgtctttacaaatgtgtaaacgttttaacttgttttgtctttactgatgtttaaaattttttactttttttgtactaatatcgacattctatcgattaaatatcgacaaataaaaacactaaaaaaattccaaattattgacaacatgtcgataatgatgcttaaattaatatataggtgtattgtcgataatatgtcgataaaatatcgacatgatgtcgataatggtcatccctgacattggattgcaagaaattgatattacatcgacatactatcgataaatcatcgataaacagtaaaaaaatccaaattccgagagaaaactaaatctagcatttcgaataaaaaaaatagcaaaataatatcagttcaaacaaacatcacacataaataacggaaacaaactacatattattcctaatgtttactcattataatgattgaatgatttttgtggaattgaggtgtggtccagtttgtcaatgtccaccacaaacagagagggatcaagaggttgagagagggtgagctgagagagatggtcacaatgagagagaaagtgagttgtttgagagagtgactcaatgtgtgtgtgtgttgtgttttcggtggtgtgtgtgttttgggttttttttttttttttttattagaaaagggtaaaaggggaagtttgtggaatagatagtgaaatttctctataatttttacttaatgataatgtaaaatattatttaattagcatatgatttattaaatctacaaaatgatatatcagcaaacacaatgatatttgatatggacatagttacatatctaataaaaaaattatgtatttaaatttcatttcatttcaatagttgagttgaaaatattcaccaccacgtagtttttttctaaggaattttttacgtcatatattgaaatttttaactttttagcttgtttactgtgggacggaatttttttcaaaaatactgtgtaagttttatattatgtaatgtattaagttttcactgttgttccataattattttttagttgttctactgttgttttaattagtttattttgttattttacggttgttttataaaaagacattatttttgtaaaatattccgtgtgacagtaaacttgtaaacttttactcaaaatctagtatttttgtaaaaattccctttttttcataataagcccacatagtttggttaactacacaatattcttagagtttttacaccacatattgaagtttttaacttttttacttttttattgtggaacagaatttttttcaaaaatactgtaatttttttttcaaaaatacagtataagttttatactgtgtactatgttaagtttttacggttattttttagtttttccactgatattttatttgttctgttcaattgttttacgattattttataaaaagacagtatttttgtaaaacgaattgcgtaacagtaaaattataaatttttacctaaaatccaatattttttataaaaaaaaacccaatattcttgtgggtgaagctaatatatgtcagacattcttttttttcgaggcgatatgtcagacattcttgactgtgtgtatattctatagaggtagttacactctatacttactttttgtttcatattttaatttttaccttcatattactactttttaatttatacccacttttataagttatattcccattatgtgcattaggaagtctaattttaata

SEQ ID NO: 14939 - DNA, 7004 bp, Cannabis sativa
aataaccaataatccgaagatggaatcaaagtagagccttgaaatgaaatttaatacatggaaaacaaacaaagctgccataccttttaaagcttccaccagtggttaattccaagaatgttatacatttcctctctacagttaacctgagccaacataaacttaaaattagcagttggtgcttggaggcgaaaacagaaatcgaaatacctctttcccgtttcgagtgaaccatttagagttcttggttttcagccatcactacaaccagatggagcttcccttgataaagcagtttaactggattcttaaacaccgaaacctttggaatgttattttccaatataactacatgtgcaatactgaaagaatcgccttgatcaatcgcaaacttccactcgttcatggttatcttgagccagtttttccgaggagatatggttgccttaacttcaatatactcttccccgacaatcaggtcgtaaggtagtccggtttcgttgtgttcattaacccatctcacagcatgtttaccaactttctcaacgaagtaattgtaagcaagttgctcgccaagccttcctgtcaaaattccttgagcattgggtgcaccaattcttatttgatctctcctagagaattgagaacccagttgattattaacatttccataatgttctaaaccgttgggatcttgcaaatttaaagctgtggatgttgctgccaaataatcgtcattggtcgaaccgttctcagctaacatcggaatttcattacatgtttggtcaatgttttgacaattatccatcattatcttctctgagtcaaaactggtctgtgtcattgatgcctgtgtcttgaaaccgctaccgcgagcatagtcgaaaccaggtgcattgttccaattcaaaggtggccactttgatgatatcggtgcttttcttttaagctttgaagcaaattctgaatcacatattttatcacactctggcaatgttggttcagatacaagggaccaaacagattctccctcgggaagctttgggatcttttggctattcaaaataaaaaattctgtttgatcctcactggaacctgattctgccatggttgtgatcatgtgaaggaaatttgccatgtgcagttcaggatttccaccgaaaaataaacgagtaagctccataaataaagcatgagcatctgattctggagttgcatacaaaatatcaccctgtaaaagttaggaaaggataagatatggagacaatatgcttctacaatattgtggttttaatattatgcagaggtttcggccttttgtcatctcgattccattgtgtaagtttcaagtacttgaataaaagaagtttgatattgaaacagacattaaaaattagaaaaagaaagtatgtgtatgacaaacctgcaaaagacagtcacattgaacccgcttttccgatttactgctacaaccctttacaacattcctgtagaatagttgctcaacaactactacttgtagcttgtttagattatcataaccagactgcttaagttgagaatatttatcggtgtgcaaagcagataagtaacgctgagcatacggaagagcccagttaatcaatgaagctttaaagctggagtccgctacaccacgacatattgcttcccgacttacaacctgcatatataaccaagaaatttaaaagacattttcaagtcacgacatatgattccatccaacctctagaaaaaaaaattactttctcttttatgaaaacagaaaaagagagagtagtcagagaaagaatagttactttctctcttactttcgtgcacattcacattgcagtttttaggtgttctttgaaacttatttgttcattttataacttccccaggtcccactacccaatacgttccacagtattttttcgtccaactaaagaagacattagacttctgatctaagtggtaagaacaatggttaagtcacatggagatgaacagaacagagataaccacattcaattaattgaaaatgctccgggatgtaatgttcttatcataggtaaaaccgtaacaactacttctacttggatataagtcaatcccaaaagactagcccggagacagagtatgccctagcggatatgaaccactacccaatctggtacttagtcgaagtgagatcctaacaccaaaccaccctttaggactgatgaaccacaccagcccacgggttttctcaacttgcttttccacaacttggatcccattcaaaggagcttgctcttataccatttgttacaaatcaaaaagtgggacccaactaaaaacaaaatatataaaaattggaagccgtaattgctaatatataaaaaaatcatacgagcatttaaaatcttcaccgaagcactgcaaagacaaatattgaaatgacggaaatttcttacctccgaaagagcaggaattcctaaagctctcatgagaacagatacttttgtttgcatcatttctttatcctccttgcccagcttaccgaagtgtaaaaagacaatcttgtccaaattcttaaaatggttctttaattttttatcatcacaccagcacacaaagccaaaagaatgatgtagggacacccacttatcttgtaaggtgggaagaattgtacattccaccttgctaagagaatctttcatgtcagcaacttcgttcgtagtcaatcctgaatttagtccttcactccactttacaagaacttgaaaaacctgaacatgggcagaaaattaaggttgcagcagaaccttcattaaccaaatgtaataatgctgagatttgagcttactgttttagaagcttgatgtggcagcacgacactggataactgctgcaaaatctgaacgtatgaaggaagaggaggtttctcatgcactccacacacattaacaaagaactcatgaagcccaggatagatattgcacaacgttttgtttaaaggagaagaggccacactgcttgaggatgattgttgaggaagcatttctttcatttgctccatagctccagttggatcgttccaaaatacgtcaccaggagacaaaaatataccagatactacatcctcatgtctagaactagatgtgtatggcacaaatatgcaaggttcagagcagaatttctttgccagtttcttcgaaagagctacttcatgccaaatgaaattatacaatttggacatttgtgttatgctagcaagcaaaaaagtaaaaagagtcattgaaatgcataataagtaatcctgacaattaacatatcagaaagacattttgtattagaggaagaggaaatattctttgaacaacttaacagcaaattaagccagtgaaacccttcctgtgtataccttaccactcctttaattacatccatagaaaaattaacagagatgacaagtgacaccaaaactctttacacatatgaaatcaattttttcttttttttaaatacgataaaaagcgaagttaaacatcatgaagttgtagcaatacctgaccatgaagggggagttagacctccatccttctaacatttcaagaacgtcttcaagtgtaaccttggtcttaaacccaatgtcgcaaaccaacttctcgctcttgacctgttttatgtaaaagcatatgatcgttacagaaataaatagcacaaaaatgtgtaagcgaatgcaattatagaggcataacataaatgttagtttacaaaaattacaggatttactattaaaatccatcattgaatgtaagattgtaaagaaattgccaaatattcctaaatttgaatttagactattgtttagaaattctcatcacagctaaaatatttactaattaggtcatataaacattaattaagtttgattatgcagtgatcttcgtttcacattattcttttcttcagtcggatcaccaaaacaaaacaaaaaagaaaattaaaatctacagctaactaacctttgggcaagcataaggagcacatgtgccaagaacagagcgcactgcttcgcagtcataatacaaatcttttggatagtgaagtttatcatccaaggttgatacaacccattgcgcatcagtgatggtgcttagaaacgtagacttgaaagccttactatctagaccagatttgttagtgcagtaacccgtcactttgtcgctgaagcaagaatcccataatttatcaaaaaccaccaagagatattcacaatttgttctgttaccactaccagttgataacaaggataataagttcaccaactcatgagattcccaatcattaacaattgattcttgggaaattaattctccttctgacatgaaatgtttgaatagagcaggagatatatctgcaacactcttctcaacctgaagaactttgacaaaatccgtgactccgattccctggaaaaattccctccacttgattagtccagaagggagtgttttggttattggatgcttcaaataggagacatccacctcatgccatgtaatattgacatcttcaatcaacttattaacattgacagaatttccaaattcttcactaaaatgaattgactctttggatggttgtttaaaaccataatttgtcaaaatacaggctgaattttgcaactgtgaaattatgtactccctttcgacgaggcaattagggcaaccaaaatttaggtgggacattacaaaacaaacatattctgtcatcaaattcttgtccttatccataatagtttcatcggatattgctggaagaatatgcaacttgatgatttcatgtgccgacagtcgttggacaccaattttataaagcatcatggaaagtttgtcagatacagtcaaatcagtacgagaactatccacagatgatgcagttaggagagctggatttacgattcgaagtcttgcatatagatttggaaaagattcaattccatactcaccatcagtaccagaggttgagccatcaaaatgcagccaaattgtaccatcagatacagcactatacgtaccatttgaaagtggaataaaagaaatatttcggagattatctatgcaatccgattctacttcagcatctagtacagtttgcccagaatggactgacattgtatagagttcaattagataagaagataaccagctcaagcccattgattttaggacactttctttacgacacaaggatgacataaattgaactagaattttgggtccgtactcttcaacacctagggtcctagcaaggggatctgatagaataatatttttatctaagaaaccaaggccaagatgttcatgaagcaaatcagcgggaagaatagaacgagcttcctcattccagcctcttaaaaccttacatggcggaacccattcactacctccttccaaaagtaaacattttgacacacgcaacctcgaaacaatcatacgaggaagactggaaaagaagccatgcacctctccaataagaggaacaaagctcataaaagcagatatagctttgcctggactatctttaaaacatggaagattgcaaaacgatatctcagctttaacaaacaaacctggaaactctgacaataaccactggttccatggactatttccatctacttcttctctagatgaaggaagaacaaaatcaccctgaagtataaacttcaggccgtatgttctgagaggaagaaatgcaaatacaggctgttggctaagaagtggactataaccgccatcatttgattcctgcagtgtaaatgctactgaaatctcagtcatttgaacatcagaacgaataaaatctgcctgaagtatttgtgacacaacaaaccatgtcattttctcatttccatgtgagacattaacaataccatggcccatgatttctttcctcatgacaatcagtgagtcatcaagcaagtttctaaacttgatacactggagccggtgaagaaaaagcaacaaggacggatgaagatcagaaaacattgtgataatgtttttcaccactgttccttcagataactttgacctaaaaggaagcacaatgcaagtgctacaacatttaatatctaatcgatcactgccactagatgccagcctgctaatcaggttaagatcacgagaaggtatggatgttggcagaacaaaaccaatctgcccctcacttatatcaaacttgacatgaaagccattagaatggatctctggagcatccgtaatctgcaaagaattttcaaaaatactagcataagctttcactcaacagagtatgtacgattcatcagactagacagttgacatgttagccactgaaattaattctcttatcaggcttttaaccaaaaaataattctaaaggatctaaaaaatgtgaaaaataataatacaaagcttcacttttctagaatctaaaagcatccaaatttactcaaagtatcaaataatattcagaacacctttttaaaaaaccatggttatccaggccccaccccgactaatccagggggataccccacggacctcaccagcaggtcccaggagatatcagggaattagtgtagtggctggagttcgaacatgagatgaccttactcaagacacccttgcccttacaccaatgccctggggtcgataattattaaattgtatggttttcagaggcatcttgttttaaaaaatataaatattgtatccgtgggaaaattcaataaacatgcaaaatataaatacacacttgatatgccattgaattttttctacatatttctgatgagaaatgattaatcttatttagtacgatttttttccacttgtttgccactgttatcatcatagggtaagaaaagcaacttaaaatgattattgaaacacaaacacaatgacacctagtaagactaccatgttatgaaatttcaatacaaaagtctttgaagcaatacagaaacttcc

SEQ ID NO: 14940 - DNA, 7719 bp, Cannabis sativa
gattggattggatcggatactttgtgaacacccctaattttactatcttcttttctctttctttctaaaaattacaaatattaaaaaaaatattagtaaatacaattatagattctatattttgtaaaatttaataattgacaattcagatcttatattttttaaaataatacaaaataaatcctgagcttaatttttatcgaattaaaacttaataataaattgacctgaaaatgttatgacaagaaaggttatatttcttgtatctgtttgtgctagaaatttattttaagtgggttatgttaaaaaaatgacaaaaaatagaatttactgtctcttttgtatcattttgaaaaatacagggtctgagttgttatttaataaaatagagtccaatttgtaacttttataaaacacaatatcttaaataatatttacttagaaattaccaatagttaataaaatatttaaatatgtagaaaaaaattaatttgatatataacgtaatgtaaaataatatgtattttaaaagatcgaagagatttttacattacatactgaaatttttaacttttttttttatgcgaattttttttcaaacatactgtgtttttttttttaaatattgtgtaagttttatactgtatactattttaagttttcaagttgttcttgtttttttagttattccactattattttagttcatctgttttgttattttacggttattttataaaaaaaatatttttataaaaaatttatttgacagtaaaatttaaaacttttacctaaaattcaatattttataaaaacctcaatgttaataggagtagagaagttatcgggagaacatatatacgtgagaaggtagtaaattaatataccaaaactcattataaaacaaaaatataatttttaaaataatactaattaatatatcaagatcacaaaatatttaaaatgaaatatatcaatgttttgtttttaaaatgtgtaatttaaaatagaataatttgtagtataaatactcaaatataatttttagttgcaaataaataactaatttattttttaacgataataatactaatttatattttttgaaccccataggtactgaccatcaaatgtcaagtaattatccacgtgtcattttcttattaatagatttaaattaatttttttttttttaaaataaagataaatatttaatgacttaaaccaataaaaaattatcacgtttacttaacacttaacaactaattatttacaaaaattctaaaattataatttaaatattattatcaccaaaaattaaacttaaatatttatgtgcaaattactctttaaaatataaaatttgtatatatggtaatgtatagtaataaggaaatagttcatattaacctacaaaattaaaaacagtaacatttccttactttatacctgattaatggccattttctccaataatgaagttacatgtaaaaatacccataaaatgaaggtagaactagaataatattcgttattgagaaagcagagaacaaacacaaagatatttgcttattttaacaacaattctttggaacaaacaagtaccttttccctttacataaacccaattgacttctttcgtcattatcatctatacttgcacctacttctgttgagacttgagttccttcaccctctcttcagttgccttcagcgctttcccatagatgcttattaactgaaattttgtcaaagataaaataatgtcatgctcttgtaatcaacacttcattctagttataaccaccattggagtaaacaatggtaataatggaggccactaaacatcaactctcaacgatattcgtattaccaaacagtactagccaattatgcaaaactattggtactagctcctaacagttgttttatgttttcaaatcatcgtccacctatccgattcactcaaaataatccccttgaaaccaatgatcaaacctgtgtttccagtaatggtttttctactttactcaaactcgttaagagtgactcactaattctgttttgagggttcagtgtaaggattcttttaccatacctgctcaagttcttcaggagacataataaatggaggagacatcataatgttatcccctgaaacacgtactaacatgccgtgcttctcgcattgtgctccaaaatatgcagccactcctgtgatatcacacaggcaaggagtgtcaatcaatgcaagggaaatgaaagatgaccaaaacaacaatatcataccatgcttacgagaaaaccaaacatgcaccactaactgcaataatttgccaaactaaaggccttatttcaaataaaaaaaatcatcagaagataaaagatatgagtaaacttgccccattcaggaggaaatggatcgtttggtgacttgttatctgtaaattctgtaccaatgatcaaacctgtgcccctgatctgcaaaaccacaatgtaaaatgtcataatattcctgtattattgccaaaataactaaacttgaagacaccaaaatgtacctcccctatgattggactgtcagcaaaggcttttagaccatcttgaaatcttggcgaaaggctgtttactttacccactatgtctctttccctaaaatgaaatgaaaatgtttatgtgttctctttctacatataaactgaaccaaactcagggaaaagggaaggaaaaagaggaacatataaatttcatgctgaagatgctcaaacaggagcaaaacttaatattgtccctgacaaaaccaaagcctagaatctttaaatatgtgaagaccagagaacctcaattctgaaatttacccaagaatatccagttacactttcacagatgcataagaactactgttttctatgcatccattgaaccacgtttgatctataagaacacatatgttatcaaatgtgtttaccactggtcagccgatgaaaagtgcaacttaaacatgagattattggcttgaccaactcctctgtgatctaaattatttaaagtccatattgaaataaaagacaaagtttattaaataggatagatgatctaaacccattttctcacatcactccttttctttattcatctaatgagactaaggaaaaaggacatacacctagcataatagtgttagaatttgggataagatgaataaggttccatcttaaaaccaattgacaatgagaggagtagcccattcattgacaatttatttccacacattagtaatgtgggattaactctaatagataaatatactatgatgaaagttgaattcttaaatagggttgaatcactggaatctaggttaatttacaagttggaatatactagggatactcagaaaagaaacttacttgtagatctttaatgcttcaagtgcaaccgcacatgcaacagggtgcccagaataagtaaatccatgagagaaaatgcctgatgtaaagaacagaaggaaaaacatgtgataaggatatcagatagactagattacatgctaatgaaaatatacttaataacaatggaatctttgtcagcataccaagcttgttactttgtgagtatatgacttctgaaactttagggctcaccataacagctcctatgggcatatatgcagaagaaagggcctgagacatgcaacaccaataccagaataaataattttacaatgcaattacgcacaccgctctactaattttgaatcgacctcactttaccttagctacagatacaagatctggttttatgttgtatttgtcacaaccatacattgtcccaatccttccaaatgcacagatgaccttaacattgatagtcaaatggacaaatcctcagccaaagaaaatattgaactttctcattagtcattgcctaaaaaatttaaggaaaactataacatacctcatcagcaataaaaagaatgtcatatttcttcaaaataggttgaatctgcataaagcatcagattctatggttaataagttcaacttttacttgtccaaggggaagagggggcaaagaaagaatactatttaattaggtagtatggcattatagttgatagtatgagaaaatattaagtgcaatttgtagagagaaccaggtcctgagaactttaccttatcaaaataagtggcaggaggaggtataacacctccagcccccataacaggttcggcaataaatgcagctatctgaaataaacaactatattactaaaggtatatgtacaaaacaaaacatcttttacgacataatggaatctatgctaaaatgaataatgttggaaattttactgtatctggtccctctttcagaataagatcttctagatttttagctaatctggttgaaaattcttcctcagtctcacctgccacaaccagtagcatgttaagcttgaaaagacatgtcaatgaaaatgctcaatctcagaaattaggccattaaatttggaaaataatcacctggaagatgaaacctccagtaatgaggacagtcagtgtgcagtacaaatggagctggcaaatcaaatttttgatgcaaagccggtagcctgacacaagaacttctcagtgaataatttgaaggactacatgttaaaggggagtacaatataaacttatcctacccagaaaggctagcagatatcaatgttgaaccgtggtacctgtaaagtgatacttaaatatcagtggctatgcatgataacaagaattcataaagaaaagatttaatcaagaataaaagaaatacgattttgatcgagcaatgaacttcttcttgtctggtcgtccaagagcattattgtaataccacaccagcttaacctaaataaacaattcatttagttacaaagttaaaattcatagtattttggcgttgttcatgttagaatattagttgtatattaattgtaaaaattagggtaaattatatttagtagtttcccatttagtctcctaaatttgtatataaatatatactatttctatggaatacaacccacaattctattcactattctatacatggtatcagagcaatacttagaattgtgattcgaaattcgaaattagaattcataaaaaaaaatataagattagggtttgagtttagggttcttttttggaaactctagttggagtgcgagttctttcccaccgcccacatatacagattgcccaaccgccgatctgcaaaaccccaaagttcggcagccagaatcaccacgcatcgcccatcactgcagccccgactcccatgcgctggtgcgtgagggcgcattcggcctcctttttggtgacggtcaacgtccgtcacactcccagcccttcctcgtcctccttgcatcggtctccgacagttcttctcattttgtagtttgatttttttgccttcttcgtgtctgtgtgttcattctttgatattcgctttcttccttttctctttcaattatttttgctttcgagattatggcagagataaaattagattcgaaatcagtggttgtttctgatgtggttcccgtgatgtctaaaatcatgaaccataaattgattggttcgaattatttggaatggagtaagatgattcgactttatctgaagagtgttgacaaagatgatcacttgactgacgatcctcccaaagaaaaagacgattcaaggaaaatatggctttgtgagaatgctcgcttgttccttcaaattcaaaattctatcgataataaggtaattagtttgattaatcattgtgaattggttaaagaactaatagattacttggagtttttgtattctgggaaaaacaacatatatcgcatatataatgtttgcaaagtcttttatcgtgctgagaaacaagaccaatctcttatgaattactttatgacattttaaaaaaacatatgaagagcttaatctgttgttaccatttagtcacgatgtgaaggttcaatagtgccaacgagagaagatggctcttatgagttttcttgcaggattcttttctgaatttgaccatgtaaaatcacaagttctctctgattctaatgttttctctttacaagatgtgtttactcctgttcttcgcacagaaactacctctttaactcctcttaatagtgccttggtgagtcgtaacaattctgcaccaagaaaaaactctactccaatggatacaaaggaagtaattcacaaggacttgataatcgaacactagatttcgggaacatcatgtgcaactattttaagaaatcaggccacaccaagtttgagtgtaggaagttacagttcaaaaatcaacaaaaacactgctaatattgcaagaactagtgatgcatctgacaattcggtccttatttttgctgatgaatttgccaagttcttgaggtatcaggaatcacttaagttttcatctccttctatcactgcaatagctaatttaagtaactctaatgcatgctttctttccacatcctcaaaatgggttgttgattctggtaccacaaatcacatgacaggtaattccagtctcttttccacttttcagtctcatagtcccacttctgctgttactttagctgatggatcattatcttctgttcttggatctggcattgttgctcccacacctttgctcactttgtcagcagtcttacatttacctaatttgtcatttaatttgcttttggttagtcaactcactcataatctaaattgttcaatcgcattctttcccgatcattgtttgttccaaaatcttatgacgaagaagattattggtaaaggacgtgaatctggcagcctctaatgtgtccgctcatactttgcgaagtgataatgccaaagaatacacatctgcgcaatttcaatcttacttgacctctaatggcatgcttcatgaaacttcttgtgttgatactgcacctcgaaatagtgtagcagaacgtaaaaacagacatcttgaaactgcacgtgacctcttgtttcaaatgaaagttcctaaacttttttgggtcgatgtagtttccacagcatgttttcttattaatcgcatgtcatcctctatacttaatggtgagatcccatttaaaaaaaaaaattcctaataagtcattgtttccagttgctcctcgggtatttgctcgtgatgtctgaccaattgtcaccaaattagaccctaaggcattaaagtgtgtctttcttagttattctcgtctttagaatggatataagtgttattgtcctgattttaacaagtatcttgtttctattgatattacctttgtaaaaaatacaccttatttttcatcttcacctactcttactcgtcaggggaaggatgatgattcgttggtatattctgtcacatcctctgcgtctgatacatgttctaacgagtctcttgttccttcacctgcctcggtcataactctcacaatgcctacacctccaccaccgccaccaccgccaccacttcctaggcctcctatagtgtacactaggcgtcaacctcctccacctctcgtttcatgttctgcacctgcattttcgtcatcagatccggaattcaaagatgatcttcctattacactatgtaaaggtaaacaccaatgtacttttcctatttcttcttttgtttcttataatcatctctcctctt

SEQ ID NO: 14941 - DNA, 6243 bp, Cannabis sativa
gcgcgaaaaatgagcccattgttactcggatggttggaaggctgaccttggtttagagaagtcaaggtgccgcacgggtgttccgctgcctgaaaaggtgagcccgtgacactagtgatcccaacccaacctagctatctcgggattaattgatacaattaagtaccatatccatatataaactaattaagattcttttcattcatatgtatatgcttctcaatttttttaggctgatttaaaaattactgtgtcattttgtttaattttattaataaataaatttgcggtataaatactaaaatttaactctcagttacaaataaatatctaagtttaattttttgacggtaataatacttaagttatagttctgaaactctgtaggtacctaaccgttaaatattaatccattatatccacgtgtcgttttcttattggtatatctgattttgtttttaaataataaaaatttaatgacttggaccaatcaacgattgccacgtggcaatttattacctacagaagttccaaaattataacttaagtattattaccgccaaaaattgaactttatttatttgcaactgacagttaaacttaggtatttacgccgcaaattactcaatacttaaattttattgacgattttttatatattaaattgtactccttgaacttccattcacgtcaagtgtttgttggtaaaattaaacgaaactaaatctttgaattcaataatgtcaatagtttgagaaaaattttgattgcttgcgaaatttggaggcgccatttaatgtgttaactcaaattttcgttaacaataaatgaagccttgtaaataaaaaattaactatttataattaataaatatagatgaaataccaataacttttaagtgattttgtagttaaaatctacatgatacttcacgagtcagtattatttctaagtatttctagacaatgtttcttgattacaagaaaatttctttggatgttcactcaatctcacaaagttttaccttccaaaaatgaccgattcctttttccataggttttgtctctatttataaggattaattttaggaatgtcagttgttctcttttaatcttatctaggtaactattcataaaatatagacaatcacaacattttatatttacaacatgtggataaaatgatataactactgataatcgcttcttgttcttaccaggaagtagtttgtctttactgagataacatactccaactttggctcgcattctttaacggtgttcaggaagaggtggtcgcattccacgatatgctagttaagatgtttgtccttgcaattactttttacgttaattcatggactattctataaaaattctgagataagttatactttgcttattttcgttagtctttcaacacactcacgggtatgtggatcaatgagttggaagctcttaaagaactcattacctagcatttccacttaactcattcttccatgctattcaactgcctcatctcagtcaaatctgaggatttagcttataatcttgttatcctcatgaatcattgtattgattgtgccacgcgagctcattacatcttttaatagtagttcatctcgagacggtacatttattcattcctcgtattaattatcatctttattcttttaggtctacatggacacgtttcatgttcatatgtagtgcttaaaatatgggtgtaacaattaccctctaaaaagtaatttttatttttgaaaaaaaaccttttaaatcattatcgcatggtgtcttttgtgtatcgagtaagcttcttaaatttttagttttggcgatttttgtcttcccgataaaagagctaatcatagtttttataataaatgtttgtcttttcaactgacccaaaagctaatcatccttgattaagtatttttttaatcatacagtgcttacgattttgcttaaaagaatgtcatttttatttcttaccactattttcaccactgttatctaaggagaaaaagcacagaactgaaagcattccccttgtatgccctctttatctatttgcttttttctccacatttttgcaaccattttttgaaacccaaaaaatgcttcattcctaagccttggattcgtcaagcttcaggttaaactccatccaactcatcattaagttctaatcccaatatgttcttctcaatatcttaaattgcgtcctatggtatgttctgttttattttataatttaaatagggtttttttttatctgatttaagctacattatggttttgaggatctctataactttggattttgtattttcaaattacgtagagtttttccaataaatttttcttcctttgagagaaaataaatgaatctatttagctcaatacttgaaaactcaaaatttttacaaaatttacttttcttttgccctacctgttgacgcgatatttcatcaactgatctaagaaaatcgtaagaaataagaggattgcgataaattgatttggctaaataaaactacaataaataaaaagaacattgttatcctaattttttctcacttgacgtggcatgtccacatgggcaaaactaaggccacgtggagtacaacttgtcagtgattggacaaatcttccttgcacagcacatcgattgtcaagggtttaaagcaatcaagcaggaccgagcaagggacaaatggccaaccagggaccctagctggaccaaaccctggctagccaatgaacttttgtgtgactgccaagccctataaatagggctggcagccagcatgtgcaaataagccttatgtagaggccagatggatgtggggtcagcaagttaaaatttagctacgagataaccttaattgactatggaaataggtgatcttcttcaagctaatatctacctatcctttaaggatattaattatcttttttgtaatttaaatataagatagaaaagctattttccctattttgaagggatatttactcattttgaataatgatcttttgtaaccccagtattatataaatggcattatgcaaggtgaaaagggatctgaattctaagtccctcaagctctattgctctcacaatctcacgtttcctcacttcttcattagacacttagtctattctcctcattaagtctcacttgttctgaatttgtaacactcaattctcactactgtacaatctaagagagtcataactagaaattaacaagtttaagtctgtaatatgtgtggtattatctctataatcaaggggccgaacctctataaattgatgtatcacttatattatttgctattacaactcacacgtagtgcttagaagactccactatcagttgacaaaatttagggtcaacaaacatcataaatttatattagttcaccccctatgtcgcgatgttaatgaggccacatctactttgtttttatcaattggattcaacacaccagagttatgttctcaagagtatgtggatagtagtacaaaaaagttctttatgtgaaatctatcgagactcatgaatacaatgctcatgaaagacccaacattcataaatttgataaggatgatggttagaaatagagaatggtctctcttccttggtaaacgtgtttgaagtaatgatgtttatcgagggtacaacaatagaagcttggtgccgtgaagaacacaaagaagaagatacaaaaggaaatattctcaaatggtctttaagtttgggaagctcttagaacgtgaaggaagatttcaatttctcaaggatctcctcccttatccctagcctatcacgatctttatataggcctagggtttgttagtgatctcccacatgtcggggtgtctcactttcaaatcacgtaagctattctaaataatgaataaaaataggaataaataaatatctatgaaaatattccttattgctaggcaaatattccacaaacattgagattattgttgaagttggatattcctcttgtcttaaatttgcttgtgtggcattgtgctttggaaatgtaaacattggagaggagtgacaagggatgtcacccctcggctaggaattttctcaatgggagagaaatgttggagagaagtattttgggatggcatttctcgatcatgatgccacatgggttgtggcatagctctccaaacatcccattgtagctcacacacaataaaaccaatcaattcccaagtaaagtgtgccaacctatattgtgagccaattttgagcatgataactttagaattgagctatgaccatgcgacaaacttagatttgtcttaaaaatatattttcaatgcaagttgaaccaagtcatttggagaaaaatggagagagtaatgcttgtattaccgaagggtagtatgtaccttttagctccaaatctgaccgttgccacatcaaagtggcatttcttggccatggatgttcctggatccttccgggtgtgttttgacttgttttttgatgttgaatcatattttggaggtctcgggacaccaaaaacctcatttcaacatctgaaatcctaacaggagacaacttccatcattcagtgccaaaagatatatggcagtggtcagccagggattatgggaagtccttgatggtgtttctatcttattttagtcatttggatattagaaaatcactttggccacattagttcttggccaatcggtagaagagagcattgccatcttttgggaaacaaagatggcagttgtcggctaagggggttatacaccctttggtgacttttcttacttgtatttgataccttgatgttggaaatatactttggccaaagaaattctccaccatttgttgtggccaaccactgccactctttggaccacaaaggtggcagtggtgatccaagtggtttctatacaacttggtggccttcctcacttggttttgacatgttgatgatgaaaaagtaattttggcacagaatccccttctgatttgatgtggctgacttgtgccacttatttgtgcacaaagatggcacatgtcagctaggcttgtccttgagtgaaaaatggtttctttcacttatgttgtaatccttggtgttgagggagcacaatttgataagtctcgtttggtattttgagagtagagagcattgccatcttcttgtggcagtagtccctaaaaaatagagagagcgttgtcatcttcatgtaggaattaaaaacatgacacatatataccatatatacaacagtcccaacgtaacaaaaattaaaattagcccttaaacggaaagacagcattaaagctcgagctttgagctttaaaaagttcaaactcgatttctaactcaaaactacctcaaatttagcaagtaaatatcaatattaatcccatagctacccaaaaacaattctatgaagttactatcttcataactactctaaatcacaaagccaacatataaaaccaatctttttcaacttaaaatgaaaccaatccttaccttaagcttttcctcttcattagtttactatccagctattaccgggacttgaattactaagtttctggctggaatcgaagaaaattagatagtgggagtgaaggtttcggtgcaccgaaagaggagggtttcgttctgttctttctttcttaagttttaaaacgtattatatatataacctgataagttattttttttttaaaaaaaatattaataataataaaaaatttattaataaaagttttttttactgtttcttagctattaagaaatttttatttctaggacactaggtcaaattccaatcacttctaattatctcaataattatactatcaacctatcataatactcccatcaaagttactaatttaaccttgctatgatatttttggcccccgatcgagtctctaaggttgtcaaacttgaaaatatttttattctacagacaactaatattatatctacacatactatataagtctctgtaattaataaattgtggagttactctgctccacaacaaggtagctggtattggaggaagatagttgcattgaaaggtaccatcctaactctaactactccctcatctttcacacaaagccgatataaaatagctgaagggtataagctgttatgccccaatgagaaccgggttaagtggagcaaggaaatttggggtagactgaat

SEQ ID NO: 14942 - DNA, 8134 bp, Cannabis sativa
ataaatttatatttacaaaaaaaaaattaaaaatatataaaaaataaaacattataaaaacaaatttttacatatttatgattataataaactagattataagattatcattttaatagatcttaacaaattcacaaaattttaaaatttataatttaccaaacactcaactcagttttttttcacagttctattgcagctgttttttctcacaacacagctacaactgttttttcggacagcacagctgtaccaaactgccctaaattctactgcacaacactctatggtttggcaaaaacacaaactgcaaccgcaccaaacaaaatttcaaagcacatttttgtgggtgtggcgtggtgctagcggtttgtgtcactgtgacaaacagtgagcaagtgcagtggactgtggtgaagtttattttcaaattagactatcggcctccactgctagagaggtatctgtattctgtacctaaacctccctttccatggaaaaacaacatacctaaaccctcaacgcaacggccacaaacgcagctcgaaacagatgctgtccttcatcagattgagcagatcctctctgccacgcacagtcacagccgccgctggtttcttcttccgccatcgtcctataccccacactctcatcaccgccactacaagtgcactccgaatacaacaacctttttcccacatcctccgccacaattgcgacggtccgacattcgatggcaatggcgatggcggaggagagtacgataacatcagggctgaagtgaactgccctcgttgctccaagaaaatgacggttctcttctcgaaccgcccactctcgattacgggtcgagagatgggagttttccaggcggttaatctctgccccaattgcaagactgccttctatttcagacccttaaagcttgagcctttacagggaagctttatcgagattggtagagttaagggcgcaaatgccgtctcggtctcggcttcagcttctgacagggattctgataacgacggggataggtttcggagaggtgtctgtgctactgaaacggcgtcgtgtgaggaggaggatgacaacaggcgtgggttaggaaaagatttgagtttgcccacgcctaaagagatttgcaaggcccttgatgaatttgttattggccaagagaaagccaaaaaggtttgttttttatttttgaaaaattgtgtagaatatgtctaatcaatgttcttggtttattgactgatcattcttcattaagaatttgttcataatagaacggcatgtgcaatatgacaagttgttcataatagtgccttttaaatttgtttgattatgtggttagtatttcatatgtatccattgattagttaagatataatactttatcgatgcatcgaatgttttaacaggtgctttctgtggctgtttacaatcattacaagagattacatcatacctctgagctgaaaaggttagctccataatgttttgttttggtcatgatgtttaaggtggtaatgggcaatttcttgaggctaactcaagtggttggatggtgaatgtgtatgaatggtctgggcttcaaatctcccataaatctaacagaacataaactgttttttttccctaaagattttgatgttctttatctgaggctggttacccttgataccaggtcaaaggtacaatttggtaagtgtgaaggtgaaaatgatgacaatgattctgtggaattggagaagagcaacatattattgatgggtcccactggttcaggtaaattgtgtgttcttattagtgtgtctatgaaagccatggttatcggaatctgcagcttgaaaggattgcttttctgattcatgtacgtttaccgtgatgggtaaggatagggaagaccttacttgcaaaaactctagctcgcgttgtgaatgttccttttgctatcgctgattcaacaacattaactcaggcaagtagactattgcttacttctcataaccacattatgttaatgatattttggctgtagtttcttctattgcttgcaatcatttatttttacagcagcatttttcagttcttgaatgtatgtggtagagctatcctggagttaactttgcaagtcttttgtaggaagagtttcacatttcttttctttcttgattttctgctctggtattttaatgaattgtggatgtattgtttacaattggttttatttttactctgtaggcattatgtttttttttctaattcaaacaggatatgcaatattattttcaatttgtatcataaatgttggctgatcattagagatttgacaaatttatttctctatctacaggctggttatgttggggaagatgttgaatcgatattgtataagctactcgtggtatgatttatgctttttcctttttttttttttcatgtatgtcttgttcaagtcagatgttatgtgttgggttttatttatttacttattcatttatatttggtcatttaacaagatatactattttggatgttcctacaagtaacggagttgagtaaatttgattattttggtgtgcgtaggaagctgaattcaatgtggaagcagccgagaaaggaattgtgtacattgatgaagttgataagatactaaaaagttttttttttttttccaagcatatgattattcactttagaatttagatactaaagttattggttaggttaaccaagatgaatgttatgcaggtcgagagcttaaacattggcagggatgtatccggagagggcgttcagcaggcattgcttaaaatgttggaaggaactgtgagtaaactgatctttaagtagcttcttatgcatgtaaataagcatcatgcacgtactaattgttattgtttacaatagaggatgcaaagttaagattgttcatctccttgggttcattcaccattttactctaaattgaatcatgctatcttgatggttggagagtttgtcacccatggattaaggaaattgtatttatgcacttattctcattttctaaattactatcctatacttatattctgtttctaactatgcagccaaatggtatttttttttattgtgggtttctaaattggatttgaaatttccaagtgcatggtgatatttttttgagtaaccattgacatatacggtatacccattgagaagtgttccatatatactggtacaactatagtagtgattaattttaatcactacctataagttgcaactccgtttttttacatgaaaatatataatgtagttacacggaaccccgacaagtattttgtaggaaattcaaaataatctaggatgtcttaatcatgattcaaatttgtaatgtagtttaggtgttagtcctaattttgacattctatgttcggaattttttgaaaatttgtgtgaggtcctctgtaattatattatataccgtcatgtaaaataaaaatagaattacaatttatctatatactgaaaatacaattcatcaattggaataacattagactacttaatgttttggatgatagtagagtgtggaaaccagatttgagtggggttttctcctgcaaatcaatgttcaattggttccttgcgagtcagaatcaaagagagttgtgctgcactaagatcttatggaaagctagaggcccttctaaagtcaaggtttttggttggttagtggctctaggtaaattaaatgtgcacgaaatgatgcaaaagagaaggccatttctgggctggtgtgcatgttgtaaagaagtggggaagagctggcacacttgtttttgaaatgtagcttttctactaactttggattcttttgctgaatgaatttgatgtaaatgggtaatacttgactttgtacctctaatgatggtaagcaaagtgggtggaagtaagcgtaggaccttgttgtggaaaactacagttatggctattttctgggcaatttggttggaaagaaatagctgaattttgaaggggttgaatgttcactagaagaaatatgggagagggttagattttggactaccacttgggtttacaagactaagcacttcgaggacctaacattcttagacctgactagggaatggagaactttgatgtaattatttgtaaaatctcctttgtggtaatctgttttgtcttttgctaagttctttttatgtaaccacggtcttcctccgccacaagtgaggattatctatacataatgggagggagcccggtctaagacaagtggcctccttctctttttcaaaatataaaacgaaaaatacctatagatagtaattaaaactaatcatatatatatttatacaaacatttcaagcgctaggtttttttctgttagaaatttgatttaatgtaaaaaaaaacgaaagtccttgggttatagcaaactagctgatgcaaggactcttttgtttctgtgttttggtagaattggcctaggagaacagcagattaaaatattcagaaactattgttgaaaagttttcttctgcagaggtttgcccttcatcccttagggttgtggctacaatgaccaaattattggcgggttgaaatgtgtttatttatcaagagctctttcttttttgtcaatatactagtcgattattctggcatcagtcctaatcattgagcttatggagaagctgctgagagattttctatgggtaggagatatgaggtgacttagaaggaggagatcacttggtctgtgggagagtatatgcttgccaaaatctaaagtaggtctggggaattggacagcttggtgatagaaatgtaaaactttcctcatgaaatgattccttggggcatggcatcacaaaaggtaagtacaagatgcacgagaatgggtgggattctaaaaatgggaataagacgtctagaggaatatggctgcccttcattaagaatttggaaactgattaaatttaaagaggataatgggaggttaattcgcttttgagatggcatttgctgtgatgatggaagtcttagagaggcttcccctagtttggctaagctcttagagaggaaaaagtattgttgatttatgtgtctagcggaaggacaggaagtgaattggaatttctattttgtatgaaatttgcatggtacaatggtccctaatcttatttagctattaaagacattgaatttaaaaatgtgcatttctttcatcattgtagaaactgacagctactaatggattatctaagtttagtgcccggtttgttttttgtctgtacatatatttaaatagttttctttaggaaagaagttttcaaggaatttcctcctagactcctagtgagagtgcaatggttggtcccttctacctgatcatttcgtcaacaagatccctaaatatttaaaaggacaaatagtattttttttttccttgaactatgatctttgtagagttttgactcataaactctttttgtgtgtgtgaaaaacattccctccaattatagcaactattgcaatctatcatttgcttgcatttcattcatttttttaaggagtttattgatttagcgctaatttgatgcaattcaagagctcaggcagaaaatacgtacataaatagttgtcaaataacaaattcccagaatattatctgtatttttaaagcaaatgtttctatgttaagtaccaataaactcaactttagctagcttaagttagttaaataaattcttgtacttcatctatatgtgtggcccataaccacataaaggggcaataattctggagaccatattttaaaatagtcataattcagagtaaaaaattccgtaatacaccatcccccaatggaactcatcagcaaatctgatcatggaactttcctgcatatgtatatgaatgacccacttttctttgtttatttaaactctgcgactagttaaccaagtttgctgggaatgggctatgaggatgatgatttaaaaattcccagtgattcttgaggtttatgtgtgtgtgtttgttttttttttttttaatcatgtaccttatttcttatgtcataattgcgtcggaaaatgggaaagattgcagtgccttgttggatatctttgaagtgataaagatagaactgagcttttctaaaaatatgtttttgcaatgcacaatgtaacttattgccttcaatttttaggttgtgagtgttcctgataaaggatctcgaaagcatcttcgtggtgatactattcaggtaaactgaacttgacagttttttcgttcatctatgaatcatttccccctattctctcaatagttttagtagaatgatatgctaaaagtcctatgaagaatttgtctgatgcactgggcctcatggcaagtgctttgctcggtgcagttaaaacaatatagatgaccatctgaattctgaactgtctggcttgctgtttgtttctttaagtatatttattaactaaatgcaaatgacattatgtgactaagttgcattttaactaaagttgatttcatgcttgcagactttagggaattatgtgttccattgtcttgattcccccttatttatgttttaaaccaatgatgttcttccctagtttatttgtttacctcattccaattctacctagattgataccaagaatatccttttcatatgtggtggagcatttgtcaatttggagaagactatttcagaaaggtaattgtttttttttcctttgttgtttcggatgatgggtgcttcttgtatatatttttcattttattcctccactgctactagaatttggaacctaggtagtgatcagtaactggattgaactttcagaaggcaagattcttccattggctttggagctcctgtccggacaaacatgcagaatagtacagtgactgattcttttgtgacatcatcattgctggaatctgtgagaatcaaattctaacatggttattgagtttgcatctttatttttttcaaaatgtttgtttccgtattgagttgacattcaattaggtttctcattctctgtctctgcttcagtctgtgtcatgttatttaaattacaaagagacttaatattattgataaacttacaggtagaaagtggggatcttattgcgtatggcttgatacctgaatttattggacgacttccaatattagtgtgcttgtcagcattaaacgaggatcagcttgtgcaggtgtgttcttactattcattgcaatagtgaaagaacatattttcatgaccagttgtcaagggattcagaatcatagtcataagtttagtattattatatgtagtgagctcacgcatggcttgtttgttactgaacatttattaaccaagtccaaacttgttaagcattgaagcgcaactagtgaaagtatcaaaatcatgaacattttgtttaatttttttcatgtcgcttgtaagaaatagtcagatttacattctacttcccctgtggaacagatcctgacagaaccaaaaaatgcccttggcaaacagtacaagaagatgttcagcatgaacagtgtaagtttgtcgttttgctttcctaatatcacacttcatttgtggagatatatatttttaaagtagctccctattctgggtaacatttcaggtgaagctgcattttactgagtgtgctttgagattgattgcaaagaaagcaatggcaaagaacaccggtgctcgaggtttaagatccatactagaaaatattcttatggaggcaatgtttgaggtaatatacataaaaatgaataaatgtagattaatttatgtttgtgtaagcctattgtaccaatcatttttgtttgcacaggttccagacactgagaaagacattgatgttgttgatactgttttggttgacgaagaagcagttggatcagttcattctccatgcaaaggggcaaaacttatccgccgccacagtgcatttgagcaaaatcttcagaaaacaaagtcaaaagaaccaacggtatgcattaaatatttttctattttcagagtaatcactttcaaaacaaaaatgtcaatttatttattttatattctgttatttg

SEQ ID NO: 14943 - DNA, 18993 bp, Cannabis sativa
  modified_base (2030)..(2032): a, c, t, g, unknown or other
  modified_base (18092)..(18096): a, c, t, g, unknown or other
  modified_base (18295)..(18306): a, c, t, g, unknown or other
atcttaccataaaaaggaaaaattattttgtcacctaacttgccaaaaaaggactttacaaatagcctccataaaattcaaccaaaactcaaagctaagcatcaaagaacatcctagcattatttctaacataacataacaacacttcatgatacagactatgattcaagttgagggggtgtactttttttttttgtaagagaggggacatacttcgttttctaagtaaaaaaaataaaaaagtaaagcttcaatggttaaggactaattatatctcttagttgtatgggtttaattcctagagccatcttttttaaaaagtaaaatgtaaatattaaaaacaaaaatacttttatgagatttgaagctttattttctagtaaaaatataagatgacttaactaataaaacaaggttaatattttattaatatatatcacctttaattataaatttataatctaactaaataaaatataaattctttatcctattttatttacttgccacataacgtttacattaattgtgttataaaaatacattttgtgcaaattaatctaaaaagttaataaatatatactttttttttaatgaaattatataaaaaaaattattaaattattaaataaaaaagtttaaagcggttaaatacattaattaatggtaaaaaaagtaactaggtatacgtaatttctattacgttgcaaatttgacctatattatatattgttcaaatttcatacaacttttaacatgtgagaattttgacacatattctttactactattggagcatcatttgattagagtaagctaaatataataatgcaccacttttatagagttttattaaaaatgttcttactattttttatttgcttgtgtcattcaatctattattcagtctcttattctctctttaaatatatgttgactataaaatatgtcatttgtagctcaatatggaagttacattaatgaggagccaaattcttgttctgaaaacatttataagccatttgactcaaactatgcattcaaaaatttcaggttctttagtcatatggtgagaaatatgtttttaaataaacaatttatttatttttgtttcctgttttgcaccatttttttttaatattgtcaccaataagaccaagatttttctactaaaaattgcaaaaaatgatcacaataacattattcaaatatgaagctgtaagaacaacaagaagataataatgtcacacattatttatactattagcattataaatatagggaaaattttgaagtatcactgaatcacaatatagtaagttataatacaatagtatagatagtaatgatacttaaaatctaattttttataaaaagaacaaagcatatggagggtttttttttgagctttttcacagaggctctcaatgaaagcactaaactgttaatgtagattttcgttaaccaaatttgagcctcaaaatattaatttcacacagaaaaattaaatctatcaaaataaagaatataaacacagggtttttacgtggttttgcagttaaaattctacatagtccacgagtcaatcttattcaaatttctgagtatttttcagggcctcttttgtataagatttttcgtccctttttttgagcttgtcggccactatttataattacatagtgggaagttaattacaaagttgaccgaaataattttacagcaatcatccctaaaattgtgggatttgtttacatattatgtaatgtaaatgcggtttatgatttaaaaatcgtatagctgtgatttttccgcttttattgggtcaaaactatcgtgtataaaacacatctttaactgttgaatctggagatgtctcgatagaaacttgattatagtgatctcaatagcgagctggggccattcttccttcttaggttgacaatgtatgtcttgtgtcgatcgcggttatttataaagaagtcttctaactcgccaaggttgtaagcctcgctcctgttagttggatnnngctataggaagtcttcccatagcgagatggttatctcgcttacttgtttctttgagcgaattcggcttttatacttagcttgtttattgcatgctaaggattttctcggttaataagtgtcgctttctcgggtgcctcgctattcatatttagcgatatatggtttcttgctaatacactaagtgttagtttgtacattgattcctcgcctaagaccttacagtcagcgtgttacaaatatactttgatacttacgtaattaatgagttattccataaaaagatattgtatcgattctcattcccttaatcttgacacgtgtccttcagccggattttgagtataacaaggaggattttaggacataagtatactcttaatttttggggtagaatttatcgtggtattaagagcttagggagatcttaggacaaacataatctatttaacaatattatagcttcaacgagggatcatagctagcaaagagagagaaaaaagaagatgataataaggtggaaaatatcattactgtgatttaattaaatggtgagaaccacgatgaatgtgtgagggcaatttgaaccttattaaggtgaacatgtaatttgtgtagggcaatttgaaccttattaaatgtgtgagggcaatttaaacattatgtgtgaggaaaatttgtgcagtaaacgacactcatatatgctaactaaaaaatgtcattgggggagtgcaagcaaggaaaaactgagaatgtggaaaaatcacacaacctatttttgagattgttgtgcatcatcatattcgccaaggattgactgaacaaacaactcaatggtattggccagccatgacaccaacatcaagtgaacaactatctaaccctcaaatttctcctctattgttggcttcaaaaccttcccttccataaagccaattttctcattcatcgtggctcttaccatgttattcaatcagagtaatgatgtttcccactttattatcacaatctccttttgtttacccagaaactaaccctggtgacatagatatcaatatttgacatgtggcaagaaagaaaacattctagagttgagtagtctaaagtcataacagtcgacctgggaggggtccctagccctacggccaggttgactccaagaactcttgaattggtgtttggatcccgctacgttgtttccaacttatgatctttcagtattctaaatcaagaagacaagaaaattcaagtctaaggccaagaaactaaaaaagagatgaaatagcaccccaaaagttaaccctggtgcctagggttttcacctagtgcccaggttgacatctcaactagggtttcaattttcgggcccatcttagtgcaaatggctcaaaatttgtacattgacatgaataagacatctcacgatcttatttgaggcactggaatcagaattggaacactttcaattttgagcacttaaggtaccaagtgcttagggcacctatcgctcaggttgaatatgccatttccaatcactttttccaagaagtcttctaggcatattttttgttttcacaaataactgagatacaagtgtttttgagaatcatgattgacctagacgtcatctttcataacctcaatatagatcctcttcatccatggagacaataaagaaattgtctccttgaccctgaaatataaaatgcatagaaggacaaagtcaacaaacttttgactaacgactttatccaagaagaattttatctaacttgggtttcgaatccaattttagttctaaagccaaacgacaattggagaacttgtatagacttctctgatctaaataaatcatgtccaaaggactgtttcacttttccaagaatagatgaactcattaatgccactgtagagcatgagctcatgactttcatggatgcttattctagatataactagattaaaatgcatgttccagacaaggaacacatgagcttcatcacaaacattagctttattgttataaggttatgtcattcgggctaaacgcaaaagcaatatatcaagaactagtgaatggaatgttttaatggtcaaatcggtcgtaatatagaggtttatgtggatgatatgctagtgaaatcagtggaaagtaaggatcatgtgggcaacatcattgaatgcgtctctagtctgagaaaattcaatatgaagttaaatccaaagaagtgtttgtttaaagtatcatctgggaagttccttagatttatagtacatgcaagaggaatcgacgaaaatccagtgcagataaaagctttcctccaaatgccatctcccaaaaagtcaaaacaagtctagtctttactggaataatggtcacactttatagattcatttcaaaattgactgataagtgccttccaatctttaacatattgcgagataataagaaatttgaatggacaaaagaatgtaataaaactttgtagattattaaacaacacttatcgaccccactggtattgtcaaaaccagtgacagatgagattcttttcctatacttagcagttttagaaaatgctatgagtgttgccttagtgtgagaagatgggaaagtctagcgaccagtatattacataagtaaatggttaccggggttagaatcaagatatccaccacttgaacacactaagcctagtacatgcctcaagaagattgcgaccatatttttcagacacacccaaattaagtcctaacgaatcaaccactaacacaagtcatttcaaaaccagatgcttcacgatgactaacaaaatggtcaattgatatgggacagtttgaatctcacactatccacgtgtggccataaaagggaaagctttagcatattttttggtagaaagaattaacctcaaagaaaatgttgaggaggatttagaccaaaagaccaagaaactgtttgtagacgacttgtcaaatgatagcgactcgggccaggaatcattttgatttcttcttagagccttagatttcactatgcattgagatttctattcatgcttctaacaacgaggacgagtatgaagcattactagcaggactagggattgcaaaagtcataaaagttaaagcaatctattattttagcaactcagtttatagtaaattaggtactcgaggattatcaagcaaaaggaattaaaatggctaaatatttagagaaggttgagaagaacttggtaaaattcaattattacaaaatcaagagagtttcaagagagcaaaattataatgttgatgcgttagcaaagctagcttcacagtttgaaatggataacctcaatttggttcctattgaaaaaaaaccaaatattgtcaaaagaccgggatgtggagataattgatgcaaatccaacttggatgacaccaataataaactatttattgactaggaaacttccatctaataaaaatgaggccggaaaacttatgtacaaggtcccaaagtactatacaatcgtagaaggtaagctttattgacaagaagctattccatgccactattacagtgtgtattactagaagaagccaaaagaatcataaaagaaatacatgaaggtttctgtggagaccatgctagatggcaaattttatcaaagaaaataattcgacaaggttactactggccaaccattaataaagatactcatgagttcatgaaaaagtgtgagaaatgtcagagattcttgcatatcccttgaacacatccagtaaaactttgaatgatgaccttgtcttatccctttttcttttagggaataaatctaattggttcattaccaacaaggcgaggatgagcataatatgcagtagttgcggtcaatttcttcacaaaatggacagaattttaacctttagtctctatcactttgaagaaagtcatagactttgtgatgaagaacataatttatcaatttagaatacccattaagagtctgggataatggaactcaatttgacagtgatctattcacatagttttacgagaggaacaagatcataaaaagtttctcatttgtgtctcgggcgcacgctaatggccagttggaaacagtaaacaaaactctcaaagacactatgaagaagtagctcaacacagcaaaaggaagatggttaaacgagttactacaagtgctttaggcccatcaaacaactgaaaagacagtaacagggcacactctattctcactaacatttggctctgaggcagtgctcctagtaaaagtgaatattgcgacccacaaatgtgaattatatgattaggacaaaactaagaattgttgatggaatccttagacctggtcgaagaaaaatgtaccgagtcacaaatacgcaatgcaacatatcaactaaaaatcacgaggtattttagtaaaagaatctgcgagagactctttaatatcagtgatttagtcttgcaatgagtattcaacagtatgcaagatcctacagttggagtgtttaatccaaattagaaaggtccttatataatagagttttaataagaccaggagtgtataaattggcttagctaaatggatcactagtaaaaaatacttggaacaacaagcatttgtgaccttattaccagtgattaaagtgcttttaagtaattttttaattatgaaattatgtaatatgtttcatatttatggaatcctttcatttcttaagcaatcataaagtctttactttaaaattaattgagagcatattattgataactaaccaaattttcataaccatattatttatggggctaagggttaaaatattaatataaaaatactagcaaaatatttttttgaaaaattaataaaatatcatcagtatttattcttgatgtatgtatcttatctttaaacaaaaaataataagtagcagttatcataacgagatttccaaggtcaattttgataatagtacaaaagctaagtgtgaacaaaagaacaaattgcttgcatattgaaaacaaaaacatcaaaaaaaaattgaaatagttgtatgagatgtttacacttattttattacttgatggaaaatgagtaataaatttgagataccatatgaatgacgtaaagatttaaatcattagtgctctatagaaatgattaagccgtgaattgtttttggcataactcacctaagttttatacaagtaaagtggagaacatattttaagaagcatgtataaagtgaaaatatgcatataagttaatatatttaaatataaataactgaattggcatctaactaggtaaaattaattacataataaaaatatggtcaagaaataaccaagtaatttgtcttggctcgaaggccattgtcttaaaattgacaaaataaaataaaaactaagcttccttttgaagaggcttagaagcagcaacttttgtttcatcatcatccttggcttctatctcttggacaaattcttcagtcggcatgcccttctcttctgcttccatcttctcaaaaaatttaatgctctcctcgacatatggctctaagaatgatgtgttcatggttttgttatataaatcaactgaaaaatttgagaaaaaatattaaaaaatttgagaagatggaagcaaaaaatattaatttactgatgccatctattatcttttaaaaatatattttgttggtctttttatattaacattttaaccattagccccataaataatatggttatgcaggtttggttaattatcaataatatgcccccaaataattttaaagtaaagactttatgattacttgagaaatgaaagatatagattctattaatatgaaacatattacaaaatcttgtaatttaaaaattacttaaaagaaatttaataattggtaataaggttgcaaatgtttattgttctaagtatttttaactagcaagtcatttggccaagccaatttatacactcttggtcctatcacagcttctattatataagaatcttcccaattttaattaaacactccagctatagaatctttcatattgatgaatactcatcgcaatactaaatcactgatattaaagagtctctcgtagacctttttttattaaaatgcctcgtgattttttactgatactttgcattgcgtatttacgactcgatttgattttctttgagcaggtccaaggattccatcaacaattcttggtttttatcctgatcatagaattcacgtctctaagtcacgatattcacttctactagtagcattgactccaagccatatgctagcgagaacgaagtgtgccttattgctattttttttagttgtctaatgggcccaaagaacttgtggtaactcgcctatccatcttcttttttttgcaccaagcttcttgttttgcaccaagcttcttttttataatgtttttaagatttttgtttgctgcctctacctgtctgcggccgagacatagatgagaaactttttgtgatcttgttccactcataagactttgtgaatagatcactgtcaaattgagttccattatccaacactatcttaatggatatttcaaactgacaaattatgtttttcattacaaagtctacgactttcttcaaaatgatagagactaaaggttcaaatttgtccattttgtgaagaaatcaaccgcaactactgcatatttagctcttcctcgcctttttggtaatgaaaattagatctattccctaaaatgtaaagggataaggtaagttcatcatttaaagttctgttggagatgttcgagggatatgagagaatctctgacatttgtcacacttcttcatgaactcgtgagtatctttattaatagttggccagtagtatccttgtcgaattataatcttggataaacttttccatccagtatggtcctcacagaaacctttatgtatttctttgatgatgcttttggctttttctagtaatacgtggcatgaaatagcttcttcgataaagcttaccttctacgattgtataccttgggaccttgtacatgagttttttggcctcatttttattagatagaagcttccctgtcaataaatagtttattattgatgtcattcaagttggatttgcatcaattatctccacatcctggtcatccattttgacaatacttggttctttgagtttttcaatgggaaccaaattgaggttatccatcttaagctgtgaagttagcttagccaacacatcagcattagagttgtgctctcttggaactctcttgatattgtaataatcgaattttctaagtttttttgaaccttctataaatatttagccattttaatatcttttgcttgatattccccgagtacttgatttactgtcagctgagagttgttgaaataatagatttctttaacttttatgacttttggaatccttagtcctaccagtaatgcttcatactcgtccttattgttagaagcatgaaattgaaatatcaatgcatagtgaaatctaaagctctcaagagaaatcaaaatgattcatgcccccgagccactatcatttgacaagccgtctacaaaaagttttcagatcttttggtctaagtcctccccaacatttcttcaaagttaattccttctaccaaaatctactaaagcttgcccttttatggttgctcgtggatggtatgagattcaaattgttccacttcaattaaccatttcattagtcatatcgaagcatctggttttgaaaggacttacgttagtggttgataagttaggactttaattgggcatgcctaaatatatggttacaatcttcttgaggcattgactaggtttagcgcgagtttttcaagttgtggatatcttgtttctaccccccacatttcatgttattttcacacgtgggaataataatgagtaactgtctaaaattaaattatacacttaataactgttacttttgatcttatctttgaatgattattaactgggtcatctttctgtttaatacttgtgcttctcgcaaataatatgaatgaattggtccttcttattggttgctaaaaaagtgagcttcaactgatagaatcctctccttgtaagtgagctttcttaaattgtatctcttgtgcttcttgagatgaaatcattccacctcccagtcaacttggtcttcctcttgtcgtttatttcatttaacatgagtctttggaactcacatctcattagtgtttccagagcaggttattgtgtgggtctaaggttttgcttacctaccattcttatgatcaatatttttaacttaccctcaaggcgtaaggcaagacttaaattctaaattatataggtattttcaaagacaaattaaatagcacgttatttcttttaacatgtgatcctacttatcttcgagttcctgtacacatgttacagccatatttactgctcgaattatgggcataacaatagattgaacctcactatttcaatgaccattaagaaggacaaattcatccatgttatttgcaagaaacacaagtattgaacagaaagacggctcagtcaagaattgttcaaagataaaatcaagattagcagttattaagtgtattattcaattttagacggttactcattgttactctcacatgttaaaataacatgaaacgtggggaatgtctacgttttatgaactgtcattaagataagatcaaaaagaataactgacattgaagatccttataaatagttgcatcaatcattgcaaaagcgacgacctattctttccttacaaaaagaatattcactaagttatttcttgtaaacagaaaactcagaaagaagagtgacttgtggagtatataaattataactacaaaaccacgtaaaaattcattgtcctgatagatatacaattaatttccttactttatttattatagattcattaattgtcaagagtctcatttaggttaatgaaattctaagttgagagttacagttccatctcagaatgtaactcctctaatgttacaactatgtgttattacacttaatatatgatgtaatatttcttatgtcacaaaatgtgtaatttacatcatatatatatatattattcacttaataatatattttatatcacaattttatttcataaataatataatattctctcactagattaaaatttgtgatacctcattgtaacacttatttaatcaatcaaataatatctcatttatccctcacttttacagaataaatcaacactcttataaagttcttactcaaatgcgtaactgtaatcatcacgaattttattaaaaatttggttgacaaagcattaaaccaacttttctttataataaaatgatgatggcacacacaaacctttgttaggttcgcccaatacctcatgtctcattttgcatcgttaatggccttgtgcacattctatttgttgacctttatgagaaaatacactcccaattctcagttagggcagcaccacccttaggtcaacataggttgaattttaacagtatttgttactaaattgttttccaaactgaattctattaaggactttaaaaagtctaaccctcgtattggcaactcactaggtacttcacacatttgtatgatgagacaattagtacgtattacatttgttcacatattgatttgttcttacgtattgaacctaacactagtaaaattagtatcaagataggttaccctcaattgtgaacaactttagagagtttcaatcccatctcttcagaagtctttttcactaaatttctaattagtggcttcgtaaacagatctatcatgttttcacttgatctcacataagatattgagataactgctctttgaatcaactatctcacatatccatgtcttagactaatttgtctagacttcccattgtataccttccactatacactctagccaacgttgcttggctatcacaatgtatcaaaattgtagatacattctctttgattattggtatctcaactaaaacatctctcaaccatccaccctcctttctagtggttgttaaagctataaactttgcttctattgtagaatgagaaattcaagtttgtttcttggacccttaagaaactgcccctccataaagggtaaatacccaacctattatgcataaattatccccaaggttagctatccaacttgcatcagtataaacttccaaaagtgaaggaaattttgagtagtgaaggcataggtttttggttttatttagatagcccaaaactttccatattgccttcctatgatccacactcggattacttgtaaacctactaagtttactcaccacaaatgatatatcggccttgtatattgtgaaacatacataaagctccctatagcacttgtatactccaactgagtcactgctctaccactatgtttaactaatggtttattatgatcaaatagtgtgttggcctctttagcctttagatggataaatttattcaacgctttctcaatatagtttgctttccctaaagcaaagccccactatgccttaaatagtatccatttctccaagttctttgattttaatggttgaagaaagaaacctcttagtttcttctattcctttcatgttacaactaaagattaacatgtcatccacatatagacaaaaaattatcacataatttttacaagtatttgaatataaacacctatctctattgttatgcctaaagcaatttgaaagaacaacattgtcaaactttacatgccattattttagggcttgttttaatccatataaagatttttcttcaacttacacactttatgtttattatttagtaggaaaaatccctcgcgttgttctatatagacctcctcatcaaggtcaccatttaagaatgtcattttgatatccatttgatgaacatataagttgtgtaatgaagccaaatcaaacaatactttcatggttgttattctagcaacaggagcataagtatcaaaataatcaataccctctttttgcctaaaacctttagctactagcctagctttaaatgtttttatggtgccatcagtgtggtatttctttttaaatacccacttacaccctattgctttggatctttgtggaagatccaccaaatcatcatcgactgcttctttccaaaatacactatctctaaattacatggcttctaagaaagtcttaggatcatctttaataagaactattaaagcaactctccttattacttcttttctacttccttttaccatgtagaaagaaattctttgagaatctacatcatcctcatttagaattttgtcttttttcaccctttgacatctcttaggttcaatgggttgttctacaactttaggagtattctcctcttcagattgccttttagaagtagaagcttgagaattattttcatagaaaatattctcacctagagatgttgagccttgagggttgtccccatacaacttattctcaaaaaattctacttctctaggttcaatcacaatattggattacacatccaatagcctatatgtcttatgattgttggcataaccaacaaatacacattttatggcccttaaacccaacttggttctatatggtttggtcttcttgcaataagaagatacccccacactttgaagtaaccaatataattggcttccttcccctacataacttatatgaaaacatgtcaggcttcttcatgtgtattctattaattatatggcacacgattaagagtgcctcctcccataatttagatttttactttgagtatacaatcatataatttaccattttaagaaatattctattcttttttttttttttggctacaccattttattgtggtatatgtggtaccgaacactcatgaattttactatttttctcacaaaaatagataaattattagagaagtacgcacctcctctatcacttctcaacacttttattctcttgttgagttgatttttaacctccacttgaaaaatcttcaaagtatgaaagacttcatcctttttctttagcaaatacacataagtatatctattataatcagcaataaaagttgtaaaatacattttaccacctctagttagaattcctttcaattcacataaatcataatgaattaaatctagcaaattagaacttctaacaacacttgaaaaatgtttttttttaatcatttttgcttctacatgtgtttcacatttactataattttttatgtcacattcaatcatgccacaaattttaactcttttatagtagaattacctatgtgagataatctaagatgccataaaaataaagaatcattctcaatcatataagttgatgtaaaagctttattattgctaacattgaaaggtacatcattagtgtacaatttcaccattctctcacaagagtatcctttgcctacaaatacaatagacttggtaagtatgagcttaccggacgcataaatgaccttagtgcctatttttctaagtaagtcaccactaatcaagtttctatttatgtcgagcacatgaagcacattcactagtgtgactttcttactggaggtgagaaacgcatcaatggtaccttttcatagtatctttgatttgacttcattgtccatttgtatctcatggttaccctttgtctcttcaaaggacttgaataatgatttggcatatgtgatatgaacggtaacacatgtatcatatcgccatcccttcactttcccttgcatataattcacctcactaagagcagcaatgaaatccttctcgatagcattcactttgggtcttatcaagtcttttttatgcttacaatggttagcatagtatctacttttgccacagacaaaacatggaccttttctacctttgaattggttaggattaggctttggactcaagtttttactcttttcccttttttcattgttcttattaggaactttacaaattgcatttactttggaagtctctccattagacccctccataagcttatcccaacatatcaattcctcctctattcgaatatatttttggatttcttccaaagaataattctcatttttaggaaggattctcttcctataaatcttccaagatgatcataatttttctactattgcaccaacttggaacgcctcccgaatttaaatttttagcacttttaatttgttaataattacttacaattcatgaagtgcgggtagaagaggtttaccatcaagaaatttccaataaaaaatttcttagtacctttctcctcaaccttgaacttcttttcaaggtgatttcaaatttccttggcatctttagtgtcgctgcataggttgtagagcctatctgagagtgagttgaggataggtcctctacaaagaagattgtcatcttctctcttctttctttgtgctttcatcacatcgatgtccttgtcagtaggtgcaagcaaaggctccaaggtggactcaagaatgtagtcggtctttattgtggttataaggaacctcactttatcttgccaccaaggaaaattggtgccatcaaaatggtccaaccttaccaagtcttggttcatcatcttgatagtctctccttccattggaaactaagataagttttttgaatgttagaaaatatagagttcaattaaagaataataataataaaaagaaaattacaactcttatccaaaatattacaatgactaaaaaaataaaataaaataaaacttacaatcccaaagcacaaagttacaagtaaatagaaaagatgagaagaggataagagtaacaactcaaagcaagaacacaaaaataaatgtaaagtaatatgagaatatgtataatagattatatatatatatgatatataagaaatatgtagatatatataggagtgtatatagtagaatatatataaatatactatatagaagagatgaagaagaacccaaaatgattaaaggatgatcaccaaatagcttgaacaaggtttcaacacctttgtccaaaaaacttatttccccctctactaaatacttagggttttatggaaatgcttctgaaaattatcaagccttaaagaactctctagattagtgtttgaagataggaaagtagtgtgtcaaagagtgaaccataagaccatatttatagtgtttaggagaactaaactttgaaattaaatcacactcaccaatggcagttaccacccgtgtagaagatcttttccataatggcttcaatgaaactccattccactttgtcgaatgccttagccatgtctaattttaaggccatccaaacttttttaccactcgatttgagttttatggagtaagtaatttcttgggccacaaggatactattagagaggagacgaccttggagaaaggcactctcgttgggagaaattaatttattgatgactaattttaacctattagcgattgtttttgacatgattttgtaagagacattgcaaaggctaataggtctgaagtttttgactgtggtgggttgcttgaccttaggaataagtgtgatgagagtttgatttagcggggtgatatcactccctgcattaagggcaagaagaatagcagccaccacatcatgcttaacaaaagaccagttctttctgtagaagttggtattaaaaccatctatgctaggagctttatccattgggagttgaaagaaagctttttccacttcttcttctgtgtaggtttcctggagcatttgtatgtcatcttctgaaagagaactggcaatgccatccaaggtatgatttatgtcttcgatagtggggttcgaagacatgaacaaagtaaggaaatagtgctcaatttctttggtgatatcctcaaaggatggaacggtcgtcccatgggcactttcaagattgtggatctgattggttttctttctagaggaagcatgatggtggaagaatttagtatttctatctccttgagacggccattgggttttggctcttggcttccagtaggtctcttctttgagtaagagtctatcaagttgggactgaagggtttatattctatggatagtgttcgcatcccagcaacaacaactcttggcaaggtcaagttctttctccaagatgttgatccaatttttgaattggaaccctgacttgtggttccattcattgaggcgactgccataggtggactgggtggcaacaaggtgggagatggtgcaaggtgtatcccattgagtaacgtaagaggactcaagggccttagactaatttggatcatttaaccaaacattttcaaagagaaaacatttagttttgttgtgagagggtttagagggaacgccaatagtgtcgagcagtaaagctcgatggtcagatccaaagaaacctttgtgatgaaggcgggccttaggaaaaatattcatctagggcgcattaacaatacaccaatctaaatgctcctggatgtttttgttgtttgcattgtggttattctaggtaaagttggggcctacgagttcaaaatgggacagataaaaaagatctaaaaaatgtttgaaattgttggaaggtcccctgtcaggattgccaccaattttatcatccatagtaaggatggcattaaaatcaataatgatgatcaacaggtcaacaagattattttcacctattctatgcaaaatctttgaagtgtggattctttgagcctcattgggagagtcataaaaacaagtaaggtgaaaaggaagaaaattattaatagttgacgagacataaaaatcaaagtaattcatagaagataacaaagttaaaataacatcattgttccaaaataaaaggagaccacctgtaacaccctactagtttaggcgtgttaacataatttttaacttaaacgtgcagctcgttgctaatcaannnnnttattgaaaatcgtgaataattcaaaccttatttaactatttataattatcaaaataacatacttatatttaaccgggatctcgttttataaatatttacaaaagtttcataatgcataataaaaaagtttgttgcccagcgactatacaaaacaagctcaactgtccctaaaaccgtacgctccaagcctaaccgccnnnnnnnnnnnnatcttcatctgctcgctctcacagttgctcaaccttagctttgcccttacttacacatgcaaacaatatttgtgagtcggcagacccagtaagataagcataaataataacatagcaataacccagcatgtaataaggtgcccatacacccaaccataactgtatccccgtgtccaacacggtactgagtctagaacgttcgtacaaaaatattatcgaccataatatcaacctatacttagtaggctagtcatactatagtcgtactgatgtgatagcgtcgatcagtatctgagctaaatatacatctatcagtatccaatataattctacgtatactgataccgctatcgatgtaatctaacaggcttaataaacatgtatgctaaacacgtaaacatatatgcatatttttatactaatcttacctcgttaccaaattcaggtgcgttggccaacctgagtgaaataactgttcgatgaattacaggcccctgaatcacataattcataaaattggtaagtgacacactaaattactttttggggacttaaaattgaaaacaaaagtttttctatcgatggacaacatggtaataacctaaatattgcaaaaaaaaaaaaaaaaaaaaaaaaaaaaaaggggtcccctggtttttttttttttttttttttttttttgttttt

SEQ ID NO: 14944 - DNA, 4905 bp, Cannabis sativa
actcagattattaactaccaatctaccattaggttacgcttataattattgttgttgtataattttttttactcttctttaatttatagtgacaattaatcaattacgtatgataatagtcatagacaaggcacacagcagagtataggctacgccgcacctgaattttgcttaaaatgtaattatcatacgaaaaaaatgttaatatcttatattttatgacccactttaattatttgttaatgcatttgccccgtcaccgttgatggatcacatttttgttagtcaagactcgctctcacgagatgtaatgctagccgcttttatattatttttttaaaatttaagtcttatattttagaagaaaaaaaaaagaaactgttaaccgtttatatccatatcagttgggttgttacatggtccatctaatattttaaaaagtagaatgtgttaagctgattatacaaatatgtgtctcttcaaaaaaggaaaattatacaagtgtaaacgtttgattttgtcaaacacgagtgataaaataaggcatgctaatcagattagcgtagtcagtctttgaattattttattactacgtaattttgacttggtcaaccaactcttttggcatatttgcctaaaagagacaaattaatacgggtgagaaatggtcaaggattatgacctttggcaatatcatgatacatttccttttctaaggaaaagaaaataaaaacataataataataattagaaataaataaaacacttgggtttctgttgcaacttttatgattaaaatcacgttatgtatgtgatagggaccaaataagaaatatccaacttcttttacgtgtttgactcgatatttttgaccttaaacacattctttgtgacaatcaaatgcactatgaaaattttttaactttaaaaatagagatttagttatgccaattatgcttgttgcaaaattaaaatccaaccatacaactcccaatattgtttgatccttacatctacattaatgagatgagagaagaggtttccagaccaataatgattatacacaatcatagctggaaagtctcttaatatcacccacacatattaggtcttaaaataatagatattaatttctttccgtcctttctttcatttattagaaatccttttgagaatactttagagataaaatttacaatattaaatatcattaatcgagtacaagattcccaatacaagtatcaaaatgattggagtaccaaactcatcatggtggccgtatatgaataataatcactagacagaacaaacgcaacattgtttatgtataaacatagtaatgacaacatcgagtacagattcctttgacaaaatctgtgataaaaccttaattaaccaaagtagaaccatcttgttgtgtaaagggtattaaagttagttgtaacattatacattgacaaagccaaaaccagtatccatagtgagtaaagaagcataataaattcatttgcttctattctcatatttttaatttttttttttctttttcaaaaccatatcattgcatatgattggttactcactggtagaatgccaaccttagaaacctatggatagttacattacagagttggaaagagcatgatcaagcatgtacaaattacaaattgaactgattagtaattaatatactaacgtgacaagcgtttttcttttcttctttttttttttagcattgaattaacaacaataatactaattagagtaacaaattaataatacctctttagttgagtcagtcagctaggcatgtacaggtatggaagagctcatagatacacaacctttcaagcgttcaataatggcatttcggctgactaggctcgaatggtgagcaagaggaagaccctccttcacacactcatcatacttctccaaaaccgacacaatgtcactgaaatccggcctctttgaggggttcgcagcccaacaccgctttatcagatgagcaagagccggttgacaactagctggtagaggaggcctttcattctgtaatacataaacaatattcaatactcagttttaagcaaagtgttaaattttttatataaacacaaatcacacaagtagagtagtgtgtactaacatacaattcaataacttttcaaattgagtgaagtatgataaagttgtgtcatacctaccaagaattaaaactctgtttttgtttttgttatatgttatctcaagtaagtttgagcaacatttagttacaataaacacatcttttttcgagatttggaaaaatagctatctgaccttctcggccacagcaaatgcagcctgcacaggggtcattccttgaaaaggcagcaaggccgttgtgagttcccatagcacaatcccaaaactataaacatcaacttttctggtgtaaggcttctccttaatcatttctggcgccatccaacggtatgttcccatgttacctttggtctcctgacactgtgtttctagacatgaagtaccaaaatctgccaccttaactctcatatcatcatttagaagtaaattgtttgattttaagtccctgtggattacaccttgagagtgaaggtactccattcctcgagatatgtcaagagctaaccttagaattgtttctgttgagagtgaataaggctccttcttgttcaggtacatcctcagtgttccttgtgacatgtattctgtgataatacagtacacagggggttttctacaagctgcaataaactgcaatacgagacaaaaattaattaaaatggtcaatgaagaacaccacattcaagtttcacaaagcattccaaattctgacaatctttaattaccaatgcatattaacaataggaataaagtcaaaaacctgttttatttgttggttgattcctatttcaaacaaaacagagaagaatccaaaagaaaataaaaaaaaaaagaacttcaatcagaattgtttagacttctaaatcttgattgtgtttgtttggttgtgtgagttaaaccaattaagaactaagtaggggggaaacaatgtgagtggggtaactatgtctaatatgtgatgatcaaaattagccccttgcgatagagacaccaaaatataataatgggactaatcagcaaacatttacaatcaaacagttatacagtgtgcaaacaaaatcttatttgtatgtcatatataataaaaaaaaatatttttgttgtttgcccactaacgtaagtgggaaaataatcaaggaagcactagttaaaatttggaaagaatccaaaagggttacctgcactatgtttggatgaaagagacgtgagaggaaggcgacctcagacttaaattgctgctcaagtaaggttcttgtttcctcattctggtttggaatccttaccattttcacagcaacggctctctgcttgtaaattcctcgatagattctactatgggctcctgaagcgaatttgttaccaatgaagagttgggaaagatcagcagtccactcctcctcttggtcctcctttgatggctcccaagtttctacattttctgaatccaatatcatggaccatgactctaagctgtcaaatctctttctctccaaagtctccatatctgaacttgcttgggtttttgaggaggaagggactggtaaaggtttgctctttgactttctaatacggagtgcatgaaaacacgaggacgccattacagcttgctctcttcaaaggccaaaaggatatggaagggaatcttataataatattatcaaaaaccaaacaatcaaaaggaaccctccttctgaatgtgtgaatcgatttcaggaagtgcatgaactgattcaaaaacatgagttccgaagaagaatggaaaagaaatatggggtttcatgaatttaacgaaacagacgctgaacctgattaaacccatcgagagttaggtgaaagaagagccaaactaacattttctcatgtcataatacacataattaagaagcagaacagcccttttgagtatcaaagcagaagaaacaagttagtgatgaagaacaacttcatgacgaatagaagaaaactcatgcagatggagatcatggtttcgtgaaacgagggaggcaaaacgaaagaacagaatccatggaaatccagagtttcttgaataaagggagcagaagagagagttttttcagggctggtgtttctgataggatcaggaggattaggttgtttggcagtagaaaaagatgaactcaaaggaaagagatttcaggagaggctcgtgattgctcggttcaaaaaggcaaaaccttttttacgagagagagagagagagagagagagaggagaggtgacttttttcttggccatatgcagctcccactgatttctgttccaggatccttttaggatcatcaatgctaagtgggcacagtggcaaaggcttcttcacagattattatgctatctatctatcctttacaaactttgggttccattgtaccccatcatcttttaacggtaatgccactcttttttgtactcaaaattatgaaataaaaaaaagaaagaaaaatagaagaactcaactacaagtggcatgcatacgcgggaccatacaatacaactagatgaaaagcggcgaatcaatcacctaaccatgtgtgttttcatgatatttttcaacttattgcataatggacaattacacaatttttttaatcaaatattttttatatagttttttgtggtattgggtttggtacttacttttagttcatgggattaatttttatctttgtctattattttagagggtgaaaaagatgcatcacaagtggactatagttagtagttggcctcaaacacggt

SEQ ID NO: 14945 - DNA, 4628 bp, Cannabis sativa
tgataaataatttaataattaataaattgaattatttaacaaagaagacacattcatttctaaaacaaaaagacaaaaaagacacatttatataaatatttattgtatataattaatgacacttatttttataatactgatatgtgatatttctcattgctatcagccgacgttctagagtagtatgcaatagagtgtcacattagctctaacaaataataaattaaggtcttaatttattataaagtataaataaggaggatatttattagatcctatatgtatataaacatttataaaagtctttttttttctttcaatttttaatctattattattgttttatttttcttcaataaataagatcaaattcagaaaggaatggtaaataaaatctaaaatgaaaaggaataatatagctccaaaattgagatgaaagacaaagttccaatatagcttttttatgtgtctattgtaatttatagaggtcaaacgaggcatactcaattattggaatattaattgacatacatcacatgtgtagttgttacaaaatagatcatataattaaattacattactagttttaattttgatattgactttcaattattttgtttcgtaaaattagccttagccaattatttttcttctcaatatatacatatcatcaggttatatattgactctactaatatgtccatcgatttttcttgtcaatatatatacgcagaaacttcaaagtccatttacaaaaacaaactctcacatcaatcgttttttttaatatttcaagattacgacattttctttattaattgtcacccattatatttatcatcaaattctatacaattgatgagagagaaaccaattattaaaacacacataaattaaaaaattataattaattctctttaattatttataatttgctccacataataattaattgatgtctgtctgtacgcgcgtataatttaatatacgtatatttgtacaagtaattacgtattgttaataaactattaataaaagcatataattaaattaatatttttacagaaataaaatcatataaatatataaattataaattaaaggacacaaaaataagtcatgtgttaaaataatgtatcaaaacattctcaacaaacaggaagaatacaaaacacgtacagtagaatggatggccattttattatataaatgatagtaataaagatatgtatttaatgttcaaattaataataaagtataaacaaacatattatgtaatattaatattagaggtatctgtagtccccttttctgactgtataattaataaatttcgttctatgaaagtgcgcactagttacgtgtgtcccaaaagaaatttccaacgtttatttaattttacaaataagtgaatttaaaaggaaaacctattgttctaatggttatttctgtaaattttagtgcaatcttttaatatttttttcctagaaaataaaatcctatttttcaacttgttttttttttaataaataaacaaaaattgagagaataaaatcacatgtaatatatttaattaagatatcaagtatatgggttaattaagttcgtattgatcataatagaaattaagtaattaatggtgtaagcaatgacatcataatattggactgtttaaatattaataaaggacttttcaatacacaatctacaacaatatctgaactgaatgcatggttaaaggttttgaggacctgaaataatattttattaatatgtaacgctgtgtgaataattaaatttatttttttattttttttggaaggaacaactttttgttttgcagcttaattaattactcatattgtctttcaattagcgtagtgtgaaacagatatcttttgtggtatattataatattatacttactgatatgtaattctatttctatgtttattcaaaaggtttaaggttatacaattctctctaaacaaaaaggttaaacaattcatttatttaactatttgcatttcgtttattagttaccaacatctgtatttcaatcatattatatttagctaattatattcagctgtatatttgtgtggatgcatgttttgagttttaaattaattattagctctaacaataaacttgtttaaaacaagttgttatataatatctaattaaactagtttaattattccaaatcggttttgtgtgagtactgcttgtcaatataaatctttgtatatatgtttaaattatattaaatatgaatatattttttttctaaaacattataatttacattttaactctaaatatctctcttatctttttgttagagttagtcccatatttgtgacttttcggccaatgtgtgtcagtttttaatgttggagtctttgatctattttaaaatttacaaatttttcgatgtgtacacctacaaaaatttctcaatttggcattgtagtattctttcaaatgtcacgtttattcgttttacccatgcacactttccaaacccaaatatgagaatggtgtattagagttaatctaatattgctaagtagtgaaaacaaattgtcatattaagatgaatgaactattcctctcattgccaattgattttgagatgtaacctcattctttttagcatctttcattccaaattctaacaatttatgtcttatattaattgtgtcttttttaacgctgcatattaaatttaaactcacatatttaaaagaatatatttatatttcaatttttttttatccaattcacatattttaaaacaattagaaaaaatatttatgttacttaaaaaattactattgtaacgccgctaccttttacagttacaagaaaaatatttttttaattattattataaaattaaataaaaaaaatatatgatatttttttaaaaaaataaaaaaaattataaaattaaaagtattacggctaaactaaaattataattaataataaattttgaatattattatattttatatgtatcacttaaattaaatattttttgattaaaaaatgatgttgttttctgaataagataaaaaaactaattatacaactaaaaaatatacataactaaaataaaaattaagaatataactaagtatatgtgtattacatgtagtattatcatatttatattaaatatatgatatgactatatgataaaaagtgttattttttaaaaactttaaaattaaaatttaaacccactacaaatatctctcttattttttatcttatgttaaatgtgactatataacataaaggggttttctttttttttaatattgcaattaaaatttaaacacatcacacatatctaaaaatatatttccattgtcatatatttttcactcaatccacatatctaaataaatatctttctattattgttttatttttttttaaataaaataataaaataaaaaagtgtttatgtttctcacagaatcactattacaacgatgttacctattgtagttatcaaaaaaattatctttctaatttctattattattttttttaaaaaaaaaaaaaaactatatgatattcctaaaaaagttaaaaatattctaaaattaaaagtattatggtgaaattaaaattataattaatattttttttgaatattatattgtcttcttttataaataacatttaaattataaataatagaaaatatcttctctctcctggtgcatatccacggcgaagaacctcttcgatactcacaggcgagttgaacctgctgcgaccaacgacaacaacctgctgctgcgagtcgagaaccttccaccgatcacgtcggccgacgtcgccgatcatgggcaccgtatgagattggttcagttccgtcacctgctactgtgatcgtgtttttgtttttatgagattggttcggttctgtcaataaagaagtaacgcgcattcagaaaatatcttctttagttcttgttttcactttttaattcacttttattagtttagttcaatttagtgttttatggggttagaattataaggagttcattattaattgatttatatgctgtgatcgtgtttatgtgttggaactaattaagttttcctattagtcttgtcttttgacatggttctttagtctttccctttagttttttctggttccattcttgttggttcttgtttccttttcgagattctgctggttgaggtacgattatggaatacggtacaggggtgcataacaagaggggcactttggcatgggtacttgtgtagctcggaatcatcgtggtgctatggtaagagcaatcaagaagggaaagattggttgtgttcaacccgaaattcttgagataataggcattaaagaagttttgagttggattgcaactcattcgtgggatagagtcatgttggaaacaaatagcttggtgtgtccaagcgattcagagcggtatttttataccttcacaatttggtcttattgtaattcaagatgttcgacatggccggccatgatggtgtgcaaggtgggctactgcacagggcccaaaaaaataaagggcccaatatattttttttttaatgcccaatatttt

SEQ ID NO: 14946 - DNA, 9298 bp, Cannabis sativa
aactattctataaaagtctcagttttgtttcattaaataaaatatcttggtgaaaattgtggtgcaggaggttggatgtaaccatgcacagagtgttgggttttcaactgatggttttgcaacaacaaccaccatgagaaaaatgcatctcatatgggttactgctcgaatgcacattgaaatctataaataccctgcttggtaggttctctttttcgatactcccagttgatttctgattttaactgtgattctaacatgtcagcatgtgtggcaggagtgatgtggttgaaatagaaacatggtgccaaagtgaaggtagaattggaactagacgtgattggatactcaaggactacgccactggtgaagtcattggaagagcaacaaggtgcttatcatgccatcattttgtacttcctataaaatgcaaacatgaatcattaggttcagtaatttaacgattaagaaaaataacatatttaaaacatttaattcatgcccaaataaaagtgaaaaaaattaaatcaaaacttgcctttttttcctcttccaattattgaatatgggggtggaatttattaatacatttatttagattatgtctaaatgcaaacataatttaattggaaaaatagtttcttgctctttccaatttccaaacaatatattttctaatagttggtagtaggtgccttggaggttgaattgtacgaagttgtaggaattaatgcttcaactaatcccttgtggctttgaaaagttgcaatgttcttccttgtaaatgtaaatgtagctgtagtatctacagttgtagctagaaataatggcttaaaagggtacccttagttttcatctgattgttactctaacaataatgtgattttgagtatggagtttgttctcttatcaaggattcatactctttgactacgattaattttgagtctctggcagctgatatttattgtaacctgaaggtcctacactattatatcttttgtaatcactttccactataattacttgattggaaataattaataaccattgaattatactaactgatgaaaatgacgctttctaggccatttaactatgccagtctcgctgcttgaagaatttttggctgcagtctcttgtgattttgttagtcttaatttttgaccttagttgaactattttgacatttcttcaactgatattactttttgatcaatttatcttggttcctattctatgcatgtctcatctttcaaattgcagtttgagaactgattgtatgtaactatgtatgtatgttttcagcaagtgggtgatgatgaatgaagacaccagacgacttcagaaagtgagcgatgacgttcgagatgaatacttagtattttgtcctcgagaacttaggttggttctgtttcttattcactagtactggatgtctgctgagttcatgtttgttaagttttatatggttatatcttgttgtgtagacagaatcatttgcttgtatttgcaatagcttaacaggaatagaccggtattaattggtatgtctttgtatttatagattagcgttcccggaggagaacaatagcagcttacggaaaataccaaaactggaagatccggctgagtatcacacgaaggggcttgtggtaagattcctaaacttgtctaaaacagtattctaatctcttatgtgttctcaacatgcttttgaatttgttggcagccccgcagagctgatttcgacatgaatcagcatgttaataatgtaacatacattggttgggtccttgaggttagtatctattttcggtgtgtttcagtttttaccttttccttctttttgttagagaacacctagctgacatcaatatgttgtgtctccatggcagagcatacctcaagaaaccattgatagccatgaattgcagtctatcactttagattatagacgggaatgtcaacacgacgacatagttgaatcccttacaagcgtggaagcgattgaggaaagggattcaatccattctcttaacggaatcacaaatggtttcgctgcatcagctggaaataaacaacaagactgcaagcagtttctgcatttactgagattgtcaggcgacggtcttgaaataaaccgagggcgaaccgagtggagaaagaagtgtccaagataatgaaataattctactactcagtcagctccctccttccctagtcttattatctttggtttcatcagcctcccatatgaacaataaaaatataggctttttttttcttatcttatttttgggattttgctttcaagttgtggtttgtttgtttccattaggagttaggtttatcaagtttttgtcctcttactgatatagagatcatcagttgtgaaggcagaagatagagtgagaaagagaaataatttgatataccactcaaaaactcaaactggatgaaaataataataataattattattggttttgttataatgtttaattaataggtgaaaggtctgaactttgtttctgtagctgttccaaatctttgtgtggaatttatacatgaagcttgtgaatcttatcatatcaaatgcattcaattatgctcttttcttcacttgttttcttatactacatgtccatgaaaacagggcttatctttcgaggtaatgaaatcgaatagaatcaaaaaggaaataattttttttttgtttggttgcattttaagtattgaatatcattctaatggaatggttttttcaccatttagtagaatgattatacattttaaattttattttattcttattctcatgttgacttttatttttatttttctcaactaaaccgtcaccttacttttaatttttatttgaagaggtttttggctagggatattttagtcattttttttatataagcgtttatatattatattatataatttggtactcgaatttaggacctctaacacacacacattctcctatagccacttaaattagctttaagggattgctttgttagtgattcggcttataggtttgtatagtttggttgttgtggtatggtttgcttgacttgagaaaggtcctctatttacattagtgaccacatacgcaagtaatttaacacataatttttagttagagtgatttgggttaacccaccttaattactcggccaaataaattaatttattaaaaatatattattgaaaaatattaatgtacagaaaatagcctttaaataggctgaaagcaaggaaatacaaaccgactaaaaaaagctacggaaaatacatttattattctagttgaaaaacagccttttaattaaaaattaaaaattaaataagtattgaaatcaatacaaaatgatatgtgaaaaaaatattaagattaatttttaaaaattattttaagcttaattttttaaaagattagagtgtacttatggggtggaaataaaactttgttaaaggaaattttatttgcaatccatacaattgacgtaaattaatttttaaaaattacttttaatattaattttttttttcacgttattttcattaaatatttttagttttttttttaataatttaatagttttattttattttcacatttttcaaatcaacttttttttaataaaattttatatatatttttttgccttaatatttgaaatatattttattttttataagtacattttttaagaatataacaatgacgaaaaaaaaaagtatttttatataaaataaaaattattaaaataaagtatacttataaatttatgtggtgtaaataaaactccctttattcctttagtgccaaaaagaatacttattttaccctctactttatttatattttaaaaatattaaataaacatttactttttattgtatcttaacaaattttgaatatataatagtaaattttattgtcatagtctaatgattacacttcaaaagatcttagtttggatctcctctaaatataaaacaaaataaaaaaaatttaaattatcaataaattacgggtaataaattagttaaaaaaaagaataggggtggtaatattaatggtcgtattcgtgtcttattgagacttatatataacaagtatatgtttgatttgaacacgatctgtttaataatcatgtcagaaaataaaatccgaacacgacccatttataaacgagttggcacaatacaacccgtgtaacctgtttataaacatagcttgtttaaacatgtcaaccataacacgtttatgacatattcaacacgtttataactcatttatgatcgattaaagtattaaaataattttaaataagtcattaacaggtcaattttatttcaaccgtgttaactcaaacacgacttgtttaaataaatgtgttagacgagtcaactcgaatacaaatgcgacttgtttattaaacgggttagacaaatcaatccaaacacaacccaaactcatttaaagcaaacctaaacctgttaactttcgtacaaattttaaatcgtgttattgtgtctgacctattttacagaccctgaaagaatggtaatagaaaagaaccatcccttccctatgcccaaatagttgcattgcgttacgtgttcatggaatttagggaattattatgaagccttttaagattgttatgtaccttctaacctccaaaaccactgccctgctcctctatctacatattttataatctatcaaataataacgtgtacttcatctctctgatcaatccattttggggagccatgaatttaattaatcaaaataattactaattttcctcacactaacatcatcagaacaaccttagaagaaatcccattaaagataaatctgtatatgtagctgttaacagtctctttggtccccccaaaactacactatatataatgagtcttaatgtactctctttactccataacatagaaaagtacttcaagttgcaatgaagagaatcactaaggctttgttcactttgacactgcttgtgtcgttcatggtccgcattgaaggaggaagagacttgccaactaaaggagagtcctctcccgacatcaatagtccacagcgcaccttaggtcttttcggcccaggctgggtcctcggtggtctgtttccatggattggtttgggactgggagccctcattcctatactcgaagtcccttggctgctccgacacagtggatatggagggcagcacccacggaaaaatcatgatgtgatcgacgggacaaaagagtactaccctcctaaaggtgatactctggttagccaatctccctaaactaagtgtgttttgtgttataaataagaagtgcctgaatggctttatgcttgtgttaagataaatcatgtatggctattgccatgtaaaaaaaaggctttaaataaatgtgttccactatttattcctctctttacattacactgctctagttcatattagtcttgaaaaccaaactatatagaagaactaattaattggcagactcattaatatttggccaatcttatcatattcatttaggcattgctacttttaaactgaactacagaagacactgttccttccataagagaaaacttctagtcatagaatgacagttcaatatgctacagaatgttttaagataacgataaaatgtatagaaaataaattttgctgagacgccaaaacaatcctttcgatctcctaaccccaaagcactccgattaatcctcctgtaacagtacaagacaagcacagcttatggacctatacaagaactaccaaacataagacattaaatgacaatgtttactatgcatggcgtcgagggccataatgacacgccgcttaacacccacaattcctaagatccactaacttatgttctattacactgcccgaaatggaattgatgaaatactgtattaaaaaacttacacagtcaaattttcataagagcagaacaatcaactagccgcaggaaggaacactctaatgagttcttttgaagtaactcttttcctacaagtagggcatttaccctgtgctgcaattgcagccttaatgcatgccttgcagaaaatatgaccacatttggtggacatttcctcaaccaaatgacccatgcaaattgggcagctaaaagtgggctcctttggtggtggaggtggcttcgggacaacttcactctgcaaataaagaatgttaagttcagtctaactttataatagttacgacttttagagattattaggaagctccatgaattcagactctagtaaacaatcacaatgaaaaatgtatgatgtagaatatatatttgtgaaagaagcaggtgctcccttgaaatagtgtagcacttcatacacatacttgaaatatgaagcatctcaacaattaaagaacaatcaacttgtgtgatcagacaagtgagccttaactaacagtaatgtaagttagcattacgattatggtctatttttgtgagttaacaatccaatatccttggcaatgaagcatttcaggaagaacaggttccatatggcatcatcataaacaagtatttgtattaactacatagaaacatcactcagcaagtgctagttagaaatcttaaccatttactgaaaccagaccaacaattatttaaaacaagagtgaattcattttactgtaaaacccctgtaagatcaaacaagatgatgaagatttacagccattatcattaccgcggagtttgcactgctttccaaatttatgtaaaaatcacaattaatgatagtctgatttggtgcagttcttctgcgcttgttaatgtgagtaatcctattccactcttctgcaatgaaagaaaagaaaagaacgtgaggagaaagagaatatgggatataaatctcaattgaaaggccaaattcatcaatgtcttcaccaaagcttagcccttaatctaaaaaagacacacttatcattttccgcaacataaaccacagtttctcaccctcatttcagacacaaacagagcccaatcgtttcaacttttcatttccatcaaagaaagaatgagaataaaacatacaagcagatacctaaaaatattatagaacttttacagaagactaaattattaagagaataacagcaaacaaaaaaaaaaggattacctgattccacatcaacaacagtcatgccagtgatcccacgattccttctattgtttttagcctaaaacaatacacgacaagtaaatggcttaagctacacctacaataacaataacaacaaaaatattagcaacgaactacttcataccgcagcaaatgccctcggcgaagattcaatgacatcatcatcaattgcctcaacatcaattgtggttataggaatggagtttccttgtggtctagattgtgattcctgacttctcacttgagttgatgtgccctcctgaccccaaatatcacctggtggtgcactattaaggtctaagtccaatgccgccttccttcgcctgtacccccttagattcaaccccctgctgctctgtgtgctcataactatgaacctttatctaccaaagattatgcctgagtttaaaaaaaaaaaaaaagatatcaaaatttctattggaacaaaacaaaatatgtttatagcgagattaacacatttatgaaggaactaactctacaaacataacttcttatacataaattgtaagaactacaaaacatgttaaagaaattaatataatgtaaacaaagaaaattcatcaagtgtaagaaaatcaactgaacttttctagttcctaagtgtaagaaaatcagaaaaacaaaaaagggtttgatgatcaagtaaaaccactaaaaagaagaaaaaaaaatcatcatttcaaaacaccttgtgccaaaatcatttgagaatcgaatactatcacagttgcaaatactcattgaataataacctcgggaaaattttaatcttaaaattctggaaataaagaagcaaaattcaaaccctaataaaccaaattacaatttattttttcaaaaaaaaaaatcatcaacaatgatcagaaacgaaaaaggggaaatcaacaaaacagaaatcagagagggatcttaaaaccctagacaatcatcaacgatcgaacacaatttttattttattttttctaataattccgataaattgaaaccacataaaagaaaaataaacaaataaaaatttgaaaaggcttgacctttatgtatgggatgagaattgaatcgaaatgtcgatgcagtttctccaaatttttccccaaatgaaagtaggtcaaggacagaagattaaagataaatatatgtatagagacaaaaattaacagagttcaaaaatccaaaaataagaagaagaagaagaagaaatgaagtagtttcagggatatataagaacacaccgatgaaaggcagaagaggactcactttgggtctctgacgcacgtgtcagtcatagcccaaaccggcccacttccatcgcacgtgtgagttgcccgttataattttgtttggtgaaaaatatttttttaaaaaaaatcaaagaaaaaatacatcatatactattttttttaattttcttttttaaatttatggtttgagttgttctactagtttctccagtaattttgatgtgaattgctaaatagattttaattgcgatttaagttgctctgttagtttctatgtatttctatataaaaacctcaattttaaatttatttattatttttttttataataaagcgtttataaaatagaaagagttagacctcctagtcattacaaaagataaagtcagttatagaggagggttctaccatacccgaaacattctgagcaaaagtctacttagtcacattatgggccgcaaaattacaacatctggaaataaacgagaaattacagcataaaaatatttagagggttatcaatgttccaaatagagtagattcttttcaacgctttgataatttttttcgaatcactctcaactaagacaaaacagtgcttcatcaaagcaacagaatccaatgctaaccgacacgctccagcttcgccaatcaaattaaatttgccgccaaactttcatgtacgtacaattaaactttacatattagattaaaggtaatttgtcgtcaaactttcatgtttcaatttgtatataattaatcttttaattctttttccttttaacttaacatttgtttgtaaatctca

SEQ ID NO: 14947 - DNA, 11661 bp, Cannabis sativa
ggctgttcaataatggaactgacgagaatgaaagcataaaaggtgagtgaagaaagcaaagcataaaactgaaacacaacagtaaacgacaatgtactaatcatatctatatctaatatctatgacttgcatggcaaaggtttggtttgaaagaaattttgtggttatagcctatacatcaaactctcaataattataatcccaaaacttcgatgtttattgagagagcaaaacgggtgaaaagttgcacaatagatctaacttttaaaaagatccaaaactatccaagagggtgctactgttgcttgcactcgagagggcgctcaccttgtggaccatccaaagctatagtggcctaccacttttctgcaggcatacgaaaacaatgcaaattagtgtaatgcagctgcagtttcaaaaggggcatcaaagcaaattattatcttgtggggtcaaggatccagcatatgacttcaattatcaacaattttaattgaattggaatgtttttattgtaatgtagaatttgaatgaatatgataaatgatgttaaattggattgaaagttgaaactataccttcttcctgcccttgtgttcctattcatcctcatcttcatcttcatcttcatcttcatcttcatcttcatcctcatcctcgttctcattctggtcgctaaattcatcatcatcatcgtactcttccatatcttcaaagtcttccccttcaacagcctccccagtaaaccatgaaacagcatgtggaatgatcttgtctcgaattgtagaactgtaaatgacacacagaaatatagctctccaacattcataaaatgtaaatagcaacaatgtaagcaggtttgactattgactttggattttaaacatcttgggacatgttagctcatgatgtatcttcaatgtttttaagtttaaaaacctagtgtttaatgaaatagaggaccaactatatcgttcaaaactgcaaccttgccctgttccaaataactggtcctaaactcaaattcatacaagacacctaacttactgttttactcaattctaaagcctaagtgattgttaacaaatacttaaaaataaagatccaccacctaaggcaaaaaagatagcacaggattacccaatatcatagtcctgctccatttgactctggagttcatcagcctgccaatacatgcatcaaataaaacaagaaactaactgatgtaaatgctaaactagctaatggatcattcaattcacttgtgaatcttaaatgaagtcaaacttactgcatcttcatcaatatccacatcatccttagggatcggaggagggctgaaaaaattgaagaagctggaacaattttcagttttggtgatggggttggcattttttgatccattctttcttggcttcttcttcaaaatcttctgagtcaaacatttcccaggataccattcaatttcagtcctacaaggcaacccaatataagaagttgagagaaattacaatacaatttcactccacagcaactgaaaacacatttgatttacccaattgcattttctatgataggctcatcgtcctcagccatgtgatatgtctttgtcagaacagagtttttgaagtaaggattggtatcaaagaagaaatccagcttgaatcctttgggatttttagtcataatcaacttaatatccttgagatatttaagagcaccctcatcacgctctgtaatctgtgttagtgaaacagtaaatcatactcgaatcaatttagcaaatgaacaaataaaatgccatcaaagtttgtttacctcctcagccaatatttcatgagctttcattgcattaagccaaaattcaggcactcctttatctgcagttcaagtgttgtttcataagaaattcaagggtcattattaacccaagtcaataaaacaatgattcttcaatgtacacaccttcactggctttgtctccatgattaactccatcgacttcaactataccattaacaatctcatacctctgcaatcaatagttgaattaagcaaaaatgttaaaaaaggtcaagcacagactaagtataaatgcaaaactccagtttgtaaagcttcatatcactaaagatgtcatgtcaaactatatctattgcaacacctcaaattactaaaatgaatactgtgaatttgattaaagaagaaccgcatggctaataaatcttacaaaccttagtgtaaaggggttgataaagttcatggtatttagatgccagtgaggctctctcctcaaaaaatttggcttccaactcatcatgttggtcctgaaaattatcaaagtttaaggtcaatcagtaatcatacgacatgcaaagtgtaattagtattagagaacacgaaaacacataatatataattttgttaacattaaaaagcaaagaacctgaatctttctaagtaattcaacacgcttccgaatcttaggggacaaagtttccataatatctgaatggttagcagtcaaattgcgaagcttactctgcatatataatatagaacacaaaatcaaaaccacaagtaagagaaggtgaaaagtactgatcatgatcggtgtcggaccccataatcaacacgaaataaaaaaggtaagaactcactttgagagcgttaacaagaccaacacggtcctccgcagtaagagctatacatgaagaagagaccaaataaacaaaacaaaggcagttaagttattatgagatacgacaatgaattattgtttctactcttctattatatatagacacagagacagagggagacgatcgagtgtaaaaatagggtggtgtggttgtggtgttaccagcggcggcagcggggagtgaggcctcaagatcggacataccgaagtcagccttgttgttgttggtgctgctgctcttcatttgtttagagagtaatctttgtttgggtgacgggaaaatatgaaggaaaatgagagaaacacaacacaacacaacacaacagcagaaaatatttaataacggcgtggcggtgagctgcgtcacatcatatcatatgtgtgtatatatataaaggaatatatgggtgtgtgtggattttgtgtgtcaagtgttgtacatgccaactctgagtgtaacctatacacgacccaatagtgccagccctcctagttcccacgaaaaccttactttctataccgttattaaggttctttattttattttatttttgaacggttattttttatttttctattctcatactcatatcttcataaaattatttaacttatttacattttaacatattactatacaattatataaacattctcatgtatttccatttatagtaccacagctttaagatctgtaccaaaaaaaaaaatggagtgtcacaataactttaagatcctcaccagaaaaaatggagttccgtagctttaacaaccttatcgccaaaaatggtgtgtcatagctttacaatcctcaccggaaaaataaagtattgttcaaacctgaaaaataaggataattgaaaaaaaaaaatgttcattattatctaatatacattcttatatgcattgattaaaaaaaaatgcatcatatatattattaatgatttcggtaagttgtgggtaatgtagtatttaatgtgtaaatattttgtcttaaatgtgattttgtaattaagtttttatttttattttttttttttggctttttttatttttacacttcaaaacagttttttttgtatttttacgttacaactagcgctgcaatctaaattgcaacaaaaaaatcgtataaaaattctattacaactagcggtgcaaccactctaaaaatccaaaccgtaaattttaaaaaaaaattaaaaaaaatatatatagagtaattccccttatttttttacaattaatgttataataaaaaatccctttttaaaaatatatcttcaaaactacactgcacaccaccaaaatctttacattctttaattttcatagtgtattatatttattttaaataagtaaatgtacacacatattcacgtataaaaataaaattaagatttaaaactttttaaatgtagagcatgaacaaaaaataatttaaaacatgttatgtagtatgcttttaatttgattctacaaatattttgactattggtttcctcaataaaattatgcaaaataatattatgcatgtttttaaattcgaatctaatttagtttatttatttaagttagaattttaatattattttaattgtctaatgctaaattaatagaaatagatccacacacgcacacgcccatgcattgcaatttgcaattgtagttatacatacaatagttattttatagagaaagcatattacagaagaacatagaagtaatttgtttaaaattgaagaagtaagaccttataattactgctactcatcctggtctctggtttatttaataaatttatcagtaacattacaaccaaaaaaaaaaaaaaaactctaaggctgagttttcacttctccagagagtgaaacactagtcacgacatatggggcttgggatgcacataaacctcagccatcgtgtcattgatgagtaactgggctactttgttcactgctgcaactttcctttcagagattcgatgaccgctgaaaaatcttggtcactgaggccttgagactttgctactttgtacaattcatttgcagctgctgcaatgggggtggattgggaaacagattctgctaatcctaaagcaagcctcatgtcctgaaaacaaatgataagagtaagaagctgttgtaagaagggagatattacttgttagccatctaaggaggagctttacacaccttctgctgatgcttcaatggaaatgcagtaggataaacggattgaatcattgatgggcctttcattgagtacattggcgcactaatggcaccctgcgagatcacctgtaataccatggacgcacgaagaaatgaaatcgactaggtcagtttatttagtcacctgtgatacttaggattatgaaagagtacaaggatcaagttactaacatacattttttgataaaaacaaaaaccaaagatgaataagatgagacttatgacagagatgccctggaagataccttaattagtacgtttgggtcaagtcctactttctcactgagaagcaatccttcagaaaatgatgccatcatactaaaaattgttgtgataaaaggaaaacacgatcagaataacagtctaaacaaaatacagaagaatgtaggattagttgggagtcgagatctgccaaaccttcccatgaccatgttgacaacaagtttcatggcagccccatttccaacatcaccaaggtagaattttgactgtatgcatgagcaaaatcagaaataggtaactctattgaccaaaccaaacaagcactttctagttttgacaaatcaaaacagtaccttccccatgatgtctaagtaaggagcaactgaatcataaagagatttgtcccctgaaaaatttaagctagtaatttagtgtctattagccatttattcactaactacgcaagatttgcataagctcagagtagaacacttagcatggatgaaaatcttaactgaaggtatacttgattaagtagcagaaaagaaatctgaaattttcaaaacatgaactttatgtaacgatgattcacaacactttaagcatgcaaacaaaatattgcctaccagcagcaagaaagatgagctggccatcttctgctggcttttttgagccagaaactggagcctgatacaaaaaaaaaaaaaaacaccaaagctcaaaatctctaatcaaaaagaaaaagaaaaaggtaatagtagaacttactaatgtatgaaacactttttaagtaaattagaaaaaaaaaaaagtttacctccaaaaacaaagctccagtagctttaatatgttgagaaatcaattgagaagtttcaccatcaactgtagaaacatccacatacctgaagatgtgcatcaataactatcatattactacttatatatcagctatgaagcgcctaactttgacatggtcaaagtatgcatatgcataatagatataaaagaccaattagtctattcattatttgaacgaagtcctttctcgattaccattctgtgagtgttaacttccaaaaacaaaaattcctattctctaaagacaagaaaatagtaccctttcccagaactcaacccgcttgcagctccattcttcccacaagcaacttccacctaataaaaaacacatgtaagttgccaaaactgctatataatgttatgaaggaaaaaaaacaagaacgtaaacaaaactcacagcgctttgaggatcagaaagcattgcaaatgtgacatcacaagacgcggctacttctccaggagttgatttatatctgaaaaatcacaaaacaaagtaaagtactgaaaaaattccaggtaaaatcgtcttaaatggtggttactggttgtatatgaaaataacaacaaaatataactaagctaacattttttattattaaactcagttcgaatttgaaatcacatgtcaagtacttacatggctcctaagctgatgagaggatcacacttgctcttagtcctgttccaaacagtcacattgtacctgcatggtgccaaatccacaataaaaacttgatttcagagacaaagaattgaccttcatgtttctcccataaataactaattagttaatcctggcacagtaacccttaaccacagtattttcccagaaaagtactcaaaggcaaattcttgatccaaaaaattgcataatctgatgaactaccaaagagtatcaacatttccagtagataagaagtaaagtaagtggaccacagcaatgcatacccagctttgattagattctgtgccatcggaaaacccattatcccaatcccgagaaaacccaactttagagccgacttatctcctgaaatatcaagtaccatcaataacaaacaataaagatagataaatatttatattaacaagtacatactatagatgcaacatgagagagagagtgaaggcaggcgaaggagtaagagatatgtatgttaccggcggccgccgcggggagggaaccagcgagatcagacatatcggaattaatggtgttgattgtattttctcagaggtgtttgggtgacgagaaaatccagtaaaacaggagcaggaaccaatagtagaaggaaagttggggaaaatgtggaagatgcgggttcggattcgggtatgaccaataccgtgtagacacgtggaaatcttatagttggatcgtttatttatttatttttttttaaaacattaaaaatttattttcaaaaaaaaaaagaaaaacattaaaaattttaaacggcagtgaatgacttgtgcatgcatcagcaaaccatgataaattatccaatataattatgatttaattatttgttgcgattaaataaaacttcaacaaattattatctacaattatgctcaggagtcatgaacattagtgattaactaattacatatattcatatcattattaggtatgtttgttcaaatttctcactgtggttgaccaaactaaaaataataataatagaagaagaagaagaacataggatcatcagaaaataatgatactgcaacaaaacaatgatatgagctagtaaacctaaaagagacactaaagaagaaactgcttaatgcttatagcctcatcctaaaaaatggatatgcaaacaataatcatccaattattctcaattgccaaattaacatggcttaatttcattgctgtgacttgatgcaaacttaaaagttatttattttagtatatattattttcaaaatgggaaaattaaaagaaacaaaaaaattcttaaaagtaataatatagattgtggctattacaatgaaccacatcaactgtcttcaactactcttgaggcagaatcactcagtggggaagggacagggaaaaataaatctttgaggctgagtttcaattctccattaactgaatcacatctcgtgtgactcgctctggattgcagatcatgatccgatcgatgagaaactcaactgcttttctcactgctgcaactttcctttcaaagcttcaataactgctgaaaaatcttggtcactgaggccatgagattttgctactttgtacatttcatttgcagctgctgcaatgggagtggattgggaaacagattcggctaatcctagagcaagtctcatgtcctgcaaacaatggttcaaggctgtgaactaacatcatcatgacgaaaatttaatgtttcccaagaaatccaagaaactttacagaccttttgctgatgcttcaagggaaatgcagtaggataaagggattgaatcattgatgggcctttcatcgagtacatcggtgcacttatggcaccttgtgagatcacctatgatacaatggatgtgccaagataagtaacacacaattttgctagaaccagaaacacaagtcttaacaagttaaaaagcattagtgattttgaaataacaagaaagatgttctttacctcaactagtacgctcgggtctagtcctactttctcactgagaagcaatccttcagaaaatgatgccatcatactttttttttcgaagggttacaaaaagaagctgtcagaaatatagtcagcaaaataaggtaactatagatcataaggtaaaagtaaattaacaaaccttcccatgatcatattgacaacaagtttcatagcagccccgttcccgatatccccaaggtagaatcttgactggattaaagcacaaaggtaagtaagaaacagagctggggaactatatagattgctaggccagagcagcactagtaataaaacaagacataataccttccccatgatgtctaagaatggtgcaactgtttcataaagagatttatcccctgaaagttttcaacaaagaatttagattggtacaaagagatgaattctgagcatggattaaacaagagatttgaaacttaaccaatgatatgatttaggtaattatcagaaaagaacactgacaaaagtcacattataaatggtaggcgatcagcaacatattacataggcaaatcaaagattgcctacctgcagtaagaaatatcagctgaccatcttctgctggcttctttgaaccagaaactggggcctaataaaaaagtgccaaagctgaatctttctcaacatcaaaagtccacataaagagaaatagaatataacttatcttaatagcctgagaaattatatgataatttgctcacctccagaaacaaggcgccagtagctttaatttgttgaccaatatattttgaagtttctccatcaacagttgaaacatccacatacctgaagatgcccatcaattaaaactaataaactaattatcaacatagataatgcttgatgtatgcatgcatcaatccatagatacagctagcaagcatccaaactttgaaataataaaaacaatgtcagaaaaacgttttgaaaaatgattgccacaagaaaattagtacccttttcctgaactcatgccgctaacagcaccgtgtttcccacaagcaacatcgacctattagaaagcatatgcaacctgtcataaatgatataggagattaagtaaagataaatttgagtgaaaacatactcactgcactttcaggatcagaaagcatggcaaaggttacatcacaagatgcagctacttcttcaggagatgatttatatctgaaaaaccattaaacacttgctgatacgttccagattaagtctcttgcattctatggtggctagtgaaagttgtaggttaaaacaaacattactaagagaaacaactatcaaatattgtaatagctaaatctcaacgaccaacaaatgacaaaagtcaactgtgaatgagtatgtcaagcacttactttgcacctaagctgatgagaggatcgcatttgctcttggttctgttccaaacagtcacatcacatctgcaaggccaaatagagtattaaaattgacctccttcttgggactaacgattgatttcaaagtatcatgtaatgttaaatacatatgattaggttaatattttaaagcaaacaatccaagtgaattatcattagcagtagataagagctaaaagtagccaatgcatacccagattttataagattccgtgccattggagaacccattattccaataccaagaaaacccacgtttgctggcaatttatctgcagaaatttatacacaagacctaacttagatagaggaaagctgaaactgaacccataacataagcctgacaagtacaaagctttttccagatactcgagaaaattaatttagttgagaaaagaaaaaggtgaaaacaataccttgagatgaagcattagaagcttgtgaagaaaaagccttaaaagaaccagaaaaatgagattttgcaggaaaagagtaaatgggtctcccattaaagcgggtgggaagctgagggaaaaagcttgagcacattgctgccatggcggttgaagaaacctgctgacagtaactggtcttgacaaatatggacatggatgatgatacccaagtttggttgttcagagttaacggctttgttaaagcacgcatttttatgcaagacaacttgtttggataagtaaatagaaagattctgaggtaggttttggatacgaggttggtcttgtccaagcccaaggccattatattcccatttatgggaagttaaaaaaagtgatcactttattttcttttttcgttttttaaactcaacaatttctctttatatatatattttttaaaagaaaataatataaagattttctaattcaactaaatcagctagttcataagaatgaccatgaatttcattttcataaaaataaaaatgtctcatctttatgtgtagtcagtcacagaacaaactaaagaagaaaagaaaatacagtaagactttgtatattatagaaagaatgctgctcacacaaaataggcactaaaagattacacttgtctaatgttttagtaggtattttgtgtactcagcaatcagcattgatatcaagctattacatcaagaattggagagatattacttaaaatttaaagcctgccctggttattaaccttaaaacttatagcaaataaatttgtcgaattcttcaatgtcaaaaacaataaaaaaataatctttagtttaatttccctcctatttagttgggaatttgttcctactttttttggaagctttgtacataaatcatattccccagcagctgaatcagctttgttcacttgcgaatagggcgataattcccagcattagaaccactagacccgccaaattcaccattaggattagaagaatttccaagatgattaccagacatattactgcagccataaccagaagtgcaacaaccataaccactatgcatgacacaatgatcagcaccattaacatagacatgcataggcgtatatggaatatatgc

SEQ ID NO: 14948 - DNA, 4440 bp, Cannabis sativa
  modified_base (3707)..(3712): a, c, t, g, unknown or other
gagagagagagagagagagacttcgaacttaaaactccaaagatattagtaaattataatatcactatgttgcacttgaaaaaaaaaaaagatggaacatgtgttagtttattctttgtctatttggcatagaagggaacaaaatggtgcatgaaaatatctctcatttgatcttattgttaagtggtctttggattacttagattcatagaggaaagctaacaccaaaagttagagggagcaatagagagttgttgagggaatcaatgtaattaatccagtgttgattaagttgtcgaaaggcactatcaaagctaatgtgaatgttgctatagacacagtgagaggaaagttgctatggacacatggtggaggaaagattggtctcagcttggtgcttagggggactggtctcgggttagttaggtctcgggcctcggctttggaaggcacaaagagccgagtggtgcctagtctcccactcaatcaacctgttacaatcagtaggatagggtagtaatgaatattttctccgcagagaaggcatcccctgccttgcacgggctgtttaatagtaaaaacagttatttttgaattaactaccagcagcaactccatcacagagtatagaacaaggttgtgggatatttatttaacattactgaataagttagtaagagggtactcatcacatagcaatgactgaaaaaacatacctatctatccctatgcatgatttttattcaattctgaaaactgtatatgcatgatttgtacattagggaaagggaaaaggttctgacagcaaactgtattaagaaagaatattaagagcaagtttgatttcataacagacatttgaatagtttagagcagtaatcttttaccaaaagtctaataaaataaataaagggagccctcaaattggatcttagctcacttctgtagcagaaaattaaggccaatatgcctatcttcaacttgaccctttgttcattttatgagttgattaacataaccatggctgaggaagacaccatcgtgggaaagagtatttcccgtggtagtggcgatgaggacaaaattagagataaacttgaagcagaagatttatgctattaagttctattgaccataacaaatagaatttcaaactttacaaaggaagaagataaacgaaaagtcggcaaaagatgttaaaagtgaacaagacgacggtcagtacacatttctgattttctgtagtaagatcctgcatttcccagcacctgcataatctaaccagtcacaactttctataccaaaactgtataaaacacaacaaacaatcagagttatagtttggtcactaactttcatgtaatacagcaacataaacatcagaaaggtaagatatatagatacactgagataaatcccttcaacaattattctgtaattgctccagaaaagagtgctcaaaccaaaagctcattaccaatttggtttcaaagaggaaaagagaaggaaggaaatgacaaaaacagtacaaaattattagtccagcagctgcagtggagctttttttttatgaaagaaaaaatgtcaggaatataaatctctaaaatcccaacaatggattgaatacaaaaatgtttttgtggagacaaaatgtgaatgaatagtatactctcaaggttcataaacttcaggtagttgaagaccaacacttgcagcagacttcccaagcgttcttttcatttcttctgatctatctacagcaatgttgtaagaaaacaacagttcctgcaagacaattacatgattgtactaataagataaataggtatgtatggagcaaaattcataacaaaatatgaaacaactaattacaatcttaaggacatagccttcgaatgaacgacatcataaaattatttttcttaagcatttaaatttatgtactgcgctcatgtcatgcgaagtaaatcatgttcctatacgatagtcaatacactaacagcagggaaaggtatgaacagaaaataactcatttaacaggacaacacaagcaagaaaaggagtatcaaacgaaacacccacatgtcaaatttaaaactactagcatagacatataaaaggaaaactttgagttaaattgatttaagccaagaaagaaagaagtgccttgtgatggtgtacactattgagaaaataagtgtagtcttgagcaagctttattttctggcgaacggatttgaggtctgataataccaagttcttcctgaattcatttgttacatgttctctgaaatgcctcttgctgtcttctttgcctatatgcttaactaccgctttgagcaagtttctgtacaccttagcaacttggaaagcttcagaactcatttccaaccttcctcttcagcgttttctttttctatttctgaaacaacacaccaagaaattcttctcacaaactaaaacatcatttatggaaattatgttttcacaagtagaaaactttgaatgaattataacatattggtatgaatatgaagaaccctatcatgtatgttcttgttcagagcttctgatgagattcaatgagcaatgcatttaacatgatttgaagtgcagcttcataaacaggaaaatcataatgcatatcatcaaaagtggtcctccagattgtctcaaaatcttacttttccataacacagaatcataaccccttctcatttcatcagtcattttaaccctcttctcctccgtattcaacatgagtttatcaatgtcagcattccaatccagaaaaggtgcggccatctcaccgaaaccgggtccttcggttccgagctccggtgaaaatggcagtaacgaaatcactatctcttaacacctgtaacgaaaccccgtaatctgattcattcgtaaccctaagcatatgccatagccctgaacccatgatcaaaacatcgggagcccatacgaaatccaatctcatcaattacagtccaataatcgctatgcctcgcagcttggggtttcattaccaaacccagaagcgatagggcgaagaatggtgactgtaattccaagtatcatgaatattccccaattttcagactatttgctatgagtacatatatatatatatagaagaaatttaagcaggactgagacaaacatgactgaaatgaaagataaacatagaaagagttgagaatgaattttgggagcttacttcttacccttagtggcttagtgtttggtgtctggcgtcagtctcctcctcgtcgtgggtcgatcggcagggaaggagagggtttaaggatttaggtttatcttctgaaaaatttctaatatgaatgaacaacaaaaccaaatataatcttttgtcaagttctaatttttagataacattttactgatgcaatttttatttgttttgtcattcagaaaaaaatttaatctaattttttttataggttaattaagattttttctctcatcttttgacgtatactaaatcatgtccttgaatttttttcagctgttaaaaattccccagatgattagatttaacaattttttgtctaattttagtaaaaaaattgtaacatggattaaagtgcaaggggcatgatttagagcatgattaggtagatatcaaaatctaagaagcatagtttagtacataaaccattactgaaacagtaaaattgaannnnnntagacaaaagtccttaaatctaaccacctcaatagttcagaagaatttttaacggccaaaaaaattcaggcgcatgatttggtacatgtcaaagtttggagagaaaaatgctaattagtctttttcatattcatgtcaattatagttatttaagatattttacaaaattttaaaaaattcaaaataatttgcaatatagaaaataatgttcaaatagtttattttacactcgtgtaaaataaaatactcccgcatgcaacacactgcttgaacataattttcggcgtgaaatttttctgaatttcttaaaattttgcagaatgtcttaaataactataatctacattaccatgaaaaaaaatttgactaaaaaattatttcaaatactaaaataaatagatatttatcgatatattttgttaagggagtccattatagaattttctaatatcttatataataacgtttaggtctaactctataaacgtcttttattaaaaaaaatcgtaccttaaattagagagaaatactattaatttcgacaacttcacttgagaagacgacggaaatcaatcaaaataagagttgtttcgaattgatgaaaaataaaatacagaaaaactactacaaactaaaattaactaaaatttggtttaattcacgtaaaaattttagatttatgaaatgcaaatctcaaaaagttaaactagagttcccaaacaatccaa

SEQ ID NO: 14949 - DNA, 7969 bp, Cannabis sativa
ggtaaaaatttcaacgtattgtttgccttttttacattgtagcatgcagcagtagtagttgatgagaaattatatattgctggcgggagtcgtaatggtcgttacctatctgatgttcaggtaaatagcattatttactttgacattggaaatttgtgattccatgttctataatattaggccaaatttgcaggtctttgactttggaaacttaaaatggtctaacataaaattgaaaccaaatgttgataaacttgaagacagtgagtcacaggaagctctttcacccatctccggtcacaatatggttagaattcactttcatagtcatcctttatttgtgtgcttgcgtatttcattttctatccaataggctttaatttttttagactgtcctgtcctgtatggttgccactttccaatagatgagtaattttgtatgtttgacagattaaatggggcaacaaactacttctccttggtgggctttcaaagaatttttctgatgaagtgataggtttgtatcataaggatatactgtgatcggattatattgctctctttcaagtgttctgattctgatattactcatggtgtattgaaccttacgttgtgttaatgtacttgtagtttggtttattgacttggatacacatatctgtggcatcatggagacttcaggaaaagttccggtaaaaaatgaaactttattgctggttgattttttcttttctggctcaactattgtacatttttccttttgcctttgaaccaatagatttattttttcctttatgtgattctttttgctttgtttggtttgttgagtaagaaattccatgagtatgcattgcaattgaaataaaattgaccatccttgtgctcatgatttcatttgcatgtctatctttgatttaatttcatattgtacttgactaaacgttaaagtggaaaagtgacatggctcaagctacacattctgtttggcgaaaatgggcatactataaacactgaatgtgaaattgtctctaatttttcatctattcaattttcatttaaagagggaaacttcccttttctgtaacattgttacttaattcagtatattgtgactaatggagatgcttgtggagtgtattctaggtggctcgttcggggcagtccacaactctggttggttctagggtaattatgtttggtggagaagataggagcagaagactattgaatgatgtttatgttcttgatctagagactatgacttgggatgtgttggaaaccacgtaagtatctaagatactatttggataaacctttatggttttggaagatttctgtattaagttcttgtgttatgataggcagacatctccagctcccagatttgatcacacagccgcaatacatgcggaacattaccttttaatttttggtggttgttcccatgccatttttttcaatgatcttcatgtactggatttgcagtcggtaagtgtttctgtttggaccctagtctattttccttttatgttcttattgatctgattgaactattaaagcatataagctgaatgcgtaggcacagtgtgtagggatgaaaatgcatatacattttttcatatgtgtcagaaggtgctatgaagtttaacattgattgagaagagggtgaatgagtttaatgtcatctgttggatcacagtttctgcttcaaacagcatcccattttgatcaaatacttctgtattatttaatgtcatactttttttgctgccaaccctgctatatgagaatctattgatacatttttcaccaaatcatatttgatatatgtcaatgtaagtgattgtatatcctgacagaatgtgtgatgtgttaagagagggttatcttatggagaggggtaaacaatttttcttatgaatatagatttcaaaatgtcttaagttactaggactgtatgatgtataactcaataattctcttacatataagctgaataatttatgttgaacaatgtgatatttatgctctatatgcctacatccttttcagtcagttttcatgatttgacatcataagatacgccattttgcagatggagtggtctcaaccacaaattctaggcaacatggtgacccctagggcaggtcatgctggcataacaatcaacgagaattggtatttagttggtggtggagataatcgtaatggtatgtgcaagtgcaatgatatgttatcagtctagtcaaaatatgcttacttatgtcccttgtcaattccattattagcttctattttactgaatttatatttttttgtaggttgcccagaaacgctggtgttaaatatgtcaaagcttgtctggtcatttttgacaagtgtgaaacaaagggatcctcttgccagtgaggttactactttagcccttgttttttttactgtaccttttctatgcatttttgagccttcttgagattcatttttgttctattgccaccagagggtagctcaaatagtctgatatgtagtttgctcccacaaggtctatggtttgagtccctgttggttacatagcaatttttatagtttcttggtccccaatattgtgggggttaggcaggaagcctagtttttttgccaccatggagtataggctaactcttaaatttattttatttatctctcacagtcatcttttgtttgtcttgttctgcaccatgtttctatttgtttttgtgaaacatatatctgttatagtaaaaacccagtaactcgtattaaacatataggaccagatagctggtgaacaaattgatccatatgtgatgtataaatgtatatattgaaacagggagtcagtctttgctcggtgttaattgatggacagaatcatttggttgcttttggtggctacaatgggaaatatagcaatgaggtaatataatgtttttaataccatgagtttagtcagtgtgtttattctttacccgacccatttaggttgcatttggttggaggtaatgattttgaatggaatagaaagaaatcaatttttattctattcctttgtttggttgtcttttaaagtattggaatgtcactataatggaatgacttttttttgtcatattagtagaatgactattttatttttaaatttcattccgttttattctcattcccattcctgtattttcattcattacaatcagacagaacctttaagtgtatctcatatccattgaggtaggaacgctcacatttcacacaatgtacttattaattaattttcatataaaggtaaatctagagatatggaactagggaaagggaagaaaaaaagtactatggtcattgcccacttcccagtagaaaattatttctttgacatgtcagtggcctagtattgaccatatgaatggggatggttctttttcactaatgtaaatagctgggatatcttgaaaggtaaggtcaattgctccttttttcttcttttgatggccaatctttgttttgggaaagaaagggattcaggttgggttaggactgattcttttcgtagggatacaaatgtggcctaaggcagctcaataaaattagacattctttcaatatgctacatgctagtagcgttagagaaaaagcttcggtcatatttcttagaagataatgagttattagatatgagatagtttaaagatgtcacttggaaatttgaggttttcttctcctagacaaggacattggcttaagcatataattgtctaggaatattatgtttgatgatggaatcaagcggataccccttcattttttattttttttcaaaacactttcagttattgttttgttcttctattccatgaagaagataatggtagaaaaaccctgttttctgcttatgtactaaacttcaatctttattttaatgcattagttcatttgtttcatatttatttctatagcaagctttgtatcatttgcctgctaaagctcctgatatctcaatcttattcctttgctgacttttgtccaagttatcagaagatttctcttttcataatctgtattttgtcattttatttttcataattttgttatcctgtgcctgccgttttttataggtttttgttttgagacccaaaccaacagacttttcgcggcccaagattttgcagtcaccagcagctgctgcagctgcagcttctgtgactgctgcttatgccttaagcaagaatgaaaaattggatttcataggtgcagagtcaaactccaagagaaatgaaaacaacaattttaggaaagatcttaagattgagattgaggcagctaaagcagaaaaacatttgttggagttgtcacttgcagaagttagggcagaaaattctaagttgggaggggctattgaagacatcaatagtaatcatggcgagttggttaaggtatttttttttactaacaaaatcacttgcaaaatatattcgttctctaccctgctgttgtaaaattcattgatttaaatgattctttcaggaactacattcagtccagggccaactggtatctgagagatcaagatgctttaaactagaggttgctttttacttcatttagtgaaaaagaaactccatattgctttattattggatggtgtcctagtaattaaacttctctatttaaacttgaactttccaggcccaaatcaatgaattacagaagattctggaatcaatgcagtctattgaggaagaagtacaaaaactccggaatcaaaagtcagcattcgaacgggatatagagcatacttcggctcctcagaggcaaggttctggtggtgtttggaagtggattgctgggagcgaggcttaaaatttaaaagctttaatcgacttacatatcaaaaggtgtcaaaatttagttatccatggcgaagctcaggctgattgctgcaatagtatatttgaagaacctgtgattctcatgcatattggttctctgaggtgagatatttttggggggacagcactaagttgggtaaacaaacgctcgaaccatactatatgatgttttttttacttaataaaattcttcttaattattcattctcttgattttcttattattgttctcataaaatttatttttttgttactctattatatgatgaatgaaaatttgtggcatggttttttttttgaaagatgtgccatggtttttcattgtgaattagattttgattgaccaacttggttaggaagcataataatagtaaagtgtgaaattcaagtctttgaaagattattcccatacaaatttgttgaccgtggaactggaaactggatggttaggaaaagattaattaagatgtttttcctagaatttccgtgtgaaaggaaaaggccaaattagaaaaaataaaagtaaacaaaattgtgagagagaactgtagtttcttgtgtaaagtttgagagaaaagaaaaatgcatttcttttctttatattagaaaaggtttcttaatatgttaattatttaaattataaaacatccatataatattttttatgttttacatgtccataaatatgataaaagcaaaattgttatgcgttttttttaatatactatgttttaattgggactcgaactcaaatcttctaacacacacacattacattgttatgcttccaattaatataatttgatattatcaccattttgatgtttcaaatttgctaaacaagtacattttttgtccgacaaattaaaaaaggtccattttctttcttctataagtccaaatataatgacgtttgcaatgtaggatggtccacctgcacgtgcgggacacgtttacattaggatttgcatatgcttttttgacaattgtgtataatatatagtgatcaatcacatatggtatttttctcagaaaaaaaaatcacatatagtatttctataaagagaaaaaatcacatgtgatatatacacagatatagtggttgggggcttcatgaaaacatggaggccctatatagcatatacctcatatataccacacttctacatatatattttccatatatttaagtggcattttacaagagacgagaaattattgttggtgcatatttattaatggtgagtgttgagtacctaaaatgttcattcaagttatgtctcatctcttgttggtggaaatggtgcaaatgttatcacattttctaaagttgttctcgcaggtgttggaaaaccagggtattgttttgtgttctttatttagtaaacaaaatttacatattattactattactacgaatcttaatttaacaaatgatacgataaattcttaactaattatgaaaggctatattaataaatattatggtgcttaatatcacaatgaggtaattacaaataattagctatttcttctaattattattaacataaataagtaaaatctgttattaaattaaccatatgatgatgtattcatagtggagctagcaaactatgtgggtaccctttaccatttctttaaatcataatgctcttatatgtataaaaggcagataggaaactaatgaattgaatattgagggcagagacatatatacagaagaatgtatgtgtattttgcttgaagcagggagtaaattaattaagtttcgtttacaatctagagttaatattttggtgcttattattagcttgtaatacaagttccttccttagaattttgcctgctgctgaccttggaatggcattgataaagtctactttccttactttcttgtaaggggccacctgtgtgtacgtaattacatcatcaattccactatttcaataatcactaatcataatcaataaaattaacattataattattttgtacgtactacctggcgagctacatattgtatcacttgtgcttctgaaagctgatcagctccgcccgctctcaccacataagccattggtatttgtcctacttcttcatcttctaccctgcaatatatatatatatgtatacacattaatacatataataacacatgtattcaatcaatggatatcatatatgaacagtactcacggtacaacggctgtgtccagaacattaggatgggccaaaagtatagcttccagctctgccggagcaacctgcatttattatatataactattaaaagaaaattactaaaaagtactagtagtgttaattaggtgtaatattgaattgtataattttgtataataatttttaataaatattaataggcggattcattattaattacaaattttttatgataaatgttaaagagttcatggtttctagcaccaggataagtcttagatataaacaggctttccgtgacaagagtactctaacattttttgagagtccaaaaataaattaaaattaaaaggtcccattacatgaaattatgaataatattaatgattgtctacaattgggttggttcatgaggcgtatatagcattccttcgaatttgtttgtcagtccaattatttacttaaaagatttatttaaattaatttcgcattctacttttttgttatgaaaaagttttttactaatttaaattctattttttagcaacttttcattttatttctttctttaatagtaagctctgtttaatttttttttttcagtggtccacatgaatcactcatatattaacattattgtgggaaaaaattcattaatttaatcatcaaatatgttcataataatatatgtatatattatattttggtaaatattatttgattagattcgaaacttaagttaaatttaaatcttaaagatagtcttcagtacacgtaggaaaatttttttttggcaaatttacactctttactaactttttcccatgtattacaaaaatactgtgccacgcccaaatttacgtttatacttttttttttttttt

SEQ ID NO: 14950 - DNA, 3178 bp, Cannabis sativa
ggactacttaaaaattgaataacgctgattcagagtggtagggtgaaataaaaccaaactctcatttagattttttatctgaagccattaaaatacatagttttgacaaatcatgcatgatgtagttgaatcaaattcatctgaaagtctattcaaacaaaaacccaattccaaccacttaaaatgagcacaagaagaggcaaatagaaaagattgcaaccataaatcagtaattgaaccgaagaattgaatcagttttgattcaaatttctatttcattcaatagtcgattttaaattcctatttggacaaaatttattgttcacacaagaggtaaaccaacccaaacaatgaatagcatctgtttctattctgataaagaaacatgttatttgttgaccaattgaagcaaaaatgtaatacacatccagagcattgaaacttacaatgaaaagcttgcgttcttgctttctaatttccctctcgattctttctttttcagcttccaatggaagtttgaccattctgttttcctcaaccgagtctctatactctaattgaatatcatggaactctgatagagttccagcggactgtgggtttccctgtggttcatcagctacacaaaatttcccaactacttccagtcgtgcatgttcttcatggagttggcatctttgaagctccatttctcttttcgatattaaatccgcaatttcgcaaggtaggaagtcttttcccctgtaaattattataataaatttattgcgtagcaaaagatctcctcctgtcagacactgcattaataaaacatcaactttttaaattcaacgtatagaaagaaagtcatataatgcattaaaaaatcaaggatgcatgcattacatagctttgatgcatattctcactgatcatctacaaaagaggagagtgagaaagagaacttaaatcataaaattagagcaaccattttgttatgttgtgctatgatatacctagagaagatgttaatagatgagcatcaaagcaataagaatacagaccaacaaggaaaataagagaagtaaagttaattaaactaattccacaaggtaggccatgaaaagaaacaagcaaatagttaacttaatcgaggttgagaagaaatgctcaagtcactaagggaaggccaaaatgatacagaattattatgtcaaccccaaattaagattgaagcttatttggtcagttgtattcaaggtgcaagtgaattagttgtatccaaagatgtctggaattacgctgacaaataatgggagtgtataaactatagtaaaacattataacgttaagctaaccagatcaagactgaagcttaatttgataagacatattcaaggctcaattggactagttgtatgaagagatcaggaaaagcattttagtggaaatataagcaacttttatctggtattggacagcattatttttgaatgtcatgtatatgtttcctgaacttgccttgagctcattcgccatctgcttgttgtcagtatttggaactcccaacttcacagcaatctttgctatatgacatttctcccataattttaagatggcagcagccaggccttgaagctttctattcctacctttacaaaataaaaatgaaaagtcagttgaccttaacaaaatagaaatatccaaaatgtgcacttgtcatgattaatgtccttttccacaataataattcatcatatcaaacctacatgcatgaagtccaaatattgctaaaatattatttgagctcagcaagcacacaagaaacacacatgacatgcaccaaaaagaatcgctgaagcggtaaacaaagactgcttatatacagtccggatcaaaacaaacatggaaattgtttagttcaattatacattctcaaaccattcaacatgtcatcagcagttcattgctatttgattactacaatatatttttaaataaatgtttagtttccttttcatttctgtttgtatttcattgtactaaagatgttaccaaaaaaaattaagcaatttactttttataatactaataaattggtatataccgttaataaaaaattaaacactctttagcacacacacaaaaaaaatgaataaaacagcatgactcgtttacatagacctgatctaagacgtagtttctctgctttttctgataaatttagggtgtctactatctggtcctcattttcatagattgatattattaatctaagttgattttctctactagtttaaaatagtagtatatttataaatggttatagttacacattgatggtttgtcgacatttgtaaattgagtgggaataagaaataataataataataaaaaaaaagagagtaaagtaggcaagagaataccaaggacaaaatgagtaggtaaaggtttagcaagccttctcaagtatgttagctcctcatctgtcagttttgatctagtttttggtggggaacgtctagatggacgcctaaacccaggaaccacttcgggaagtaggtctgcatctaccggcaaaggcttgtgcatccaccagtcaacaaagcgaggtccaaggccatccaataatctatctgtttccctctcatacagtgaactatttggttggaaatcgatatcattttcgaaaacaaaagtaggttcagacttcactttaacacttttaaagctcaactttccatttacgatagtttcttttgagatgaccttaaaatggttcccttttctcatgttcatgagaccatgatctgcagatgcctgataaccagaaaagctaggatacattttcgggttggtttctgaagttgaaagatagttacagcccctataaataacaagagtatcttttcttctccatacaaccaatcctcctgtcttcagctgttatggataacaaaatgaagaacacaggaaaggaaacataagcattataaattagaacctttccctcaaattgtgatttcaaccaaggaaaaacagtgtcatttatttcaaagaaaagctctgttgaaagaagattatacaatgcagcagcgtcgcaaaaattatgaatttttaacataaatgagtgccaatttaggtgaattaattttaaaaccaagaaaacatacatacacctacgattttaaaagaaaaa

SEQ ID NO: 14951 - DNA, 10026 bp, Cannabis sativa
atatatatatatctaggaggattggaggagtgttaattactcctattacaatcttatttaatttctatgcccaaaattatatactataaattttttttccaaatttttatcatagtgatattcgttatagttataacatcatccttataaatttttaaaaaattctaaatagtttataatactgaaaaaaaagaattcttgatattccagtctatcacatacgtttaaaaaactttaaacttaatttcagcactgtaaattatttgaaatttttcaaaaaattattgggttgatgttgtaactataataaacactgccaaaaagaatttgaaaaaaaaaaatacttcagcatgtatttttcagacacggatgtcgactgagagattgtaatagaaggttgacgatagtactcttattatctctatagcattttattgcgaaagatgttacattaattgtgcacatacatatatatttaaaaaaaaaatgtgtgtatatttgtcccaataggttttggttgatttatgccccaatgtaaaaattgagttataataataagtgtaacccgtcttattaagaagaaaaaaattagtaatccatccaataaaattggtcggtttggtcgggttaacctgtccaaaccgacaactaatatttttttatattcaattattatattttaattaattgtgataataagacaaatatatattaaatttaaattcaaactaactattataaaacaaacaatcatagtagtttgcactttatattgttgaatatgtatgtaaattatatgatatgtaaatatatacataataaaacatatatacagatatatataactctcttaattaggttggtcgggttagtttggattgattaggcggtttggtattatttttaacttgcccgatataaagattggacggattatatttttgttgagtcattcgatttatattattcgtgaggttattcggtttgagcaatttataaaattttatatacatccttagtcataacttcataataaaactttggtcattgaataaatattatgtttgtttgttgtgattttataaaaataataataataataacaaggtaacaatttaagtgtagttagggatatttcatctaagttaatatacaaatctatagaaagcataaaacattaacatctattcatctattctccgttattgcattgacaaaattatcaaagtaaaatttaaagggccaataaaatcaaataaatttgaacacttttttcatgtggaaatttttatattctcttttaagatattggctgtttgtatcttcttttccattatggtgttcgaagacttttgtaataactaataattatcttcaaatttgaccaaattataactatttaatattttcctatatccattattgtaattgcggtactatatgtgtagtctctcctcctattgcttatagatttggaaaataaagttttgattgcttaattaattacgttttttttatatagataatctattaatgttgtcccaaaagtttggaccgggccttccacccaacccaacaatctccagtagttcctatcctatggtcaatttttactagatattaattattgaagttcctttacatttttaactaattgaaagaaagagaaacacaggacaaaggtgatgaaagagggattgctttgatggcaatttggactattttcgcgggccaagtcggccctgacccgatgaggcgactttggctcgattattttggacttttataggactctaggcccggcccgatttcaaatattaaaaaaatacagataggactcgaccaaactcgattatctcgggtcagatctgacccgataagttgaagaaagtagtctggccgggtccggccctattaacattcctagagctgaacacagccattatgtaccaaagcaagaaaagcatttgatgcaatcactaacaacaattagaaacaaaattacagtaactaattaacacaacaagtgactgaaatcctaactaactctaaaagaaaagctaaccaacttctaactttttgtgctttaacattaattaagtagttgtgtagttattcaattaaaaaaaaatataatactaaaacaataatctgatgatttgttaagacattagtattaagatgaaaatattataacaattatcacaaatccattgtcgtccaacggttaggatatctggctttcacccagtaaactcgagtttgattcccgacaacggaatttttgttgtttttaactaatatattttttctacgataatattattacactacgtagttgatttgagtttttcaccattaatgaaccaattattattagatgaagattgcaaagcatcttaggtttggagtagtgcaggaatgtggaatcaaccaagtgtgcaatttgtttaaaatgacaagatcaatgttgaagtctaccacttcttgattaaaaacaaagcatgtgacatatttgaccaaatatgctttgtgtaggaaacaaaaacatgattatcaagtcggagttaaaaccaagttaacatcatctacgttactgagttcaaattgtgagcaaaaaaggaaaatacttgtgtatagtagtagtgtactagtattaagagtataacttaataatttgctagtctagaatcatgggatcatggtaatcttcttcacttgaacatggcaaacctgtacctgcagggactctatggaaaaaattataacgtcttgattcatctccaatattggagaagtcatcccaagcccccataagcgtagtttcaacatcaagacttgatgatgactcgggccaatctggacacagcaaaagttcattgcttggtgaagatttaaaattggtacagcgccagaggctaacataatctagagaacgtatgttatggatgctgtttgggacagactcaaggttactgcacatttctaggtgcaatgattgaagcccgactagattctcaatcgacgagtggagctctctaatcgctgttctatctaactcgagttccactaggcattccataggctctaagatttctgggaagtttttgaatgtcatgcatccagagaggtaaagtccttgtaatttttttaacttacaaatgcttgtgggaagattctccagctttgaacaatcagtaagatcaaatatctcaagacaagatacatactcgattgatgaaggcacttctttaatggatgttgtactcaagtttaagcttcttatgttcctaggaaggttttgaaacttgttcagagaataacaaccgtgaagactaagagttgttagattcaaagcataagagatatcaggaacttctttaatggatgttttactcaagtttaagcttgttacattcataggaaggttcggaaacttgtttagagaacgacaaccttggagactaagagttgttagattcgaagcatgagaaagatcaggaactttagcaaggtctctgcaataactaagatccatctttttcaagctacttagaggctgtaaaacaagtcaattagcttaatattagaatgtacataacaagctagacatattgaatacaattatagtggatagacagacataggcatacctggcttacattccacagcctatcaacccgactattgggcatgataagttccacgagattatctggaataaaattttctggcaaaaatctagagcaatatccatcccattgtagatatacaagcttatcagagaaatacactagatcttcataagggcacacattgctctccctgttaccatttggtgaattataaattttcaagtatcttagattatacatcttttggaagacctcagggttgaaattgatatctctagtcttagacatgtctaaacatattccttcaactgcttcagtcccctaacaattaagaaacaataacttttatgcgtacataaactatgaactacacagctgaaaattcatagtttttttttcatgcaacctgtgaatagttttaaagtatttgtacttactgtgttattcttcagcacgtgatatatatcctctgcaatccacaacctactacgctttccaggctctttgatggattcttttcgaacaatctcttgacccatttcttgtatcaaatcatgcatccagagtttgttgtcaagagatacaactataagtgacttatcaacaagattatctacttctatgtcacagcttagtattctttcaacaaaatttctttcattgcctataaagaaacatgcaatgtcaagaaagagactctgctcactatcatcaagttcatcataacttgttttcaatatagtttgaagtttgttgctcgatcttttctttattttatccaacgcagtctcccatttttccttcttttggcaacggaggaaggaacccaaaactttcagagctagtggaacacctccagcatagtttactgctatatctaccaactttgtatagcttttcttcggagaggacacttcttggaaagcagccaaatgaaagagttgtacagcttcatcatcatttaattcttcaaccttgtaaatttcattagctttgatgttcctaagcacttgctcatctctagttgttataataattctacttccagagccaaaacaattcccatctccaactaaaacttctaattgttcaggatcattcacatcatcgagtacaacaagaaccattttaaagtggagccttttcttagtatacgaagtacttcgtctatcttcttccagtagttcagaataaagtatattttgtacatgaggcaacccgtgtttctttgattcttccctaacattcaatagaaagcagcaaccttcgaatcgagaagcaaaacggttgaatacagctctagcaagagttgttttaccaattccacccataccaaaaatccccacaatacgagtacttctcgatccaacttccaacattctttctatcttctcaatgcgtttctccattccaacaaaacccttaaagtcctcaatcggtacacgactgagtttcttcaaaatgtcttcgacaatctctttcactaactttgaatcagggctataatacaagtagaacaaacaaatgctagccgatgagaaggaactataataatgaaacacatagaaatgagttctgttttagagtagtagacattattgtagggagggactacctgacgtgcattgaagcccatccagatagattggctgcagtgatcaaagccttcctccactcatgtactttatctattttccccagataacattcctcgagctcagccaacgcatctgcataggttcccaactgtccccggacatgagatggtttcacattgtagaaaataggaatgacaatcttccccagttcttctttgcaccaaattatatgcacgagttcatccaagcaccatgtggaagaagcatagttttctgaaaaaactatgactgacacctttgactcttctatagctttctttaatgctggtgagatctcatctcctctgttaagcatgttatctatgtaggtttcaattttcttctgaagcaatgcttcgtgaagatggcttgtaaaatgatcacgagtatcctcccctctaaaactgatgaaaacatcatatttttcgggcataaagttagaagaagtagaagaagccatattatttctttcacagaaaaccaataattgtacagatgagaaacaagaaacgatgatgacaagcttgaaaattctattttgagcaagaatattctatcattaaagtcaactatgttgtaggaattttactgtcttatccctacaccacttgcaaatacacatcaccaagcctaattaaggtcataaagaatctttcacacacacaaagacaatacaattattcaactaaaacaatataaattttactaagatgtattaagtgttcttctctttatttcctttttataataattttgaactaacacggaacaattgagagaaataagaatcaacgccattagaaaatccgaaattgtattaagttttcgatattcaaatttcctgtgtgatcgttcattgagatataaatgccttccagttcctgttatttcctttttttgtaagaaacttgaccgatgacttaagttttacataaaattatgaacgaaatagcactttttttttttttgaagatttgtgaggaaatctttttcacctttttgccataaacaagttcctgtattttggaatatttcaaaagttctcgaactataaaataaacaaaatgtatcatcaataacattggattactcaaaaatataacttaaacactaataacaaaataaaattgaagtatgatcccttctatcattttgctagttacataactatattctaatttgtttggtcgtttgttctttcaatttttttcttctttttagactctttctttgagtttgtccagtgcttataaagaatagatttgtgttatcatttcattaatttcataaaaaaaattaatggttaattcccaatatacattattgtttactgaaataaagtaaataaaaagaataaggtcaattgtatagtaattccaagaacactatggtccattttcatctctggacaaccaattgatctgagtcaggcaggcttataccatgacactcaagagcagaatcttaacttgaggataccttcgtacacctctcttattctttaccaggcgtctgcaaacctagagaacagcttttccattaacatatttcactgtttattataagcttaaaatcttgagagcaagccaaagaaatacaatggcaaacattcaacagaccagcgaaatcaaacagtaatagcctgttacaagaagatgtgcagcttcacttatactatgtacctcaaattaaaaacttgtgaaattgacaatgtacagtacttaaaagttcaaacatttgaattcttctgcatgttttaagttagactagaatataaaactaaaagttctcttctatcaaatgaaaattctgactctgttgaaacaatattaaggttgcaggaaagaactcgctaattaagaatactaactttgctgctattactatccaactaggaaagtgttttgattagatgcagcaggggactcaccaagaaactcggatcttaattgcattaaaagccgccccaaatagtttaagccctctccatcccggcctccaccccagaaaaaatcatgcggtgaagcttcaacaagaacagatccagcagtagaaagcaacatagaattcagatgcggataaattgagaacttacatttcactgctttgtacataacattgatcttggcactttcccaatcagatcttacctgaaacaggttactattcataagtgtttgagaaactgatgtacagtacgtctaaaactatactctatcacaatatcatggatggaatttaatatcatgttacttgtgtaattattagcaagaaatgcatttcattgggtgtgcaaatgattaatgaatattataaattttagcacagcttatatcttctataggaaatcttcatggcatgagagagaaaataataatttccggtgcttctatcaggtttataaaatcattgaatcccctttggatatatagtaacttaaacatccagtattatactaattaaaaatgagctcacataaactataccagatcagggcgctgcctctgcattgatcttcctaatcttgcagcctcctccggacttttggcagactttatccttgctacacaatctgacgcgagaggatcattgactccaacaaacttctgagcctgattattaacaataaatctttaacggcattcaaacgatgtttttaatgaaaaaaatgatatgtatttggtaatatatgatacctggtagtaatgttctacactcgaccaggagacataaccaccattgtcatcaggcatttgaattggatgaggagaaaaatttgaaaaagcaccatacaggtcccatgttttgtagaaagaaatgatttttgattcatatggagtaacggtctgatcaattgcataagtttcttcaactgatgggataacaggcgttacatctggtatgggctgaaggaatccgctaataagcatgtctggtccaacctgttgaacaagtagcaagagcagagttaaggccaatcacaataaaatttgaacaaaagattgtcttgccaaggtatgtggaccacagcacagaatactgccaacctgttcatagcaaacatcaatcaaatctaaagcttgagacatctcaaccatgccaagttcacctacaggagatggggcatatttgccacctataatcttaggagcaacaaatgcgaaaacctgcatgatagcagcagcatctggtgatgtcaatgacaatagtccagtgcaaaggttatgataacaaataaaaacaaacccaccaagaaggaagaaaaaaaacagaatagaaaagtaagaaggaccttgtgtattactccagctgaaattgcagatgcagctaatgttcctccacactcccacaaaactgaaagatatccacaatcgtgaaagtattccattacgtctctaggatttaagatgtcgaactccactacttcaactcctttagaagcaagaaatttctggaaacttcttctagcccccctttgggttgcaactatggtagatgcttccgacacatcccaaagatttgcttcctcaggcagatcaagtgtctgtgacattacaatccgcatgggcatatgcccacctccatgtcttgccgtcaattttggatctaataagaaaacaaatcagaacatatattcaccatacatcagcttatacactagtaaagtcacaacttactgtccctccggacggtattccctccaacaacaacagcatcacttctaccccgcatttcaaaaactcgacttctagagactttgctgcttatccatgatgcatgtccactactagcagcaatttttcctgtttcccaaaagaaagactatcaaaaaacacgcctttattcttaacttagaggcctctgcaattacattaataaagctcaccatcaagtgtcattgcaaacttgaaaacagagaagggaacacgggaagctgctctacaaatcaaaggggcattgactaggaggcatgttttttgagcattctacgagagacataaacatggacgtgttatactgaatactgcaaatgaagacaaaaatttatttcaactattactacataactaaactccaacaacacagaataattggtaaaataggcttttctctaatatcatcttgcgaaatggcattcctttaataattctgtacaaattagcttcccttaattggaaatgctaatttttacagacttataaaatgaaataaaaaatggcattctgcaattgacattaagaaaaagttttattttgtcaaacacctcgtgtcaaataattcactccaagtcatcacattcatcattccattagggttttagttcaagatcgtcgtgattcgtcaaaatttggaagttaaaaagagtaagaaatggccaatttttaacatacctcaatgattttgcttttgagatcctctccaagaacatcgacctgcactccctgacctctcaatgccctcacagcattgcctctgagatgctgtagaggatgcctgatcccaaccactaccctcgcaatccctgcctaatccacacaacaaaaccatcaatcaatcacacacaaaacaagtcaattccacccaaactgaaacaaagcacaaagcactcgcaacaaaacctcgacgagagcggagacggcggcatggtcaccgtggcaatcaccgggctccatattaagataagcggtggaggttcggcaacgttcgccagcagcctcgacggcgagaacctcagcaggtttggtcccctgggc

SEQ ID NO: 14952 - DNA, 3486 bp, Cannabis sativa
aaaaaaaattatatgaaattttatgaaagaattattaaaaaaaagtatacatgatttaaaaaagttataaaaataaaattaaaattcacacaaaataatgtaagaattttttaaaaaaagatattaagagaaatttttagtaaacatttttagagaaatttttaaattaattattaaggtgtactagtactctcattataatattaacctcgcaaaacatacatattcataaaattacaatattaacctcggaaaacagaggaagggaaggtgggaagaaccttgaagaggtggcagttggctccagctctagatccgaagtcaaaaaaaagcggggctattttggtctttttaaccaatttatatatattattacagagagagagaaatttgtgtttagaattggattcggacgcaagagtcggaagcggagagagtccatttcgtttccggcgccacccatcgaaatcaattctcttcttctcattttctttcgttttctttctcgaaggacggattttgagaccattagagatgcagaggtctcgagatcagcgttcaagatctactaaacccaccaccattcatgcctacgcccactccggtgatcttagtggatttcagaagcttcttcgggagaatccttcgcttctcaacgagagaaatgctgttgtaagatctcattctcttatatccatctcctgtttgtatggatgttttatgtttcagcaatacgttttgtgaatgtgtgtctcgtttaacacgtggtcaccttcttgggttgtttctaaagattgttctaagttcgatgagttttttgttttgggtaattattttttatatattatatataattattctgatgattcggtgtttgataaaaatcaagttattttaggaattgggttttgtatgttctacgaattggcattattaggtttggtttcttaacttaataagagattttgttgggttggaatgctgaatgagatttaaaaaagcatcttttaacgtttggatgaatgtgacatgacatggtgctggatccatagacatctactatgtacacaaaaaatggccactgttatatacaaacacatatattgtatggtgaaacatgcatttaatgcaagtatttatttgttaatgtgctggtctttaccatctgtgctgcaaatcagatgaatgccagaaccagttactgttcttgtatgtgaatgctctgacgagttgtttattgggacttatattctacttttaaatgcagatggcacaaactcccctacatgttgctgctggtaacaataggaccgacatagttaagtttcttcttgagttaacagggccacatgaagttgaattggaagccaagaatatggttcgtgaatttcttttaattattatgtatttttccatttatctgtcactggcttgtccggattgagtgttatcttagtttttgtgagtttgatttctagctaggagagatctctttctattggtcttatgtttactagtatttgttttttgagctttgcagtatggagaaactcctctgcacatggctgcaaagaatgggtgcaatgatgctgctcggatgcttctcgctcatggtgcttttattgaggccaaagcaaatgtgtttttccttttcgccagactattcaattgtgatgaatcaaagaattttgtaagaatatctatgtggcagtttagctcatgaatttctatttccatccatgcagaatggcatgactccattacaccttgcagtctggtactctctactctatgaagattgctctactgtcaaaacattgctcgagtctaatgctgattgtagtgctgaggacaatgtacagtgcgttgcatatataatttatatttcactttggtaggtcatgctatgtaaatgataatagtctgtaattattttaatttcaggagggaataactcctataaatcatctctccaaagggtctgctaataataaattgagggaattattatactcgtaccttgaagagcaaagaaagagaaaagctattgaagcatgcagtgaaactaaggctaagatggatgagctagaaaatgaactgtcaaatatagttggcttgaatgatctcaaaacacaattacgaaaatgggcaaaaggaatgcttttggatgagaggcgtagggccctcggtctgaaagttggcacccgaaggcctcctcatatggcctttctgggtaatcctggaacaggtatgtagattttttttttttcctgttgtcattgtgcattttatatagccacctttctactatcttacttgaatcactctaaatctcaactattacattatggtggaagggtttagaaataccaaaattgtacactcctgtcctttgtattccaatcggatcgtgtgaacaaaattcttcactttatgtcttttatcatgcttggttagctagaaaactgagattaacattactaatcctacaggtaagaccatggtagctcgcattcttggaagattactccatatggtaggaattctacccactgacaaagtaacagaagtacagcgaacagatttagtaggggaatttgtaggtcatactggaccgaagactagaaagagggtaaagtgttatttcttcattttcttcatttagtttttgtttctctagggatagaacttgaccatgagaatcttaccttggacacttcacagataaaagatgcagagggaggtattctatttgtggacgaggcttaccgtctaatacccatgcagaaggcggatgataaggactacgggttagaggcattagaggaaatcatgtctgtcatggacagtggaaagatagtggtcatatttgctgggtatagtgaaccgatgaaacgtgtaattgcttcaaacgaaggtttctgcagacgggtgaccaagtttttccaatttaatgacttcacttcagatgaattggccactattcttcaaattaagatgaataatcaaacagaggatagcatattatatggctttaagttgcactctttctgcagtgtagaagctatatcagaattgatacagagagaaacaacagtgaagcagcgtcaggggatgaatggagggataatagatccgatgcttgtaaatgcgagagagaacttagatctcaggctcaactttgactgcatagacaccgaagaactacgaacaattaccttagaggatttagaagctggaatccagcttttgacacaatgaaatggatatttcatcataagttaagtctttgggaaaaatattaattcttttggcagccaagccaattagagagaatgattcatattatattgaatagttcagggtattcttgaaattggcctctcctcatcagaatcagtctttactgctggagattctgaggctgggatgctgcagctgtggggattgattaatatatatatacatagttttcttttgtcttta

SEQ ID NO: 14953 - DNA, 8393 bp, Cannabis sativa
cctaggcacaggcctagcccgcctgtgcccagggccgggcctggggacaggaaaacattccctacaaattcctcatcttgtctgcatccctacccctatctcagtaactattaattttttttagtttaatttttttttctataattatatacgttgtaaataattataaataatttacagtattaaaattattatttaaatattttattacacataactccttttttttcttttaataaatatgctaagcaattattttccctttattttcgattttatacactattccaaatttttcaagacttacatttggtcataaaacttttttacataccaaatcataaaagaaaattattaaactaaaaaaattctccacaataccaatatatatcgtttttccaaggtaatacataaatattaaagtgtttcaaaaaaaatatttaagtgtaatgtggttcactgtaaggcaacgatggtctctaccttttagccaatgaagagggttgtagaattggcttcaccggtgggtgcagaaggaagatataaaagactgtccctttccccatatttttctatgattctctctagctgtttccagccaaattccatctcccaccgctttctctctcaaccacacccttattctctctctctctctctctctctctctctcttgtctattctttctcactctgatatatacagctcaattattatagcaaaaaacttatagtctctgtttacaatcatctaccattaacgatctggcaaagctcagtttcacaaggtatgctctttacaaaaaaagcttgaatttttttcatttgggtattgctaattttcaacaaatgttgatgggttcatctcaagaagtttctttgaactttttaaggatttgggtctgtgtcaaattgtgtaattcgtaatgggttgttgtttaattgtgttttaaaggacttgcatggtagttgaattgaaattgatcataaagattgtatcttgattttgtttaaatttttgttttttttttagcaggaaagaaaatcttggaacaatcttaatattggagaaagcttctaaaaggaagcttgaggatatataactctggccgatattttagagatcttagctaaagccggagctggcgtttttcctttgttctccggtccaagactttgtttcaattggcctctttcacttgtttggtgtcttcccattgattatggctaagttttgctaaacttaattactcctaatgtgaacctctacttgttacaatgttctctctgtggtagaggctcaaaagttaaccattagagatgtgagaatctatagaacaatttgcaagaaaaaaaaagaaaaaattataaaaaaatcagtatacaaaaagacacttcttttttgggtcttagatttcagacagttataaagatggccaagttcaattgcttctctgtgattggttggaagaagaagagtagtaaggtaagaatatatattatcaagttgattgtttgtcaatttcctatttcaacttcttccataaaatacatgtaatttattttttatggtgatcttctttatagctacaataacaaatgtgtgatggtgtaactataatgaataccgtcataaaatgaatatttcggtgtggttgagaaagagtttgtaataggaggggtaattagcattcttttatggggtttgtatttgattttggtagtttgtgtattgaacttctgttacttcctatctttgattttaggacaatgatgaatctgccaaagttgatgagtttaaccaagctccaagcaccctgcaagtcagggtacaacaacctttgaaatcatccacttttggtgtcacaattccgttgggaattgataagaattctgagtgtaatatcaaggtgattagccatgagagtcctcctgttgggtatgaggctgcagaggtagcctatgaaggggaagatgagcatgaagagaactcgtcgattaagcgaaacctttctgattttgatcttaaagtccatgaaaaaaccaactctgctgaagacttaaagagtggattttccaaatcctttgatggtgatgttgagggggatgttgatcttatgcaaagtgggcatgttagtgatccggggattaagatgacagagttctgggcctccccgaatcttaagcgttcgtgttcgaatttggagactagtgatgtgcttagaaagatagctgatcagttgcctccaccatcaaagtctcaatcttttgaacaattgcatgaattagccgaaagaatgaaaagagatattagctttggatcacctaagtctgttatgagccatggtagtgctgatagagttatgcttaagaagcactcttcaagccaagttcttccttctagaagcagaaggctatggtggaaattgttcttatggagccacaggaacactcacaagccatggacaccgagacaaaaggcgatatctgctgtcttgaaccaacaaggagggtactcttcagatactcttgaaccaaacagaggtgtagagtttagtaagatggagtcaccgggttcattcaccggagaatctttgtttcgagggaaaacaatccatgaagataagcagagttgggatggttttcataccggggtttctggtttatggccacaaaatcaatggcttgctttcccaactgaatcatcatcatcatcatctccatatgctagagtggaagagtgggtcaaacatcttgagccacaccaaatcaatgaaggcgaaaacaacatcaacaatgaggaagaggagggcattgtcttcccacccgagactccatcgcaagcaaggttcccgaaccactcaactaggcgatctgatattaatctttctgaagagattttacatgccaatagtgtcattcaatctcttaattcatcttcaactgtggctcacattgctggaattggattaaaagccattcccaccatttcatgcttttctagtctcagatcagtgaatctctcaaacaacttcataggtaataataatgctagcatcaaaaaattggttagtcaatattgtttattccactagtactgattcttgtctctgttgcagttcacataacgccaggatcacttccaaaaagtcttcattcactcaacttgtcaagaaacaagatcagcaccattgaaggtctccgagagctgactcggttgagagttcttgatctcagctacaaccgaatatctagaattggacatggtaaaacactatgccttttctcattttatcgtcattttgagttcagggtactattatgttctattttgaaagatacagggtccaaatttgatttgattattcttgtttcaggcttatcgaactgtcaattaatcaaagagctttatctagctgggaacaaaattagtgatgtcgaagggctacataggctgctaaagctcacagttttggacctgagtttcaacaagataacaacagctaaggcgctcggccagcttgtggcaaactacaactctctgcaggctatgaacttgctcgggaatcctatccagaacaacatcagtgaagatcagctgcgcaaagcggtttgtgggctgctcccgaagcttgtttatcttaacaagcagccgatgaaaccccaaagggctagggaggtactcactgacagtgtggccaaagctgccctcggtaatggaggatacaactctcgtagaaaggctgcgaagaagatcagccaaggcgggtcgtctggggctggacacaggaccaggcaccggtctaagaaccgagctttgcagccaacacctttgatgaaggcatcacctgctgttgcttcatcgtcacgttaagtgtttttaatattttgaaactgtcaaaaaggcagatgttttctttttgagggttgcatgaacatgtttttgttcagtactatgtgaacatctttgaaagtttgtaatttgtttggaatattgagtttgggagagtttatgtttggattttacattattggcaatgcttttttctttctacaaaacccgtttacattttccctttggaaaattctgtgtgttttttggtacattatcattagttataatttaactatattttaacaaatttcaaaaaattctaatgcaaaatagatattacattctactttttttttttttgaagagtaaactttcattgaaaataataagagggttaataaattatatagaaaagaagaaaaaattttctatctaaactagttcatctactcgaaatacaccaactcttaattcatgtttacataaacatgaattaaagatgctttaggaatttagaaaaattggatagcaaactagtaataaaatttagggaagattctacttcaaaataaaaagagaatttcttaaaaaatacagtaataaaagataatcaatcagactgaaaagattttataggtagcacaatgtaagaaatcaatccagtacaaacactaaagctacataagtttagcttatacaaatatgtcaaatatgtgaactttcctataaggaagaaaactagcaagaacatatattatactaataaaaataaaaaatgtaaaagataaatttatctctaacttaaatatttgaagagagattttgttcgaacttattaaatttttatcaactcaaaaaaaataaattaatatagaacaatatcactgtacaaaattacacaatatcatataaaaaaactaccaatgttacaaataaaataacttataaaatcaacactaaaaagaaacttgaataaaatttggccatgtaaatgaaaattgtaaaagaagttattaatattgaataatactttataaattattcaatctttttctaaaattatcatataacgaacgacaaatcgtttgatgtaaaagaaaaagtaaaaatgagaaggcactgtcgttgttagagcaattaattaaacgaccaccaattccatcaaacgacaatggaataaatgacgaccaatttcatcaaacgacaatgaaataccatttttctttttctcagaagaaaagagaagaagttgatctgatcgcttttctttcattcatttcatatcagagagccaccgccggccgccatatcgtcaccgtctgcgtctttcgccgttcatatcctaccgttgatcgcatttcttatagtcaaggtacaatcaaaccctaaaaacttgttcaattcaaacactctagggttcaattttaattctaatttggtttggaattgattgcgtattggatttcaaaaatttgagttcgaatcatgttcaaactctgtatgtaatctctctgttgttttgaactcaggtactgtaatggaggttgtgaacagagtagtgaacgctgcaacgagagccgccaacagcaacacggtgctaaatgtgtgtttggtagggtcgttcgtggtgcttagcgtaaggtcgatgaaccagcagaaggatattgaagccctagaggctcagaaagattctctaatcaactctaataagctcctcaagaaatctatttgggaatggaagcaaaagctctatgctgaggctgagtctgattccccttcggtacctctttctcgccttaaagccatctatggtgaagctcccgtaccccaaaatggtaatctctctttagctttctttttcttaaattgttaatgagctatgtcattccattttgtgctttaaaaacctaattttgatggcattttgattgagaggagtgagttcgattttgagtttgtatgtgaaagagtttatcactagcaaattggtgtcattttgtgttgctttgagcggtcattttgcaaaagctctctttttgttgttgctattttgtcttgaattgatgagagcatggtcatgatccttatgttatgaatgaaacttgaaagttgcagtggcagaaaaaagtttaacttgagaatcctagctagtttaaagatgtaattaaagataattttacccaaaatttatagagctaaagggttgttttgagttgagtgctcaatgcacatgatatttaggagacttcatgttttttctggttactgcacttgtttgaaatggtacttgagtgtacctgtagtaatatagtctgtgtagagaagttatctattgaaatagaatatccagcttaggcttactagcttgtgtagagaactcaacttctaaaataatgatctcataacttgtaaatggtgaacttagtatatggatgaggtagcaaacaacaggttgatgacatgcataaacactctctcgatgaaaaatatgatgagtaggaatcgtagtactatgagatgtgattgatcaaaatgatttgattcagttatctgcatgccattacttgaataaaataaacgataagacattgtcttgctctaaagtatgattaggtagtttaacaggcaataatgcaaggtagatttttgttttcaattcatgtctatgctcaatggtgtgaatgtctcttctctctaattttgtctacttttgtaattatagcaggtaatgcatcaaaggaagaagctaattctactgcttcaaagtttgtaatataatcttattcttgccattcttcaacagaagaactgttgatatttagatttagtggaagattttgtgttgcctttagaagtctcatacgcattacatggaggttggtattgctgcttacttaggtcttgcatagtgcttattaactctttcatctgaaaagcttaaaccttgttttgggtttcgaaaagatatcaaaaccatcattgtgaaaaaggtatgctggctgtttacatgagagactttgtttgctatataatttgatcatagtgaaaactgaaaaggatttttattttctacattagcacagtttcatttttattagtcttacccttatatttctttgatagttttcttcctaaattcatgatgaacaaactttttggtgttcttatcttcacatggccaactatttaaacattaccctcatttatttaataagggaaaagggaagataagtgtgtgcatattaattagcatattgtctcattcaatgtggtcataaatttatatttagcatttggctgtttacatgtttgtgaacattttttcataaaaaatcatctattgtatattagtaattaatttttttttacaataaaatgctattacaatgtaatttttccaacacaaaattacattgtatttctattttttatttttatttttatctttattttattactctttaatttaactcagttttacaggtcgtcatatcctcattgtgttgtgcatttaggaactctaattttgataaattatgtaaggttatttttgatactttgattataaaatatgatatttataaattaaaaatattttagagttatatttagttaatgtatgataaaaaatagtagttttcaacttattctttcccaatacctaggcgacctatatcacattttagtctaggcctctattactcttatgtagggatagaaatttaactgagtattgctactggactggtgttcaacactttttataggtggcgtctcactattgtttaatgatattttataaaaattattttcttaagttatatgagactctatacttaattatactaatagcaatatgacaccgaaaatagtgctagatactaatggtgtcttttgacaattcttaaatttaactgtaagtatgaaccccataagtattcacatctaatgggacgaggattcctcgcctaaatgggaaacgagataaggatgaaggcaattttttatcgtcaaatgttaaacaggacagatattgggatatcacttcctgactcctactttgatgaggatctgtttaattttttattatttaaaatattatttttaattattacccatatatctttatgtacattttttttagtttattagtaaatttttattttagtttaaattgcattttatattttaaaatattaacatctatataatcctttaatttttataaaattaatcttttttatttataattttttttatttgggttccattttttgctctgagcactctccacatttaggggtgggcattcgatctaattcaacatttttctcctcatctgatttaatctaattagtaattggatttagaaaatcatcattcgatccaattcaattaaaccttaaaatccaatcaaattcaattcaattactaatttaattggatcggttttctaattggatatctaattacacacttaaattttaatattaatacaaaattatgaaaaaatacttaaaaattaattatcactttttatataagtttaatactctata

SEQ ID NO: 14954 - DNA, 11149 bp, Cannabis sativa
  modified_base (10667)..(10681): a, c, t, g, unknown or other
  modified_base (11106)..(11107): a, c, t, g, unknown or other
aagtgccttgacattgttttcatcctcagacaaaacctgtccaaaatgcccaaaagacgatttcataattgattctctagttttgtcaaatcgtatctatatgattatacccgtcaaaaacttctagcaaaagacttagattttagttagttaaatgagttggcatttcctaatttcattaagtcccctcgatactgctctaattttcatgatcttattttttaattacacttgagttgcttgttcgacaaaaaatccctttatgtataataatgagattgtagcgagtatagtttatttgcaagtgaatattgtaatactcacaatgctgcattgtccaatggcttcttcgaatcgttggagctttattaaacacgcagacatgttgaggtggcatggattcttaactgataaggccatgtctcgatacttcccgaacaattggaacataaagtcatcccccatgtacgttatggcctgacaatcccgaaaacaattgacccatcaatacagaacataaggaaatttagtatcaatacgaggaaattaagtgagtaccattgcatactgttgcatggcctcctccagctttccctccttaaacaaagcatttccgtccatctttcttctgtctgctgttccaatcctttcctcgacagtcatgtcgctacgaggtttcccctataaataaagaataagttacctataagttatatggccgatttatattgaaaaacccgagtaattgaaacttcatattttatttggaagcaacttacatctttggcctcatcaaaccctacaagttcaacttcataaatgatatcggccataggcggaacattagggaacgaaaagtttccttcttttccatatcctaattcccagccaacatgtaacaaagctcgttcaccagacttcatggtagagacaccaatagccaagcctgtcatttctttcttctctgtcgcagaaacaagagaaaacattttccgaaatgagaccatgcaattaattcaagtcaaaccagctgaaaatcatgaccttagtagctaagactacaaacaagaaaagaattaattattcgtagaacattgaacatttcctaataaaaatcaggcacataccttttcctaaaatcatttctactggctgttgttctagccaagtgtcttcaaacttgtgctgtgtgccttcagtccatgccctgtagtgcactatttatgtacaaagtattagataacccggaaacaataaatcctttcaataaattgcaatcgagcagcgaaggtaaatataagaaaaattttaatttcgatcaaagattaatcaactaatcaattgtatggcattcctttcaagttcaacaaaaacaaaataccaacaaatatattatggcaggtcaccatcatgtcttagatcgaaatttattaaagctacaaagttgatggctgatgttctcactttaaagagcaacaacctagtactctaacttgtaaaagagtttactatacaattttgaatgtgtattaaattattttgggataccacaaacccccttaacataccaataataaacatttgagatgtaacaataacaatattttatctagcaaaattggtatagacacaaggacttatacaaaagttaagaccagaataaattatttctatccatatgcaatagtatagaacaacttctttttctaaaggaagggcaacccgtctgctaccaagtccatgcggcctttatttggtcattagaaacagagcaagcacttcaagataatacaacttatctactcgaacttgaagctcaacttgactttctttctattctaagagttgggagcgatcccaaaatcaaatgggatggaatagaaagaaagcaaagcgctaaacctaaaggaagccgaagcttccagtttcacttcttcgggcatatctcacaatctgccattacaatctgtattcctgcataactcacaatctgcctgatacaaacttgtgcacaattcagtccttgaaagaactacaagttattcgagaaacttggtaaactccctgagtagtatttacatttcacacaaaattctctccccgtatttatttataggctaaactaacaaataattctaactggccaaccaaattagaagacacaaacttagaaacactgtacacaaccactacagacttgactattaagcctccataattctaatgagttatactagtgagattaatattaaggccacaaatgaaattgaagacctaaaaatctaaataaggcctgacaaatcaacctaaatcttttggggtcatttgcaattcctacccaagagccaaactgtgggaaagtagaaaaaaacacttacagaagcaagttgaatatttggttggtgtagagccatgaccttccacaatgatttgctttgtgactttctcttgtagaatatccacctctgaatcaactttagggggaccattaccactaccactagcatcctgagtaggcagctccccatgaacaaatgaagcactttcagtaacaacttcatcctcctcctcattttcacctgaaaaaattatagagattagttatacacttcctagagttctctctctctctctctaaacacataaccaaaagtgaaagaattatacctttaccaagtgattgattcttttgatcctcaaaatcagccataatgggaaaaaatggggtttagccaaatgaattaacctacagttacagaagctcaatcatcatcaaccaatacagcaatatatttagtcaattacatcaaactcttgagtgataatgatataggcctttcatcctttcatcaaaatgtacttcatcactacattgaggcatttaatcaaacaggtaatagatattaaaaagttttcttttttaatgtaaaaacgacaaaccaatttagatatcaaaatagaatttcatataaatcgatcggaatcagcaaaattgagaatataattgttttaatcctcaaaatccacaacacttacagaagctcaatcatcaacaaccaaatacttagttgaattgaatttcagagatgaaaattctgaaatgaaaatgctttaatattagtgaagaagaatggatcaaagtacctgaagttaaggttgatgaggttggatttgacggagattcagatgagaaatcaaagagagcaacctcagattccccttttgtctagtcaagaatgttcttccttcactgaccttattcttttctttttggtcctcctttaatttagagaattgctaaaatacacctgttatgccactatttacaggagcagactcatataaaagcgaagaaaaaaatatatattttagttagttataacatatatttataataaaaataatatttacagacaaaatgttatatttggtgtaatagttagttgaagttttttgcggttaaaccctcttaattgtcgtttcacttgtatttaaatcttgaaattcaaattttgatagtaaaaccctccaaactactgaactagtagcaaatttaaattgtcattcttttaactgtcactatgagctgtttatattggtacacctaatattattatttaaaaattattttcaatattcattttaaaattaaacaaaattataaaaaaaaataaaaaaatattataaattttgaaataatttttatatttttaaaataataatattaagtgtaccaatataaatttgacacatgtataaaagtatacacataaacagtctttattagcaattaactgtaaaacgtatatgacaccttaaatttgcaagcagttcagcagtttgcagtgttttaccgtcaaaattttaacttagagaattaagtgcaactgcaatgataattaagaggatttaaccgcaaaaaccatcacatattgtaattttactcatataaatttatattttttatttttatcttcacatatttttatatttattctcatatatctattttagtctatataaaatattttataagtgccctttttatcaaaattttctttttgcccccttaatatttgtggttgctcttcactgattttgccgctctactttacaaaaaaaaaattacatcctctttactttaaattctagattcgtcactaactattggtgtaattaaatatcgaatcagatataacttaaaagcatctccaatgaaaattgcctattagagtgatcttgtcacatatacaatgtggtctaactttcaagattaattttaaatatagacaataaccatttgaccttttttattagaaaaattttaatattaaaatacaacaatccaaatttgaaaataattttaagtgtataataatctattaggcattatagcactagaaagtaaaatctcacaagtgctaagcgatttatcttttttaatagtaataattaaacttaaatatgcaaaaactttaaattacacaagtaacaatatgaagtcatacataagatatttggtggtaatacccttcaatatttctctatatcaattacaccaaatgatacatgaatataatatacactgcacacaaatacataagtcaatgaaatgttgctgaattcaagcaattcatttactgatatcatgtatataatatacacatatatgtataaacatcacaaagagtactcttcataccaaaattattattggaagagatagtttcatgtcttggattttgtcacctcaatttgctagagtcactgtagtctgtaactaagaaagtaaattaggaataagtcaatgcagcaaatttatatagaatgaggattttgctgttcaaattgtgctaacctctgctctttattgcaatgaaaaggaattcagcttcttttcgagaagtttggcctttcgaagggcatccaaggcctctgcttgctttcccgatcgtttcaaattcaatgccttcaccttctcggcttttacctgttcttctagttgaattctttcttggttagagttgttactcgtgccaacatttggtttcgaagactgcattttatcaggaacttgtggcgacatgttcgtgttttctattccaattgcttttaaagcagacaaaagttgaggatcaagaaaatcctcaacacccacatctttatcagtatctaagccatcgacacctgaattgatggactcgttcgctgacaactcctccaattgggtctcaagtgccttagccaattcaaactcagcatctgcttcttcagtcctaccctctcttcgcaacttcaaagcttgacgcttgtgagcaagggatttctgttgcaacttgaagcgttcacggctagaaattggttttggttttgacacattgtttgatgtaccaagctctttttgggcaacgggagaaacactaggtgtggaaactgactcagctgctggatttgttatcgatttggtattgtctgtctcgagatgcttctccaacaactttgcttgtcgaagttcctctcgagcttctgttaatttcccttctctctttaaagcaagtgcctttctcttacgagccaaaatgtcttgcttaagggtagcttcattgatctgagaagcatgttctttgacactacttgcatcagaaaaattcggcttctcatctttggcaactctactttcttgtttttcacttctaacactagcttctctagccacaggtgcatgttcctcagtaaactttgattcatgaggatgtggtttctcaacgactcctcgtttttcatgttttatatcatgccctctcgtcgtgtctctcgtagaactattatttaatccatccatttgtttttcattagccatttgggaaccactccaatcatctcctgtcaagaaatctgtcaagttcatcaaatcactcggcggatgaatgctagtaccctttaatcccgtgtggttcggtattcccatttcacctaatatcatttggtcttccacaattagctgtgagtttagaggaattggcatatcaaaattttgtgatggatggttgccagaatcacttcccatgctacttttatcaatcgataaatcaacacgaccggatgtttcacgagacatcctcctgcttacttctatgtcgccgatttcattatttttctgaggtttctcatcttttgaagcttcatgtagatgtgcctgctttggggcttccagttcttcaatttgaatctctaaaacctttgcactcctcagcaattcttccgcttcttcaatttctcccttccgtctcaatgcaagtgactttcttttcaaattcaaaagttccctttgtaactcgcctttacttcttcgagcaggagcagtaagtggaggagaagattgaataagagacgtgttatcttctcgtttttcatgcaccattgcagcatcttgttcgtcatcagtccaccccaaattctttaaaactgatagcatctctggatcatgcatatctgattccgtgatatttactgcatcaccagcttcgtcatctgcaattacaaccggtgattttgtaatagcttctgcccgactattaggctgaaaatcttttcctagtgattcactctcggctatctgtgcctccaaggctttcgacattctcaacacttcttctgcctcctcactctctccttggcgcctcaaagccaaggcttttcttttcaaacccaaaagctccctctgcatttcagctttgcttctcttcggtaccttaacatggactggtgcagcttgaggtacagaggatccgcttgcatttcttcctttggattctggtgaaaggtcattgtcttcatctttccaacccaaattcctcagaagtgaaagataagttggatcattcatatcttgatcagatatgttatcttccatctcatcttcgggattctcattaactgaagtcggggccttagtatgaacagccacggacttattcttcacatttaaacctttttccatttcttcaagttgatgttcaagaatcttgcctttctttaattcttcttcagactcatccaaccgcccttccctccttaacgcaagagccttcttcttcaatcccaaaagctctttttgaatcattaatttactcttgggtgcgattttggaatctgtgtcttttgctgcatgagcatttagatcatttgaatctttttgaactcttgcaggttcatgggcaacgtttccttttcgaggctcaaagccttcaaggtctctttcgagtagttttgccttctttaacagattcattgcctcagaaacattacctgctcgttttttattcacagcctctcttttcaaagatagaatttcacttaatagtgtttccttgtcaaatgaaatatcagaattaacagaatcttcactccatcctaatgattttaaagcagcagccatctcagggtcttccatatcctcttccgtcacatcgaaactactctcgataatctgatcgtcagcaacacctaaaagactgttaaaatcaaaaccatgttcttgctcaattggatcggaatatagatcttgtttatcgctgtccatactacggatcaatgcagaaaggtcatcgtcagaatcttcagcctcaccaagaagttcctgttcttcaagttccttttctaaaactttagctctctttaattcttcttttgcttctgccaattttccttcgcgctttagtgcaagagctttctttttatgtgcaacaacctgagttttgtctatcaaattagcacccttactttttccggcgcccttcaccgagacttcacctaggagagaagagaattcaccttccaaagtcaaatttgttacttttttgtcttcactatgcagatccatatcggaccacccaagttctctaagctcggccgcaaggtcatctttctctttaccctcagaatgaccaaccctattcctttttctagactcaccaagaacatctttaatctgaacatcctcggcattcccagaaagcaaaacctttctacgattttttcttaaatttttctccaacgcatcagcttgcctttcaagctcctttcctcttttaaaagcttttagtgcttcatcagatttcccttctccttttaattgcttatacatcttcttttcatccaaagcttgctggcgcaaatcatcaggacttgcagcttccttctcggtcgatgaagaaccaaactcatcaatagattgacttctacataattccccctccccgtccaaattgaaaacttcggtatttgaccttgctgctccttgaggactagacaccaattgtttactgcttgaaccaagtcccgatgcaagagcttccttcttttcatcatttagaatctgatttgagacttcattctcggactttgatgttgattttaaactacctaaaatagaaaagattttatgagatgggaatgatcacaagcataaaagacaccgcaattcaaagtaatattatgtaagtgatgaacatgtggattcatattaacaccgcgattcaaaaactaaatgcgagagcacataaaccattaaggaaatgaggatatcttgaggagccatttaatgatagacataaataggaaaagaggttccattaaggaaatgaccacactacatggggcaatggtgccaaacgtaatgggcttagtgtaaattagaaattccgaattgaagacaatatagaagatgcaagaataaagcacttggcacttgttgtgacccaaccacacagtgaatgacccaacaaaaagagttcctagctcacgggatgacaattcaactagcaatctgagttcatctaaaggcctacctctcccaactctgctcctgtgtccatggcggagttcaaaccgtgctgcctcctctagagttttgcaaggttcacaaatacgcacaggtgaatcgccctgtccacgtaataccatcctttgctgggtgcaactactgcagaacaaacccccacatcttcggcaatgatgctgagattttccaaagtgtacaattatcaaatgatgaaattagcaaggtcaggcatgaactaatatgaactctttacaagtgctcagtaaaaatgaaataataactttaaaaaataaattattaaatgaccatcaagacaactctataaacatgttctgtgtaacaacagggttaatttgctaatttcacttcctcacattgtacacctctcaatcgtatacttgtttcgagtaacacacacaatgacacatattcatgtaacagcaacataacatggaactatatttctatatgaatcgagaaactggaaaaaatgtatcttccaaaatctgcactataagcttaatgaacaaacggattaaagaataacattaaaacatgatcaattctaactaaaactcacaattaaatattctaaaaaactatgtatgaaagaaaaaccttgcccaaaactcaaaaacaaaaaaagcagatcagagacaccgagaaataacatatttattcgattatttaaagaagaaaaatgtaaaaaaaaccttgcgattgatgaaagtaaactgagcagaacatccctgacagtgggaagcatccaccacccaactgttccctcgaagtgatggccttcctggaagcccaatcttctccaacatcttttgttttgctctccaggaatccaacaccaactctacaaattaaaacaataatatcattgactaaagaatcgatcttcccacacattatatttgtatatatcataagtaaaagaagatattaattaaaagagacacaattagagctataataaatttattcattaacaaggatcaaactttataacccaacatagtacaattacaacattcaaaacttaggatttcatctaaacccaaaaaaacaaaagaaagtattaagtattctaaaacagcaccatggataacccattagtcaattacatcaaattattgaatcaaaatgatcagtgaggaggcaattcatcaaaatgtacttcataactacattgagacatttaatcaaacaggtaatagatactaaaaccagactaatacataaaatccaaacaaactgaaatatcaaaaaaaaaaaaaacaacttcatataaactaaaagaaagaaaatggcagcaattggaatcaacccaaaacagaaactcaccatctaaatgaatttatatatacatccagattgaattttacatatagttatatagattttagtgataccttgtgctaatggcaaagtagaagtagaatcggccgttgacggaagagatgaccttggttttttttcttctagggtttttggaaagaaaattgagaaaaagatacgaactttggaatctgatcagattgggaagttgcctgaaagttaagaaatttcacttaccaaaattatgtcaatggaaaagtacaacaacaacacaatttagaaatatttttatatatatttaagtaaaacacaattatgtaaatatttaaatttaattcttgattgtctattcaaatttaatttttttataattataatattttaattatattattagaattttggtagacacaatcaacaatttcacatcttaagtattaaattattatctatttattatttttttattagtatatttaannnnnnnnnnnnnnnaaaataaaaatttaatgactttaatcgatctaggagatgaggagtgttgtcctgatccattcccattaagaattttaatccccatctctatttatttctcatcgggcatgcgcaaagaatcttctaataggaacaaagacgggatagaaacacaacttaaaaatcataaaaaaataataataatatactaaaaaatacaaacataaattataaaatattattagaaatattattatcctcttaaatttacttttctttgcgaatttgagacgtttgttaaatattactgttaaatactaataaaacgaccaccgtgtacaactgtgtatacatgaaagtaaaactttaaaggcgatacagtaataattcagttggtatttaacggtgatatccaactaacattttaaatttaaaaaaaaaaaaannaaaaaaaaaaaaaaaaagtttttccccttttttttttttttt

SEQ ID NO: 14955 - DNA, 17240 bp, Cannabis sativa
  modified_base (951)..(952): a, c, t, g, unknown or other
  modified_base (1504)..(1504): a, c, t, g, unknown or other
gagaagaaaaatttacacttggcactcgataataggtttcatacaattatttatatattattttaaatgaataatttatatgttaagtgatgtttaaattaaaaaggtataataaagaataaatatttaaattttaatgattataaaattattttttaattatttaaaaattatatatattttttaatattttacgaaaattacgtcatcatcaaaatatgaatctttgatagaattgggtccacttggttgattggtaattaattctatacaattatttatcttattaatttatactttttttagaataaaaatattaaatttgttaaatgatgtttttttttttttttgaaaagtttgttaaatgatgtttaaaactgcaaatgtatgacttttgtaacctcatatgttatatttaatgattataaaataatttttttaattattatgtcattattaatattcaactccatacttttaatttatttttttaaatgaaaacaaaaaaattggaagagttatttaattattataaataacttaatataaggaaagttttaatttttaatgtaaaattaaaaaaatattaaattttaaatttcattcataattaaataaaattctaatttattttatgacttttttaagttttaaccaaaaaaagtaacaatattacaaaaatacttccagctggccaaataaacaaagatacagctcaaataaaaaaaattacacaaataccacttacacacacattgaacccacgatccatgctttctaggcaactattgcacaaccattgcgcaactacacagcaactcaacgcaaccgaaacaaaaatttaaccagaaagagacccacatttaatttcggcgacttcacctgagaagatgatccgaatcaatcaaaacaggggctatttcgaattcataaaaaaaagtgtagaaaaannactacgaaactaaaattcaactggaaatccagtttactttgcataaaactaatgtcctgacttcaatttttagatccataaaatgcagatctcaaaaagttaaactggagttgccaaacaatccaactcaagtataattaaaaaaaattacatcaatactatattaaaatatttattttagtatatttttgttgtttttcaaatttctaatggtgaatttgttcatattaaatcataaagagacatgtcgatagagttacgtacgtagaaacactgttctaatttttaatgtttcacaacagttgcataaccattttgctaacagttattttgtctgattgaaacttcgtctgacgcaacctttggccaaccacccaacaactacccaaaaactttcgtctaattgaaactttcgtctgatgcaactatcggccaaccacctagcaaccactctgcaactatcgtctgattgaaaccttcatctaatgcaaccaccgcgcaaccacgcagcaaccaccctgcaactatcgtctgattgtgtaagtgataatntaagtgatattttggtaattaaaatcacataaaatgtataattgttgtctttaccttatggatgtatttttgtaaataaagtgtcaatttatattttctatgtaataatttttttattttcatataaaattaaaaagaaaatattaaaaccgcactaagtgcggaactattctctagtttattatatattaatttattttttttaattttgtaactattttattagtgggtcggaagtcacaattctcaattttaatctttgttttttaatattgaaattttatgatctaattctgctaaatatgtctgcatgcccctaagaataaacctttatgaataaaaaaaatcttccattaattacttctttttttaacttatatcggtcaccatacaaaaaaaacactcattcagtagaaaacatataatctaaaaagattacaacttttcttcatcatacttctctacgtatttacttgagaaaggaaaagcagccaacagaatcatcggcgttccacgtctcacctcgtacaaagtaacggctgagatgatcaagttaactggacacgtgaacattccctcgtgtttcagtgttccaatagaaatgccttccttgaggagagcacgtgacctctccataatatatatataatatataaatttatacatcttcttcttctcaaaactccaaactgcataactacccaaacctctcagctcccaccatctggctcttactctctcaacactcatttctgattatctgataactaaaagaagaagaagcagaggaagaaaagttagggttttttaataagaaaaacagaggaggcttttccaatggagccttcttgttcgccttctgcagcttcgtctttgcatattgccatggcggctttagtaggagcctcaatcatggccatctccgccttcttcatccacaggcgaagcgttgaccaagttcttgaccgcctcaccgagctccgtagagaaggcgggaagcgtattgtgaaagaacgttttgatgatgaagaaggagaagaagagggagcggaagagtttgaaaatgaggctgagtttggtgctgacggtgaaatgggttttgatcgaaggaactcgatgaagtctgttgatgagaagcttcttcggcatcatagaatgtcctcgtcgttgcccaatgtggctttgggaaactacgattgggttgaggataactccaaactcgattttgcaggaaactttagagctcaagggttttcttcttccttggataaacttaatcacattcctttggggcttccgcctcttcgaaccgatcaaagacacggtatgagttctacatataaatgtaaagaactttatcagagtattgtgtatttatatttgacttcgaaactggctaagtgattttttatttctgtttcgcaggggacttatctattgagcgttctagctcccgtagaagggtggcttcagttgaaaggttaatgaccccaagatcccaagctgggacctttggcattactggggattctgatgatgatggaacggaacttgctattggagatgaagaattcttcaactatgggaacgtagaggtttcaattgatggcatgagtggactagtacgtgtagttttggcttaaagaaacttgacatctttttattagaaatgtgtagcttagtaaaatgaggatataattgcgcgcattaaagtggactttacttaatcaccttcacctgagtcaaatgatcatactcatgtctcataagaactatctgctcactttataattatatcttttggaagtgatgatgcacaaattactgagtggtaattcaatgtttgcaagaactgtatctactatatattaggggacgaacagtgtttattgtagtagtttcctttttcctagatatgattggtggtggcatgtttagaatagttatatgatccttgatttgttagttgaaagagtgaacttcaaatcactaagaatgcgccagatttgcattgccatttggccttactggctgtacgttctcaatttataactatgtacttttaggaatagtgacaattgcaaacaagacgtttaggatcagttctttttacttgttgacgaatttgcaggaagtaaattcaatccttcagaattcttctgcagttccagttataggtaatgatggtaattgtatgcaagatcaaacttttaaagcaactccaagcgaaacaagagctggtgtggctacacaaggtgaaaaaaacataggttcaacgtctgtggacttggttggccaagatgctactgtttccagcataattttaccatttccgtcaactcatggtaatttaactctctttctcaaaatgctttcattggtctatcgagtattggacacataattagtatcattagcataatatctacgcatcattacttttcttacatccaagttaggagataggttggggaagatggcccagttcaatgtgaacatggtctacttaaacctgttacctgattctatttgaaaatctgtatatgtagaaagaagtttgtatcacttttgcatatgacttatgaactaagtttctttacacttgctgtgatattttggtaaagatccaacgaacaaggaagaggaagaagtacgtaagatgcttcgggaatgtttagagctacgccaaagatatctttaccgagaaagtgtttctccttggatgaaagcagccgtctcaaatacatcaaatccgaagaaagacccatttcattttgaatctgttgatgcctcagctgtatgctatacttttcccatttatgtcgatttcttctttcttgtctcttcgtatagggatatacacaaatatatgtaaatctgaagtgattttgtgagcgcatgtttgatgttatcactctattttatagcactccttcaagatggaagatggtgttatacatgtatattcaaagggaaatggtaaacgccgactctttagaacatgtttggatctttggattatagctaaagatataatttcttggatagtacttcatccttaatttaaaatattcctcttaactttaataacttgaactcaaagaattagttcatgtggacttgctctttctgcagatagtgaagaacttttccctgttgcaagttcaacagcgtttttcactgatatgcattatcttttgaaagttatgtccattggaaatactcgctccacatgtcatcataggctacgatttcttgaggaggtattgctctctaaatttgtcttggtcctttgaccttataatcttatgatattcatttagtttgtgtttgtggctattatctacagaaatttcgacttcatttactactgaatgccgataaggagtttcttgcccaaaagagtgcaccacatcgtgatttttataatatcagaaaagtggatacacatgttcatcattctgcttgtatgaatcagaagcatcttttacgatttatcaagtccaagctgaggaaagaacccgatgaggtaaaaattatccattgttgcaatgatgcactaagtgttctaacttttaattgagtgttggaggtggttctagtttgattttcttatgtttttcttgacacttctcaattcgtttgattacttctgacaggttgttatatttagagatggaaagtatcttacacttaaggaagtctttgaaagtttggacttgacagggtatacattgtttctttgattgattgatttgaacggaatcctcttctctgtctctctaaattgtaggctatattgaactgtaggcatgacctgaatgttgatttattggatgttcatgctgataaaagcacctttcatcgatttgacaaattcaacctaaagtataatccctgtggtcagagcagacttagagagatattcttgaaacaagacaatcttatccaaggtttgttgctgctgtgagatgtttttaacctacagttcctgcgtaaattcaaaatggcaactgtaaatatgaaataaaatatgttaccttcaagatgattttagtgcttactaatgtttggtgtctttgttatccttaaacttcatccgctccccctcatttttggtgtcaactatgtagtgttatgtctttgcttatttatatttgttatggactgattatttgtgaatcttattgttacttcctcagtttttctatgattcattggaattttatgacttgtgtattacttttattagagttagtcctgcattgttaatgtgtggaaataaaataccatatataagatgaatgggctactcctcccattaccaaatagttttgagatagtgttccagtttttcagtgttggagtcttttatctgtttcaaaatttcttaatatttggtcatgtgggattctttcaaatgtcacgttcggtcctgtggtctcttaaagatcgttcgttctgcccacacttttcaagcccaaacgaaagtatggtgtattagaattagtcacacattgctaatgtgtagaaataaaataccatatataagatgaatgggctactcctttcattgccaattggttttgagatggaacctcatgcatcttattccaaattctaacaactttaaagcagttaacttctcagtagatggttattcctgacttagagttaagcttgaattataagtagaggttttcctttctttgggaggtgagggaaaagtaggtaggagttgtggaggtcattcttcctagttgttataactgtgatacaatatatgcctgggcagaaagaaacatagatatgttgagttgcgaactacttattttaggttgcatttgctgctacaattcaatgataacgtgtcatttcccgaccaacttttttactgtacattcaaattattacaggacggtttttggcagaagtgacaaaagaagttctatcagacctggaagctagcaaatatcaggttatttgtcgggattattttagtcaataatgtagttttaaaaaacaccgaaagtgttcacttctcttctgcctccaagactcaatgcaaccctgatttcatcatctgctatttattgaatatagcttcatttatatccttatgttaatcctaaggacatgaagaactgtacatttcaataattgcttgtaggcttatgcatttctatatttataatttcagatggcagagtatagaatttcgatttatggaagaaaacaaagtgaatgggaccagttggctagctggttcgttaacaatgcaatttatagtgataatgcagtatggatgattcaggtaccttattttgtcgtttttcatcattttttttggtccaaataatcttctcccccgacccgtaaaaaaacaactattgatcatctctacatttgaagaaagctgctatgaccctcctattctctgttctttgcatagattttgatacttcaggctgtgattgtgcattgcaaaaaagtcatgtcagccaatatggtgtttgtttatttgaaaccattacattcatgctaaaacaaactaatcttgtctgcgtcaattttatataagatcgtaactgtagagttatataagcattttcctaataatgggggataaattgctaaatttaaaggccaaagcaggatggtaattactttggttattcaattgacaacggtaattttatgcctcatttatcgaactagtttcttatgctttcattgctctaatacgatcttcatctttcagttaccacggctatacaatatctacaagaatatgggaattgtcacctctttccaaaatattctagataatgtgtttattccgctctttgaagtcacagttgatccgaatactcatcctcaattacatttgttcctgatgcaggttagtactgctccgaaattttataactctgaagtattatttttataattaatgatatgatttgtggttgtattctggctcacatctagagtactcttacattgatgcacaaaaaggcatttgtgctatgagaatataggtgtaagtatattagatatgtttatgttgtaagtgttattcagcaaaaaaataaaaagaaaaaattgtagcatagaagtttattcattaaaactacatcaacgttttacaattatatcctatttggaattttgtctgttaaactgatatctacttgtatcgattgctgactgaaaccatgaaatttgttgtggttaagttacatataaaattttctaatgtgacctctgtcattagaggctgtttagacaagttatcttgaatgtctaccatttaaagcacaaatagttaagtaagcagaatgatgaaaggaaatgaaaaaaaaacatgggatctctcatctctgtgtgcttacacatactaaaaacttgccctaaaaagagatgggaagaagcttactgggaatattgttaggatcccacattaaccaagtatgagattggttatataactacttggcaccctcctatgagtactctcttaggcagcttttgggagtgagttctacccaagtggttgtatcatagtacaagtttggttttcctacataatttatgatttaagttcttaacatctctaaatattagacttaccaccaatcataggttatgatattactggcaaccagaaatagcttggcatgcatgacaaaaattgtaatttcagttgttgcttctgactaaaaaaccatttgtaagatgagcatgatcatgtgtgtaaattcttgttacaatgaaatatatctatccttggctattctaatgaggttatctgtgaatatacaggttgtgggttttgacattgttgatgatgaaagtaagccagaaagacgtccaattaaacacatgccaactccagctgaatggaccaatgcatttaaccctgcatactcttattatgcttattattgctatgcgaacttgtacactcttaacaaggtttgtgatcttactgttaatggcataatattcaatcttgttatatgaaaactaatttctctttcttcattcatcagcttcgtgaatcaaaaggaatgccaacaataaaatttcgtccccattgtggagaggttctttcaatgacccaaatatttgtattgaatcttttatgctgattgagataatattttatgctaattgagatatttcgcttttattatctcttcaggcaggtgatattgaccatttggctgctggatttcttctatgccacaatatttctcacgggatcaatctacgaaaatctcctgttttgcagtatctctattacttggctcaggttagaccttatgagtactcctattgtcaagtatcatacgcttcttttgtttgtttcttttcattgtacttgttttcatttcaaattgcctagtgtatgctaaattttgatcaaatcacaagtgaattctcttatttatccagatcggactgtctatgtctcctttgagtaataattctcttttcttggattatcatcgcaatccctttcccatgttcttccaaagaggccttaatgtctcgctttcaagtgatgatcccttgcaaatccatttaactaaagaagcactggtggaagagtatagtgttgcagcaaaggtttaattttgactcacaattttccatggtcatgtgtattatccagttcactaatcaattttatgcaggtatggaagctcagcgcttgtgacctttgtgaaatagcacgaaactctgtctatcaatcaggatttacacatgcagcaaaggtaagaaactgagtaagcatgttttttgtgtctttttcaaagaatgtaattctacattattaaatagaaagatcacacatacaacatggtgaatttcctggtactcatcttaattgagaactttttagtataactagtttttttattattgctgttgatttgactcaaaagtcatttgtttgcatggttcctcttgcaggtgcattggcatggtagtaaatatttcttgcgaggccctgaaggaaataatattcataagacaaacgtacccggtttgagaattgccttcagacatgaggtgacttcttatttcctgatcaaccattggaaaaattcagtcgttccttcttttgatctagttatccactgatttttttgcagacatggaaggatgagatgcaatatgttttttctggaaaagccaggttcccggaagaagtagacccataaaacaaaaagcagtaaactgctatgatcattcctagcatcatagaaacaaacaacacaattgtaatgtttcatggagagggagattttgtcccgccagcatggccatgcttggcagtaaaataattcttctacaattaatttatatatacattagcttttacagatttgagagaagcattcccaacttttttagagttgtactgctgagattacgaggataaggtgagatgttttgaaaggtgattacattgatcaatgatccaaatatcataattctccttgacttctgagttggatacacgtgttatgatttgtgttcgtaaagctttcattaaaaagtgttcttaaaaatcaagggaacttattaaactagacatgagtttgattgagttaaatggtactttgtggcccaagtcatgttgaaaatatgatttggggagattattgtacaactcattctaagcgtttttcactttgtatcatattcttttttcctaagggaaatttcatttaatataaataagaaaaactcttatttcaaaaaatactttcttaaatattttatacaataggagagattttctatgggaggctagttgacaaaaactctcttctctctcctctttttgagaagtgtgcccatgcatacgaggggtttccctggcccttctagccttggaaggcaccagaaccccactggttttgggaagaaacatggccattatcccactggttttggctggaaaaatccttctggtctttctgtggatcagactttccaaaaatattggagttttagaactaaacacaaagtgtttatgataacattgacgcacgatggagggtcggtctgcatttgcgaaagaacaaggctattcggatatgaagttgttgtaactattgatgcagtggactggattatagacactttggaggagctttttcaaaaaacagggacacaaagaaccagcctcaaacgctctttcaagaacagcactaattgttgtttcctggaatgttttgcaaatattaaaggatcttttttgaaaatctcagtgttaagaaacaacaagtttaagatgataattgtaccagaagaagaaaacgagaagggttggtcagaattaaaagaatgcctcaatgggattgtaaaaagaaagatgacaagatttattgagcgaagcagccaaataaaagaacatcagaaggtagggggcctcgaatcatctttcttgggccaatgttgtgaagaaaggggtaagaccagtgatgaaagctcaatacaacagggagaaagctcaagcaatagaagcgacttgtgacagaggtagaattgaatggaaagagctatatccaaaaattaatctcggtttcaaaccgaagaatctctatccggagaagagattcactcagccaaaattctacgaatatatgagatccaaggcattgcctagagactggaatttggcaattatcctcacaaggaataatactcatgcagattggtgtacaatattctacaacctatctagagagttagagaggatgctggtggttagccaactgtttgatgatagatgtatcatatggtgcaagcatgagaaggatagagaggagctcattaagattcatagtttgaaagtccttggggctcagtccttagtaacctttttagcttggagtttggaaaaccagaaggagaatgttaaggtagaatgtagggggtcttggattggggtccaaggtttgcctttgaacaaggaaaactggggaaaggtgcggtggtctattggatgtggacaaggatactgctgaggctagtatgttgtctcacttgtgattataattacagggagacaaatacggtttcattcctcgtaaccatgcgtcacaataacacgagtttcgagctgaaattttttaagcctaacgatttaagctatagattccatggcagttttaatacttgctggtatcaagattttgaccaccggaagatgttcggcgatggggaagcgactgaaggatttgaaaaagaaattgcagaagagaaagtggttgaggaaggattctcaggggaggtgaatacgtcgggaggatcactttcggcgtcggagaagatgggtttttcaaaaacacagaaggcggcagtggaagtcgtacagcctcgggctttttgcccaaaaaaatctttattgtcctctgttgatggtgcagcggccgagaatgattatcgtcacttcagtatcaattcacgagaaggtatggtgtcaaagttatgcgtacgcgagcaaggaaaggtggtgagtctccataccgtgtttaaccgcctcttgagaagtttgagggtgccacgtgtatgcagaaatcccagtttaaatgttttcttctctcccgataacagttgtcaaataggtgaatatggtttattcaagatgggcatgggtgagttgggccgaattggtagggccccagtgaagctgggcctgcacaatactgggccttttaagcattttcctaataatgattgtgtatcgggctgggagtttattcctgggaatgggctggttaaacactttaatttgagggatttatggaattatcaaaggtgccattttaatattaccttggaccagaattttggtgtccaagatttttttaaaagggcaaagagtatggtgataagtgatcttaatgggcctagaagagaactgaatgttttggccaagaagatgaacccagaacaaataataaaggagttttttcatggcagacttcgatcgattcatcctaaagcccgagagaatttcacgaaggcgattattaaattttgggaagattttgctacgcttaaaagaaaagtttcagagtctgtactccactacaagggggagatggaactagaggaggaaattagacctcaagtgaatcgagtctattgcagaaaaagaaaatcattcggtcatggttgcgtgagccactccactgaagaaaattattatcctgagttcgaggaggctgatgaggatccaaaggagtttgagttcctagctttgagctcggaggatgaggagtctgaaggggaaggagaagaatcaatgctataagaaggagaagaaactgatgatattatatgcagcattaatgagctatggacagaggaggctgaagcttttctgaggcagggactaggggaggtgaagttggatgatgttattgttgctaagaaagatgcactagagaaggaggattttgggtgaagaaaatgagatcatgaatgatgcaacttcttggtcaaatattattgaatccatggctgagatgggctcgaaaattactcaataaattgaagaaaatgatcaaaagatagaagaggtcaagaaggcaaggcagaaatgtagagaattaaacaaactgactttcaatgtaaattatgagaaaagttataataaaccaggggcaccagaggttcattatgaagattctaacctggaacattagaggcagcggggacaaagaaaaaagaacagctatcaaagctactatttgcaaagctaacccagacttggtaatattacaagaagtgaaaagagcaatggtggatagaaggttcattggaagcatatggagatccagattcaaagcgtggattcttattccagctatagggagatcggggggaaaattactaattttggatactagaataatctcggtactagactctttggttggtaaattctcaatctcagttctgaccaattcagaaggtaaagagccttggtggtttttgggagtgtatggcccgtgttcgtataaacttagaccggagttctgggatgaattagcagggttaagctcaatatgtggagagtcgtggtgtgtggggggagacttcaatgtgaccagaagagtaggggaaaaattgaacagtagctcgtgtacaaagagtatgaagctttttgatggcttgatccaggaattacagctgatcgatcctaagcttgagaacggaagttttacttggtcgaatttcagagcttcccctgtatgctgtagactggatagatttctcttctcaaacaaatggaacatcatttttctgtttgtgagacaagaaatgttggtaaggttagtttcggaccatagccctgtggtgatcgattcaaatcctccaaaatggggacctcgacctttcaggtttgataatcattggctggaacacaagtagttttccaagtgttttgaaagttggtggaaggaggagattaatgacgggtggccaagcacaaagtttatgaagaaactgaaaatacttcaagggaaggtgaaggactggagtaaatacacttttggacaaaataaggccacaaagaatgcgttggaaggaagattgggggtgttagacagactagaagtaacctcgtcttggagtcaatctctgcatgatgaaagaaggaaattaaaagaggaatggcagcggttaaattttgaagaagaaagaggtatttcgctgaaatctaaatgcaaatgggcaaaagaaggagatgcaaactcaagattcttccataatttattgaatggaagaaaggctaggaaaaccatctcgagaattgaaagagataatggggctattattgataacgagaaggaaattgttgaggagctaatagcttttttctcaaatctctatacttcggaggtgagattggggaccggggttgaaggtattgagtgacaacagattatggaatcctcagccagaaaattagaatgaccttttgaagaagaagaggtcagaaacatcgtctttagttgtggaggaaatacaagtccggggttagacggcttcagcatggcggtcttccaaaataattgggagacgatcaagaatgatcttatggaagtgcttcgggattttcatagagagggaagaattgaaggcagtatcaacgatacttttatatgtctgatccctaaaagattaaacagctgcaaattcaaagatttcagacctatcagcctcatcacaagcgtgtataaaatcattgccaagactcttgccactagacttcgcggggtcttgggagagactatttctgaaacccaatcagctttcatggaagggcgacagatcctggattcggttctaatggcaaatgaagcagttgaggactataggagtcgtggtaaaaaagggttcgtgctcaagatcaattttgagaaagcatatgatcgtgttgagtggagtttcttagacatggacttgaggaaaaaaggttttggggagcagtggcaaaaatggattcgaggatgtgtctcatcaacttcattctctatattcattaatggtagggtaagaggcaagttcaatggatctaggggtctacgtcaaggagacccctatcaccgtttctttttacattgatagcagatgttcttggtagaatggtggacaaggcaatagatacagaatctttggcggggttccaggtaggcaaagatgatattcggcttagtcatttacagtttgcggatgacactcgtttctgtgttaaagatggggcttctctccaaaagctggttaagattattgaagcgttctgtggtatctcgggtttaaaagtaaacttgaataaaaagtcaatttttaggaatctgtatgaatgaggaagcagtggcccatagtgcggaccgaattgggtgtgaggtgggcaagtggcctatgacttatttgggaatgccacttggtggttctccaaggaagaagtcggagcctatcttggatagatgtgctaaaagaatggatggatggaaatgctctttcctttctagaggaggtaggctgactctcattcagtctgtcctctcttaacttgcaatttactatctgtctttattcaaagctccaaaggtggtctgaaaggaactagaaaaaatgatgagagatttcttttgggaaggaggagacttagcagcgcgggatcatttggtggcttggaatgaggtgtgtaaacctagagcgaagggtggcttagcaatcggaggactagaaatgaggaataaaggattgcttatgaaatggctatggagatacccctagaatcgaactctctgtggcacaaagtcattaaaagtcgatatggcaaagcagacaatttctgggatacaaaacagggggttagattgtccccaataggaccatggaaggatatctcagatctttatgatgaatatgggaagttggtaaagtttaaagtaggaaatggggcaagtattcgtttctaggaagatgagtggattgggggatcttcattgagggatccatttcataatttagctgtgatatctagggccaagaatgcaagtattcaggagatgattggcgatgagggcgaggttggagattgtgtggcaagctgggaccttaatttcagaaggaacattatggataaagagattctgagcttgacacaattgatacaaaagttggaacacgtcagagtacttaacattcttgatgatagccgtatatggttaccagattcttgtgggattttctcttctaaatcagcattctgttggtttacctcaaccgagaattctgatgagttgttctggactaagatcctttggaaaagtagaggtccttccaaagtcaaagtatttggatggttggtggctctagataaattgaacctacacgccaaattgcaaaaaaagcgcccattcctctgtacatcacctggatggtgtgtttgttgcaagttaagtggggaagacaacacacatttgttcttaaggtgccgcctcgcaaaatctttatggataatgctgataaacgaatttgagattcaatgggctatgcctgttttggttccttacatgttagtaagtaaggttggaggcagtaaacggagcacaagcctatggagaacgacggtattgtctgttctttgggttgtttggttagaatgaaacaagagaatctttgaagattcggaaagctctatagaggtcctatgggaaaaaatcaaattctggacagctacatgggtgtacaagactaagcatttcgaaaaattttcattcttagacctaattagagattggagaactttgttgtaagtttgcactggtgcagcctcataggtaattattctgtgagggagtcaattttgcgttttgtccctagggagtcagaagttttatttgattagacaaggcagcgagtttttgttttagtgtccctagctttggttatagctgtggaacctgctttatttttgtaaccacggtattcctccgccacaagccgggatttatatccgtatcggggatggggctagtctaagacaatggcctcgttctcttttttcaaaaaaaaaatattttgtacaatactaatctattaacttctcattttttgaaaaatacccttattatttatttattttcaaacctaaataaactaaaaataattgctctctccagctgcccct

SEQ ID NO: 14956 - DNA, 6527 bp, Cannabis sativa
caataatattttaaaggatttcgaaatttaaaattgtacttttaagcaatgtgaagtggatcttggaagttcagaagataatttaaaagatttgaatactcacttggcaaataaaataaatctaatctgtcttttttttatatatatatatatacccttttagtacgataacaagtaatatatattattctctcaaatcaatatgaaactttgtgtatttaaaatgttaatggcggtgtgttgatgttaaacaaaatataataaaatagtgattatataatgtgaaggataatcccacatcataccatgttcatgtattgtttaatagaataatatcaacttgggcatgtgactgttaaattaatactatatttatatatagtgaatcctacgggaaaacaaaatgattattattttggatgattatataattaattattgattaaatttcagttgtgcttttgagttgggacaactaatttccaatgttgaatgaagaaattaaaataattactatttgaagagaaagtcatcccattagataatagcaaagatcattgttattagacagtgcacaaaactattaggaagttttttataataattattattaaattaaaaaatgtgagactcttaaatatattgtgtagggacaacaatagtaaaacacttttcacttttaatcatatatttttcttttttttatttcacacaatcacatattttcacatgcttaataaaatacgaaattaaaaatttaaacattggagatgaagacacacaaaaaggaaaaatattagaaaagattgggagagaaaaaaaaataaaggacatggcaagtggatgaagttggattggaagagctactttatggtttgtggaaaattggggcagttgttgtagtgatatgggttaatgccacgtgtatcagatgagacatatgagtatacgtgtcatgatatggttgcaaatggccaagtggcaagtgagctaagcagatatcataattgtttgaagaatttatgcaaattgcaagagaccacggtatgtaatttttattttgctttaaatccaaaaatcaaaaatacctggagattatcagtagctaaattatcatcattatcaattttatttctcttagtcttcctaacatcaccaaacataggaaaaaagacacttaaaagatggctcaccattatcattaccaatttttgtttttttattaggagaattaaattgtttctgtacaactattttgggtttcgatggtttggtactcttttttaggtttctttggagatggaaacaaatttgaacgagaacaaataataatcattattcaaaatcacagaaaaatagaggaataaagataataaaaaaagactaacaatgcaaaatggggaagataaaaataaaaaagagaaaataatgaagataagtgatacatcctccgtataatatgtaaacaagtttgagtttaattgtattttagtttaaaaatgtttataaaaataaaattttaaaaaataaccgtataaaagtttaaattaaagaaaaaataacaatttaggtaaaaatcccaagaaaataggagagatgaaaaatattaaagagaaagaaaaaaaaaatgagaaaattagtgcacgtttgacatcataattaaaaaattattttttatttttaaaaataaaaaaagaaaattgaaaacaattagacttgtatggtcttattttttaaaaagagttttcagaaaacaaagctataaaaataaaaattttgaaaaaaaaaaattcttttgatcaatattatttgtagaaaacactaaccaacgcaatttgtattttgaaaacttcaaaaattattttttattctcatttctaaaattactttttaaaaacaaagaacgaaaaataataccaaacatattcttaattcccatttaataatttaatcattaggtattaggttcaaaagtggaagaacaaaaaaattgtatttatgttatttattattttatccatattattaattttattttaaatatttccattcattttggtagaacctactaatatttttctctctatttttcctctcctgttttttcttttacccaacaatctcaaatttgcttctatctatttttctctcttttccttctttccacccacttttctctcctctgccaaacagaataaaactagaaactaaaactaatttatttttccataaattccaataaaaatggagctcgaaatccctacaatgctacattcatggaggaaaagagctgccctaggaaaaactttctttactaaataaaaatgggaaaagagaaaactacagcaaaaacagtgcctcttcaattcaatgttactaatactactactacaaataataataataatattattactactatattgacctcctggtttggaggcacacttccatatataaaaaaaaatatattactactactaatattactccaactaattctactactaatacttctactactaataatgctagtactaatgctactactactaaatagccagttcgacaaaaaaattaaaaaattcatgctaagcctgctacagtattgtgttttggtccgctcgcacggctgcttcttcccctaccatgataataaccatctcctccacgcccgcctgaacccctacctcgaccagagtgctcacccctgctgctagtagactcatttctaccaaagctccgaccaccaccataatttccacgactcctaaagctgtcgctccggaatccaccccttcctggagggaacctgctgcctcttccattaccaccaactacaagaagcaaagattataaagcaaaatacaaatgagggttgtcttcagatactaaaaggaagacatacaacagtaacaccacatgtaaacattctttgaaaagtttgttacgaagattaatccagtgaagaaggcttcaagtgctcagaacttacctcgagtagtggttctttttatttcaacaacagcttgtcgtcctccaacattgattggtgaagcctgaaacagacggttcaaagttttcaatgatacagggctgaattaacacaagcactcattcaagctttcaacaagtgctttgtcgtaaggtggttaaaagaacaagactacttggttgttcttaacagtgaaaaaaaactaatttcaaaatacactactgcctcccatatggtcaatcaaaacattacaacatacagcatgagcaatatttgaaccatgttgtgcaacaattatgtttgtattgatttgaccataggattggtcgtgaaactaaggtgctgatattacacatctcaaccaaaataaagatggctacgatcatcaactttccaaacaatcagaatcaaaacaaaaacagagttcaccttgatgcaaaagtttcctaggtaaatgacttggcaatcaagatcagcagcagacaactagtatgattccacaaagtaaatgacaatgttctacaactgggtgtaacattattttcataatgcatacaaccatgataattgagcagattcagtcattcttttcattccaaataaatgtaacagggcttgtttaatttaacatcatgagaaaaatcaaaaacttataaaccaaatcacccagtaaaatcctggtaattaaataaaaatgtatcaaatttcaagaagagttggacataaacttatcaaaaactaccaagtgaacgcacctgaattgcactattcatggagcttaaagactgaaattcaacaaagccgaagcagtaaccttgttgctgccatcacaaacaaaaaaggactgaagatattatattgtgtcaaaaatccaaatctaccttttaagtagtacactgaagagttgtaccttattatttctgacttgtacgcctccttgctttattggtccaaatttcttgaattccatctcaagctcaacatccgtaacagataagggcagatttctaatgtaaatagagtagccctcgactataacaaatggcgaaatgtattagaaaatgctaatcttgagagacagaagactggaagaaacttaaattgttcacttcatatttgataaaggaaagagcaaataaataaacaaaagtacaaacatagccatagtatttgttctaaccaaccattgttgtttgattatttcattgtgctaaacaaaacaaaaaaaatattttcagttgccttttcagaagtatgattgcaagtatttggggagcaaacacatataacaatgagaaataagatgacaagcaaaattatatataggtaaaaaccaaataaaatcaaagcaagaaaagaaacaaagacaacaagaataccttcttcattgccgttgctactctctggaggactggtgccacttggggctgatgtttcaggcactgggtctgggactgccgacccaatagattgatttactgttttcatagaaggtaatgcattcaccggcacataaactctagtcggttctggactccctttcggtactttaacctacaatcacatataccaaattacaataatatgataaccataaaattcttttaatgaaaaaaatactgtgtcgacagcttacaattgatgcataagacttttttggagcatcatctatggctgttgtagaagctgattcaatctccaaaggtatatcactctcatgtgaatgagatgggggttcgaaaacagattcttcctcgataattaattgtctgtcatggtgtgatgcatcaagagctttctcaataacattttgatctgctgcttccacatgaacaatttcaggaactggtgcaggaggggcaggaacatgagttgactctgcaaacatcatttatgaaacttaaaaggagttcaatgtaaaacatgaaacgataattatagggaaaacgaacaaaaaaaaatagagagagagagagagagatagagagaaagggggaggggacaactaaccaggatcagtgtttaatgggaccttggcatcatcaactttattaactggagtattcaccaagaggtctccatcatctatgtacctgaagacatcattcaagacaaagtacccactgtcctgtggggcgaggaaaaatgattgagcaaacttccttttcaagttatccttgccagtcaagcatccagtaactaatacaatcaccccattttcataagacttttgagcatcagcagtttttatctcagccttatactccttataattcatggaacggatcttctcatcaataccctgttccattgaaaaaacaaagtaataatggattagctgtatgtcatgtcaaacaacactcaatagctatcttttcctattttaagaaagaaaaaagggggcagacaaattccatcagcagttgattgtgaaatttctacattaattccctctgagcactagaaattgttagaagagtcccacattgataatgtgtgagaacataataccatatataagatgcatgggttactcctctcagccaattagttttaagatagaactgcatgtatcttaccatacacctcaccctattatactttcttcatgttccacattggttgagtgtgagaacataataccacatataagcaccttaccatacacctctccctattctactttctccaccacacacaaataataataaaagaaaaaaatcgaaaggatatccaaaatatcattgaggaatcttacttgcatggtagtcgctgatgtcattacaccattggagtcaggccgtcctatcacacttggatcctgataaaatctaaataccaactcaggagagtggtgaagaatgtgataatactgctcgacaaaagcattcccaacaacttgggcgctgggtgcagtaggaggacttgctgtctgcaaggccatatctgtcaaaacacggaaataagagcacacttaataccacatacattacacataccatatgaacataaaaataacagaattggaattgtcccaaatgccaagaaaccaatataagccactaccaaatctaaaggtgatactcggttccacataatgaagagatgatagttcttaaacaagttcaattgtggagttctcaggactctggaataataaccaaacacaaaatatgaagcagtaatacaataaaatagtaaatagagaagaactatcaaaaaaaccctaaaaacattaatgctattttgacaacccatgaaaatttgttcaacataatcagtgacctagtaagattagaagatgcaatcgcgccccaaatcttactacaataaatttgagaatgttcccccaatcagtattgcttacgtgttaaatcgaaaacagaacaaagcttcaaatgcaaaccctaaaaacacctcaaagcaataaaagaatatagcaaatcagagaaaacaagagatataaatcccagcattcaaacccagataatttataaccattaaaccccaattcgagaaccccagcaatgct

SEQ ID NO: 14957 - DNA, 4902 bp, Cannabis sativa
  modified_base (4672)..(4685): a, c, t, g, unknown or other
agttcagctagctttcactatttactttttattctttttgtgtgtaaatgattgatactaaatattgtttttattctctcttatagtgatgtggaagctgaggtcagtactatcatgacatccaaagataagtctggtcttgaaactgcagaagagaataataagcacctaattagttgttgtgctgccgattgctcctgtaataatcttgacaaacgcaatattaccaactctagtactgtctcaacattgccctcatggctccaaaaatgcacagaagagaacaaaaaaaacactaccaaaaatcaggtttgtatataataatttaatatcatataatgtacagtttgtaatcatgatgtatagaatatcattctgatgctttgtttttgtctatactcttgagcaggaatattgtatcactgttggggatctatgcaagaaatggaactcattttgcagttcaggccctaataagtactcaaactttgctgagaagcccttcaacttttcatcattgtctcctacaaattcacacgattgcaaccagggattgcatgatcatcagtcacaacagagtaggccggttactacttttgggcccaaacagcagtcaccaaaagagtaccaattctgggttttggaaaacagtgatgatggttatgaaagcaatgtgaaaatgttcattccagaagaaaatgatgatgagccagctgtagctaaacctgaactcctatcaaatcccaactctagtccaaattcagcttcttctagtgaagtaatggaggaggaccaagatgaagatctcccaagtttcaaggagctaaactcagagaacctgagaattctttgtgatgagatggagaagaatgtgccatggcagaaaggaatcattcctgacattgccacaaccattcttcagtgccgttcaggaatgagccagagaagaggcaaattcaaactcaaggaggagaaagaagaaagctgttggctcttctttcttggtgctgattccaaaggcaaagagaagattgcaagaacgttggccaaacttgtttttggctctcaaaatgagtttgtctccattggtctgagcagcttttcatcatcaactagagctgataactcaactactgaagaatattccaagatcaacaaaaggactagaaatgaatcgggttgcagttatgtacaaaggtttggtgaagcagtgaatcagaatcctcacagagtgtttttcatggaagatttggaagaagttgaccattattctcaaaagggtatcaagaatgcgattgaaagtggaagaataacacttccagatggcgaaactgttccccttaaagatgccattgtcgttttcagctgtgaaagtttcatgagttcagtgtccagggccagttctcccacaaggggccaaaaatcatctgatgcaataataatcaaagagaataatgatgatggacctgacacagaggacaaaaccccctgtgtttcacttgatttgaacattgcatttgaagatgatcaccatgaagatcatgatgaggattcagattcccacgttggtttactggaagctgttgataggaaatttattttcttgggttaagaattttaacaaggagggaatattgggatttcatttattatcagttaacttttaattgcagttttttttgttcctttttttaagaattacatttaggtttttacaagtgcttggttggttggtggtatggtatatgggacttacctaggaaaacacaatgttgttcactttgtatttttacgatgtagtgacgaatatatatagtctgagtaattaacaatgtgtatattaatttctctctactcatcctttatttaatttatatagaaagtaagtttttaacgaacttatgtagatataatttataactattcattggaattacaatattgagtgtggtatagatattaatggaaacgagcataataatagtgatttgggtcattataaaaccaagaaattaatgtatagtattaggattagtagtagtggtcacagtttgtatcccactgtggaccatatttaaataaagttgaaagatatagtgcattatggaaaacacagtttgagtcttttaattcatatataagactagtttgtatttctttttgacaatataagtaacgtgatgtctgatgattactaatcccaatatgtgatcttcatatatactctttcctcgactaaatatattatgccatgtccctacccaatttaatatataatatatagaaatagtagtatatgcgtaaggatttttaaggctttggaccaataatgtactttatacatataacataaattattattaatggacacacaaatattaaagtcatatatatagtggtatattatagactagaaagtgttttaatgtataaaagtcattatataacattattctaagaaaggacacagttaaaatctcctattaatatatatgatctatggggagaaagatgctagaaatctataatgctacttgcttgtactgtgtgtagtacatatatattaatttataataataccacacactaataaaaggtatatattcaaattcggagtaaaaataggacttcacggtcacacagaacaagtatatatgcatgagttcaaatacaaatagtagatcaagcaaaaaaaaatacaaaatagtagttctaatacgtagtcttctcttattaatatataatgcatgaaatagtgacaaaatttgagagcttatttaaaataataaagcaaaccaaacagaaggtccgttcttctaattgtacgtacttttactttaatgaacgcaaaaaaaaaaaaaaaaaaaaaactatatatagcctcatatatctatgtatagagatctaattattaattaattaattagcttaaaagatgaggccaataatgttacttgttatgaagttatgaacatatatatatatatatatattgttttgtactgcttaagaagtgcatgtgtatgaataggatataggaatatatatagatctatatggtgggtgtgatggatcggattatactgctttatttcttaggctgaaaaagggtgataatacgagtgagtatatatgacccgtaaatagtgttcccacttgtacatgttccctaaagctactcaagtccttgctgtatataccgttgcgtctttttgcatcagaattattcatataactacacacatatttatacatagttccatttataaaattcctgagaaataagtataaatatatatgtgtatacatacataattaattctcttcacctatcttttcaatatatattctattttttggttttatgtccagaaagtgtagataataagataaaaaaaaatgcaggcgcctacctcttgaccctcttaattattcagacgattttgatgtgaaagtgaagagcgtatattatgtgtaatcaactttttgcaaaacttgaattaatgcatgcgcatgcgcttacaattaaaagtgttatttattttttggaatattaatattttcaactagctctctacgttattttctgtttttatatattatttaatttcttcatgacatgatataatctaaagaattaactatacatatataattaagcgattgaaatctatatcaaaaactttattatatataatgaagcagggaaaaagtctatataggtagcctcccggctacttttccttatcttcaaataattaattcattaatctgttctttccatattgttcatttcatctgtttttttttttttcattcccatatatacaatatttttcaccggcggttttccctatatatatataagaataatctaaatcgatatatttttttgcttgtttcgctatgattaatttagatatggaaagttttcaataataaactagattgcaatattgctacatgctgtataatattatataataatctcatgatcattaccttttattatttataaagattttatccaattaatattatttttctataattcaattaaggactacattagaattggagccattatttggaattcacaagaaatggcatgtatttttaaatcttgatttggtatttggttttatttttaaaaaagtttaaataatttaggtagatttttcatatgatggttttatgagttatattaattagatgatccacgttattatttatttagttatattattttttagggtaaatactattttagaccttgtattttgcaaaaattactaattgaatactctgttttgttatttgacaaaataaatcttgtattttctaaactggtaaaaatagaactttgaacttaatttttgacaacttttttttaatatgaccaacttgaaaacaattattaacatgaacagatacagaaaatgtaaatagttttgtcatgacacttttagataagattattattaaattttattacaaaaaattagttaagagttttatttgtaccattttaaaaaatacagggtccactttatcatttaataaaatagaaggtccaattaataacttttacaaaacacagaatttaaaattatatttaccctattttctaagattgttaggttaatagtttttttatattattattattatnnnnnnnnnnnnnnttattattattattgttattattctattttggattttgatttattagttttgtgttggttgtgaagggaatttcatagttatttaagcagaagtggttgctcttgttttatggtgactttggattggttgcttagaatttgacttcctttcacttctattagatttgattgcttaactgtgatctctgcctttgcttagaatttttttttttttttt

SEQ ID NO: 14958 - DNA, 3107 bp, Cannabis sativa
  modified_base (456)..(457): a, c, t, g, unknown or other
ttttttttatgatatgccaaataaaaaaattaaaaagggagaaaaaatacatatatctaattttttttctttgacaatattatcttaacaaattgtattttaagatgtatttttaacatatatatatatatatgctcatttttttttgcatatttaaatatatataaattaattaaatatttagttaaattaattaaatatatatacatatacttgagaaaaaatatacattaatgtacactatatttctaaaaaattattaaaattgagatgaaaacatgtaaaatataaaataaaatataaaaggtcaacaaaagactaatatctaatagtaaaggcttcaaattgccaagagactaaatatttagatggcgtttgattgggaggaatgaaaatatagaaagggaatgagaattgaaatagaaatttaatgaattaaaatttaaaatgcataannaaaattgataaaaaaattattaaattttttcaaatggaatagtcattccaccaaaatgtgaaatggtcattcattccaatactttaaaatgtaaccaaacaaaaaaatagaataaaaattatttcctttctattttctttttcattacttttaaccaaacaccaccttaaggattaatttgcaaaaaaaataatgaaggattatttcttttctccttaattacatttcattatgtattatcctattattcaaacacagaatattttgttgtgggctaaaatttatttattattttaaaaaaatttagttacggatttatctcattatgtaacagatatatacacctagctcgttattttaatttagttttaacttaactttttggccaaataattaagctcttttccgagcgtagtataatggaaaaaaagtgaattatatagctagggtatcaatgagactaataaaatgacaaatgacaatcgaaactgaattaagttcaattggaaaataacaaatattgataccatcaaacatgcatcaaggtcaacataattctatatgccagcaaaagctaattaacatcattgtcaactaccgtgcacacgatgaaagcaaaccccattcaaacaaaagatagatttcattgtcaacataaattccaaaaaaacacacacacacataagtactaaacacatgcacacactgctaattactataacataaaacataacacataattataaacacggtagtaccactaaacacatacacacactaataagtactaacataaagcgtaaaacataaacacggtagtactactaaacacatagtaccggagaataaaaaaaacaaaagaacacaacacagagttttaaatgcgaaaataataaggatcataaagcattttagattcaagttgacacaaacccagataattaagataaagaattactcaaggagttgattcaacgtaagacacccaagccaagccaatgtccaagaagcaagaacagccaattgatctcccacttcttcttcaccctgtaatcaagtgtgagacatataaaaagaactacaaaattaataatcaaacgagaaagatagagtaattgagtggtacgtacgtacattacgaaattaacgtatgcgaggatcaaaaagcggtagaggggtgagttgtttgcacaaatctagataagtaagataaagaactcgatccttagccccagttcgatgattcttagtacacatacaaaagaacttgagatgagtaagcgtacaaatgccaagccactgtcccaaaagcaagaatagccagttgatttcctcatccttggaagcaaccacaggcgtggtcttatcactgtggcagtaaatgcagttgggacgaatcgggttgagccaaatttctggtgctcggtcgttcatgacacccttctcctgggcgatgtaagactttaatctattatagtgagacatcaactccaactccattttaaaactctttttacacttgtcgcaattcaccattccaccgatcatcacaatcttattgttcaccaaatattccatgctgtgaataaaccccggtttcttcttggcccatggatatggggctgctgctatcccatcattatcttcatcattattattctcactggcagtgggttcagatgatgagtttgtagttctcctctggatgcgtggcttctggggatgataatgattcgctattgggtgtactaggggaggattatttataagttgttgtggataatattgatcataaggtggaatactgtggctaataaattgattaatccatgtctgccgctgctgctgcgtaagcataggtccgtaatgattgtattcattattaacctcagaagaagggtgttggtaataaggaaaaagatgatgagttagagttggccgagttggagttggatgaggctcatgaatttgggcagttctcacaatcatgtcatcatcctcatcttctttcttatcatttttctcgaaattcatatcacctatctcattcaaatccattagcattttcatatgatcttctacaaaaaaaaatatatattgagatttttctcgtcaaacaaaaactaataattttggaatcccatttctctcttaaacttaattttaaggcacgcaaataatcgagatataaaacaagatcaaatctgcagtatttaggtcatatcttaaaggtatgagccagctatgactagtagcatgataacaacgtgaaacagaaatgctaatgtaaagcattaaaaacataagattcttaatcataatataccttccgctggcttgaaaaatgattccaatctgtgaaaggaaacgcaatgcatcacaatactgtatagaaggaccttatggacatattttttatatcatacgagcatcacgtacctgccctgtgatgatttgttcttcgccactttaattttttctattgcctaaaataattagaagagaaacagaataaatacaaaattaacttttctaaataaaagtaataacttaattttgatagctatcaattgattattgattaatgaatcacgaaagtttattttgtcacaaaaaataatatattaaaaaaaagtatacgtataaaaat

SEQ ID NO: 14959 - DNA, 5982 bp, Cannabis sativa
tttcttgcttggatgataaggacggagccgaggagggcagacaaggagcgaacagttgggccacgagggctaccaagagatgggccgcaaaggtgggctgagcaccaccgacaagtctggtggagaaagagccgaagaagaaggaattcaaatcgacgagtccaagttcagaaccaaaaatgataaatagttttcctcagaacaaactactcaatctagggggtttaataatgtagtctcttatcatgttttagcctacttagtttaaataagcaccccctttacagtaggggtctgttttaggtctctgtaatttacatagtgttactaggtaatgtatctacatgttactttttatgtacgtacttagttttatttgggttcttgcgatcctctttatcatctttcctactaaaaaatgacatggtctgagaagtgagaaggtgaattattaaagcaaacttattataattaggcccctgtaaattgatttgatattgcgtaggccaaagcgggaaacaacaaatatattgatgtttaattcaatttacaacaggtacataaattaggattctattattattattattattattctaatacaataaaagaaggaagagaacaaaattttagaacaaaacaaacaatatatgctatagcttgaaactgacctgtcagaactcttcaactattaaatgatttaccatacagttgtgctaaagtacaaggattcaaataattaggatcttggaaaatatcaatggctggttgctaaagcagtcaccaatagaccaagcaccagaaatggttgagcactggcctgaaacatttacacagcaaattttattactttaaagtaggcaatgttgaaaagcttaatcgtccaatgatttttatgcagaacctcaagttcaacactatcttatatgcacaaggatttttaggggtgcatcaactggttttattagtttgttacaggttttgcttgggccatatcttaattagggtagactaaactaagataaaaacggcagataagaataactatacctggtatttgacgtcatacttaactgggtctttgagaaagtacttgaactgcagggtacaaacactatgcattattagcaaaagctctgaagaatatactctcatacaaagtaaacatatgttcatattaataatgtattacctgaaaaaatacttgtggtactatcaatgcaagaagagctaaggcatagtatggcttgccagccccaagcagataacctgcaaaaccacatttccaaacccacgaaagaaaattgtcagcttggtagactctgactaaaactaagaaaaacacgcttagcgtacaattatgaaagagaaaaacacattgcaatccaaatatttgaaactaataaattattcagtgagcaaaaagtaactaataaattgtaatacaaatatttttcagtcttgtgtagtttaagtgtgcttattgcttttaaacttaaataacgtgcaatcactaccgctcaaatctgactcaactggttgtgttgtgttgtgtgtaagaggtctcatattagaagcccagctaggctattttacaatatgggttttactgagtggagaaagggtgctgatcagaactagcaaaccatcagtgaactcacttcgaaagatctaatggtcaaaacaaaggaggtaaacttcattcacgcctaaaaatgattcattgaagttcacagacgaaaagaaaatactgtggaagttataatttaatcccaaagtaaaacagacatttaatcccgagtaagaagtttacaactataaaaatctcaaacagcttaccagccacagataactgagttatgtcaatcgcgccaacgcaaatccactttgcagtttcagaaccaaaagcaacagggagtgactggaaacatgttttaacataattagataaaagtcccacctttaagaggtatatcagaaaaatttaaagggagaaacgtagatgacctgaagtcccagtgctctatctccttccacacttttgaagtcattgacaatggcaatacccaactgaaaaagtaaatggtgatttgatcagaccatgtacagtgcaacacatacatcaaaatacttctaggaaaaacgtaccccagctatactgtacagaagtgtgagaactattatatcaggtgtaagggttccaaataaagcctgacctgcccacctatcaataagataacaaaacattacttgttagttgcctcctagtattggagtagactataggacgaagacaaacatggttcatattattaagctatcagtttgagacttagcataatactatcatattttaacatatggaattcatttaaccaagcatgtcaagatgtttcttagaatcgcccaagctcattgatgagcataaaatttcatgtattgagcccaacactaaagttaaaagaaagatttagctagttttttaagttacaatagcatagtagcataatagatgatttataaaataaaaagcgtctaacggtgaaaacatatgatgcctccttactatgatgataacttctttttctacaaaacaacccccacagacataaaagagaacttctgaaaatgataagaagaaaaaaaaatggatttaagcctctcatatttttcataagacaacaagatttcaactcaaaggtcttatctaagtttaatggcttcaatcttatcaaagggggttgttttagaagaaaaaaaatcttatcaatgggtggtaagacaggaatgtaccatggcaaactaatataactagctcccagggcaaaatttccaatccatccattttgtttcagctgcaatgaaagatgtagcaaagtcaatattcaaggactaagtaaatccttttctagaaaaacagtgaaataaatttgacttgaaaacatgagaaaaaggaaactaccttcaaaggtggagcagagtatatatatgatagcaaggatccacccaaagctagataaaaaactgtagggaagtcatgcccagcctatacgagaataagataagaagattacgttagtcactgatttttcctaaacatgtttgtcgaaaaaaggaaaataaaaccaccattgtttaatccactcacccaaacatctaacaaaccagccaggccaagacctcctaaaagcagaacccaaatttgagtaataacctgatgaaattgattttaaagaaaaagtattaaaactgcaatgaagtagagctccaagctatgctaattcagaaaatatatatgtcacactcctacctcattctcagctatagctcctgaaggaattggacgataaggttcgttaattgcatcaatatctcggtcataccagtcattaattgtctacagtaagaaaaaaaatccaaaaagttatttgagttaaatgatgcacatcagtgaaaaaaagtacacgatataaattcattaggtgaggacctgtgtatatcctgtgagaaatgggccagacatcatcatacaaacgattgatttggcaacatcctctaaagtccagtgaaagtttcctgcaatgtgattttctttttaatcagaagtgaattctggaggaagtcgggtgtttggtttctttctgtactaaataaatactttaataaaatttaaaacaatgacgattgaatttcaccagtctctaaggcctattgcaagtgttgtgctgatctatactagtatggtgtacatcggacatgctctaaaagctgtcatttctccataaaggtatcacataggttccaatatgagaaatatggtaatcaacaattggaatgaacaatcacatactggaaaaatattcttagctcttttgaatacaacctaagaagtttgttgtttatgcaagatagaaatttaagcatgatttttaaattcgatgtgggaaaattgagattagaaagtcagccttttcctaacaatcaagtgcagcaaagtaagtaccagaagcagcagctccacaaactactccccaaattaaaggaggccaagttacaggctttgtcagctgaagtcgaatcttccatttgttctgaaaagtcaaatacacacaattaaactctacaagtcttcatctttttcacatcataaagtttaaataacttttccctatcagaaaaatttacaagtaaacaatctaccaatactctactccacacaatttgaaaaactaaaaaacgtttcaacatattacacatccaattatatcaagctaaagtaacaacatatttaaaagctaaatccaatcgagcttgaatctactaaaaaaccgaatacctttcagactaaatactttgcaaaagtaatcagtcaagtccagaatttgacttacagattcttgagaggctcctttgataccaagaagctggtttatgcttgaaccattattactagctggtgccttatctggaacagtagatttaactcctacaaattcatacattaatcaaccatcaaagaaaactaatcgcttcattaaaactcaacactcatctaaatcttcatcctcaaaaaacagtttttgttttattattattttagttctttagaagctgaaaatacctttctccgcatcagtatcagctgccctaatcgaaaaattcctccctgaaaaactagcaaaatctcagttccaccaaactacataatataagaaacacacacaaaatcaaaagcttaaaagtcaaaactcgtgaacacagatttcattacagaaacgacaataaatttgcaaataaccgttacaatgctcacgaattgaaacacttccattctctcataacaatagtgagcaaaacaaaatggagattaagtgagtgaacactcactggtgaacgagaccgaaactggcggagtccgaagtcgttgagtggtgatgtttgataaacgtagagagggaagcgtattgagaagggaggccattgaagggcgagtagaggtgtgacctgaggaggagagagaagagatttctgggctttgggtatactatgaatatgaataggtgataactctaccagagtctccactcagtctttacaatttacattgctaaataagaaaaaataaataaaatcgaagagtagagaaacagggagtttatggtgtactgcagcgtactagattgtggcgtcatttttgttggttatatcgacctttcaagtttcaacatgtaaaattaatcatcaatgaaacttcaattgttaaaaaaaacatgtaaaataagaataaaggacaaaataattagagtgtttttacaatacactccttaacaaataaaataaaaagtcataccccataacaaataaaataaaaagtgttttttttttttggttgggtaaccgataaaggttaagataacaacggtaacaaaagttacacagaaagagggggatttcttccatccaaaaaaattcattgtctatcctaagtcataccatggtttgatatgtatttatcttatataattacaatttatatgaatatgagaaaaaaaatcaaaacaaaatgatcttgaatatcgagtagattagggtacaaaataattcaactgtcaagcaaagttatattaaaaatttaaattgtaatctggtattcggttagacgatgagctattctgattaaaagaggttctactaccaattatagtatgctgtattattaatcatgtatgactctgttcaccgcgtcaaaaaaaattaaattgtaaaaaaaaaaaaagtaaaatttccacaagaagaaacatacgaaaacatatatctagtaagtaaaagtaaggtaaatgagagagtggtttggaggccccaaacctcagggtcccacattttgtgtaaagttaaaaaaagattggtaaatttcacaaatgcacaaaaacaacaaaaaaataacaaaaatacggtttcatgaaattttaaacatttttacga

SEQ ID NO: 14960 - DNA, 5138 bp, Cannabis sativa
  modified_base (5068)..(5089): a, c, t, g, unknown or other
attttcaaacacaccctcaaagtttgaacgggaaatgaataagatatttcagtataaacataccattaattaagttcaaaattgcagcagcacttgtgtttagtgttggctgtaacagaggaccaatcaccatggctggattgattgtaaccatgtcaatccctttctcatgaacaaacttccatgcagcatcctcagccaatgtcttcgaaagcacataccataactagacccgaaaagacacaaaagtaaccaaccaaattaacaatccaaacaagaaatggagtggaaatgaatcaactcgaatttaatttttctattattttgtatactaaattttaataattaatttcggtcctattccaattcctgttcccaacaaatagactagaagaacatgaagaacgaaactaacatgcgtacctgagattccttacaaatatttggatccgaaaaccaggtttcatccactacaacatcaggggttcttggttttccgttgtatgcaactgctgcgatggaagatgtcaaaaccactcgcttaatagacgggaactttgcaaccgagttaagaacattgagtgttcccttaattgcaggatcaagtagttctgcctgaaaaaaaaaaggaaccagatataaaacggtgcagcaaactaataacttatcttatacttagatgagttacttggttattagagctggtttttattctaagattaacataatgtttgaaacattttttagttactttataaaatgatactcaaaatagttttatagacactttgggtagaactcactctcaaaagctagcctaagaaaagagtatgcccgagtagttatatactactaaccaattcaagtcaatgtgggatcctaacaatataaacccctttggagcccaaccgccactctagggtagcctactctaggcctaatccacacttcgctctttctgagatgccagtcgagggtttatggctctaataccacttgacacaattaattgggtagaactcactctcgaaaactagcctaagaaaagtagctttatactaaaccaatctcatacttggtcaatgtaggatcctaacaaagcacccccctttggagccgacgtccacaacgctactctattggcctgctctgggcctaatccacacttcgctctttctgagacgtcagtcacacttgagggtgtatagctctaataccacttgacactactaattaggtaaaactcactctcgatagctagccctaagagaggagagtgtccaagtaattatatactacaaaccagtctcatacttggtcaatatgggatcttaagagacgacactaaacattacaccgatcaaaaagattggtttgaaaaaataaatatgaaaagcatatcactttacaatatgagattgaaaaaaacaacttagatgagttacttgggctattagagatgttaatcattctaaagactaaaataaataaacacacaaatattagtagtgattgtcaaagaacctgtggatccttaatatcatgataaaaaggcgatgcagtgtgaaacactccctcacaaccttcaagacaagactcaaatgaaccttcttcaagtaagtttgctttgaacagttgaagcctttccttagctccatcaagtgaagttaagtgggcagtctttcttgattcatctatagaattatatacatatatatatatatataattaaactaaattaactcaaaatccatttcaataagagtacacttaaagctctaataagaagccagaatccaattaactaattcattataaaatagttagaatatagttacaaatcaccaagattatcatatttccacaaatccactgtcataaacagtacttttattattgaaaaatcagataaaaaattagaattttttggggaatcttgaatcatctgtagaaatcataaacaaactaaattaactcagattctgtttcaaaaggagtactattacaactctcataatcaaatcaatcagcaaaataataataaatattaaaaatatagaatctacatttgcaaattcaacaaatccactgtcatgaacagtaatatattataaaacaaataaataaactttttggggtttttcttcccattacttcaaatgggtctcaaaccccattactcatcactatcaattcaaagaaaaagatcaaaactttatcggttttctcaaatcaatagaccaaaatccgaaaagggtaaactcaaaatcaacaatgaaaatcaaaaccaaaaagaatcaagagaatgatagtgatactgacttgggtcacgaacagaggctttgacagtgtagccacgttggaggagaagcttaacaatccatgaagctatgtaaccggaggctccggtgactgccacgaccttgccggcgccggacatgtttttcttttctttgaaaatcagagattttgtttttgtatataaatgtgtggttcacgttttacatggctatatatattatgagcagtcagttacgtttatattttgattttgactaacaaaaacatttactttttcaccttaattttagctaaaaatgaaaaaaagtaattatggaaaaaaaaaaaaaaattagaggcttgatacaaaattattttcatggtgtttgatataattacaacatcatttctatcaattccgaatagtttacaatccgaaaataaagttcttaatattccagtttatcactcgcgtttaaaaaacttcaaatgtattttcgacacggtaaattatttgaaattttttaaaaatttacaggataatgttataattataacgaatatctgtaaaaaaaaattgaaaaaatatattttgacatgtattttcgagcgtagaagttgtaacagaatgttgatggaagcactgctttgtatacttaccttaaaataaaataggtaagtatataaaagtgatgcttatatacatatatagattgacaaaaatagcattgaatacaaaagcaaaagtaggtccaaaatgtggtgccatggtgggagtagagatttgagtcatggagatgatctttatgtaaagtagtggtgtgctttcagtgtgttaggtaaagctcaaaaaggaatcttgattaactcattacagtcctatattatatgataatttttagggatatatagtttttttttttttttacttgatttagttactatcattaagtgagtatagaatgaaaatcatatatattaattaataaggagataggtggtgttttcatgggagcattgtttttggacactaatagtatttatatgagactctaatccaatgtcattttaagtatttagggaaaactacatgtagagccataagagacttgtatcatgttttgtcaatggttatgattattaggtaagtctgtactgcaccctttaaaaagagttttgattgatctcttatttgtttcgaaatacacaagagctttgtagttttttttttttaataactgtgtacgttataaattatttaggaccacttgtaaattttcagaaaattttaaataatttacagtgctaaaaataagatttacatattttgttacacgcaagattattttcttatacgtatggtaagtaactgtttaaacttttattttcggcgttgtaatttaaatttttttaaaaaatttagaaataatctttgttatacttatattttaagcaattaatatggttatgacacgtatgaggaagctgaaaaataaacaattataaagaaataactacgttcaaataacttgcctcaaattatacaattggtaaaaatattcaaactcatattctcataaaaaaggatgaaccgtaaataacatgaaaataataataataataaaaaccaagttcataaaataactcaataatacatacaaaaatctaccacctaaaaaaaacaatatcaaaatttaaaaaaaaaacacaaaatcaaaatttctattgattgattttgttttctccattcatgaccaaatcaatgttattaagaaattgagtgtacttatgtttaagccacttcaaactttttttcatagaactcttcatttttctttcagtagagtacactttataagttgtaagtcttttcaacttttgaaactcaagattggcatctgcaaggttcggtggcttgaccgaagatgtagaaggcttcttagaaatgattttggattttttgatagtggagactttgttttctttctcgattttcaatttgttgaaatcttccattgttatttagggttttattataaacttttgtttcaagtgaatgaacagaattctaaagcagaagtagaaaatttgagtaacataaagtctctaaattgagtacgaagaagaatgtaaataatgctttttagatttagttagaatttataaggatgataaataaattaagaatttaaaagataataagatttttaaaaagaattaaattttatagtaatattaagatatattcagaattaaagtctctttctcgttggaatttaaagatataatactaattgaataaaattaaaagattatatgatttttttaaaaaaaaattaaatttaaatttagtaagcaattatatgatatatatttattttgtttttttaggagaagaagaatccagcgtttttcattggaatttatatataaatctaataatagcagaacaaaaactaaaagattatatgattttttttagaaaataaaataaaatttaataagatattataatgatatcaataagatattaattattaaatttcttaaaaaaataatataaagtttttgatttttaaaatgtgctatcttaggagatagcctgcctaaaggaattctttcctttccatttttttttaattattgacatttttatttaaaatcaatttataccctctaaaaaattttcttatcaaattttatagagaaaatttcaaaaataaagtaaatttactaattagtttaattatataggtgtcgtttggtaatacttttgttttttaatttnnnnnnnnnnnnnnnnnnnnnnaatttttgtttttaaaaatttaacatttgaaaaataaaagtgcgttctt

SEQ ID NO: 14961 - DNA, 7292 bp, Cannabis sativa
aataataataaaataataaaaactcttatgaatggcgaagcagataacatgtctcttgaaataaccttttaggagggtgtactacaaacttatccttacttatttaaatttttagtttagtttggccccaaaatttacatgaccataaaaaaaaattgaactaaattattcaaggaatcagataagtgtttcattggaccacattcaatattttaggtctatccaaatttgatctaattatatattggatgttagatttttccatccgatcatagccaaataatttcagtcatccaattgattcaacatctattggatgttggattggattttaatatccattagatgtatttcatgtatacctattggtttaattcgggtttatcaaatattttaaacctagtattttttggatcagatcgaatccatctaatattttaaatacaatatgttttggattagactggatccatccaatccaaaaaggagtacaattttaatgttaccaatcaaagagtgtttccccaagtcgatcagtaagaaattacgatgataggaaaaatcgacaccaaaacgtctgtgatcatcctgatttgcgagaccaactgaattgaaggcgttctaacctacgcgagcagataaataaaaaacacctcatctcatatagagattaaatagaaatgatcaacgagcaaatgaataggtcaatcaacccgctaataactccattcaacaaaggataattcagctagaggatcggttcagaaaatatcaggatggagaatatgagaaacttccaggttatgattcagatgacgaccgagaacctttccaccctgatatattgaattcacaatttctaaaaggattcaagaaccctcatgtcgcggaatacaacagaaccaccgacctggatggacatttgaataaatttaacactataatgtgagcaagtaatgtttctaaataacttgcattgcatactgtttcctacatccctaacagtggcggcgagtagttggtttgataaatttacaaatcattccattaattcatgggagcaactatctaaagaattcaaaaagtaattccataccacaagggatagaagaccagaagcatcgtcgctgacaaatatcaaacaacagtctggggagtcccttaaggctcttcttagtcgttgtagcacaacaacgacaaaggtaaaaaacctaaatgatagtattcagttaacaacactccagactggaatgactatcgacttgtcaactatgagaggtaaattgtgggatgtgttgtaagggcacccaattaaattgataatcaaattcaatgatagggcacttatatatgttcgaaaggaagaagctcagtttgagctaaaaaatattaaaagatggcttggggaataatcccaactcgagcaacgcagaaacaaacattgcgagcacgagcaagggcaatgagccacatgggaagagaaaggatgaatctaaggaatcatccaaatataaaaagaagcagaaaaaatgtgagaaataagtcctaatttatactgtttatacagagttgaatgagacacgtgaaaacatattccttgcaaacaagaatagggtctcttttcgaaaactagaacctatgagaaatacgaggaataaaagggattagagcaatttgaaaaatattaatattttaaaattcgagtaggcaagaactcaggttatggaaatagtctccacacttgtgtagaaatacttttatagcaaaacgtcagtgcagaaaaggaaaaagggcaaaattttatgaccctcttgtagaagcaattttagccattcaacaaatcacttattacctaataaaaatagaaatcgaactcctcccgatacataaatatttctttttttatatatataatttttataaactttgtgattaaactataattttttagggtttgaaagaaagatagttatgttttttcgtttgagtgaaaataattgttattataaattaaaaggataatcatgtagtttaatatgtgctatgtatgcctttcaaaaaaataaaataaaaaagagtatgctatgtatgcatcatcttacaatattttgtttattaaatagtgaaatcttacaaaattttatttacttttattattaatttagggtctctttgaaagtaactgtgtaattactagggtggtaattacactatattttaaaatacaaggtgtgtttggatatgaggtggtaattacatatgatttcctaatattttgtttggcaaaataattacacaatagaattacatggagggtgtaattgaaacccattaattacttctaattacaccgttacaatgtaattacacgttcagacaaatatgccaaattatataattacctttaattacacacaaattgaattagctttccacccgtattggtcatagtcatgttcataaagttgaaaacgaaaacgacaatgatagagcgtggttccccttggcgtttcgtttcgatatttcgaaacgccaaaccaaacccaataccccactctctttcattcattcgtatttaaaccaaatccaaaaacaccaaaacccaactcaattcatttctgtcattctccacaaatctccttctcctcgccaccatcgaccggtggctccccggagaataataccaccactcctcctcacaatgttaccttacaacacaatccacgaagctgccgccgcgcttggccggaacctcacgtacgccgagacaatctggttcaattactctgctcgtaagtccgattactttctctattgccataatattctcttcctcttcctcctattctccgtcgtccctgtacctctcgtcgttatcgagattcttcgatcccttggtttcgacaagtacaagattcagcccaaggttcgcttgtcggtttctgagatgctcacttgctacaaggatgttatgagaatgttcttcctcgtcattggtcctctccagctcgtatcctacccttctattcaggttcgttgggattttcgattttaagctgattttgtttctgggttctgatctatacaaagattattccaatgatcgtgtcttttaagtgtttgttagaaacaatttgctgggtattatgtatgtaatgtcaaacagctggggtggtgtttttcttttgcttgaattgttttctatgtatgaacagatgattgggattagaacagggctgccattgccatctgggtgggagattgctcttcaattgttcgtttattttgtggtggaggattatacaaattactggatccatagatttctgcataacaaatggggttatgagaacattcacaaagtgcatcatgagttcactgctccaatcggatttgcggcaccctatgcccattgggcagaggttttaatattgggtatcccatcttttctcggtccggctattgttccaggccatatgatcactttctggttatggatagctttaaggcagattgaggcgattgacactcacagcgggtacgcatgccacttcacttttgtttttccttttactctagataaagatcgataatttttcactatctcatggtccttatctccttttcgttgattgtgactcaatcatgaacctttagaattccttttttctagtttatttaatatgcttgcatgtgaagtacttttgatttgaagggttttacgatagtggtttaccttttcatgatggagactaggatcaatgtgctacctttcttttttttgctctgttgtttttttatttgtcaaactgtatgtaaaagaacaacctttgttttttattttatttttttaaaaaaaattgtataaaaaattatgccacctgttttttgtttttccaaaaactttatatgaaaaacctgaatcttgacacttcgacttttaagtatgtgtcatttatggatatatatatatttaagctagaatgttttcttgatggatatgtatgtgtgtatttcaactcttcaaggatggtaggccagggactagtgttgatggggtttttgttgtataaactggatgaaaaataaattgatgtggattttacatcagagatttggtgagaataatttctcgctgtctgcttgttatatttttactgtggtattctagaaaaataaaaaaaaaaatggagagatatttctgttcttttgctagatgctcatttttatattcttgtcttgttttgctgtgaagttatggtagaacctattgtaaaaaacaatcaattctaatgcaggtatgactttccgtggagccccaccaaatatattccattctatggaggtgctgagtatcatgattaccatcactatgtgggaggacagagtcagagcaactttgcttcagttttcacctactgtgatttcatttatggaactgacaaggtaaatatataatgttattgataattgagtaacaattaagatatacaaaatttacattcaaagttgtggcatggttttttaaccattttttaaagtagtaataatgtaagagtatactatagtatactatttacaagaatgtctataaaatatcatgagttcatgacatcaatgaatgtagcattgtgacaggtgtaattttgtgtgtccaagtatttttccttatgaaactcaacgtgttaatgtgtactgactaaaacttatggtttgacgataatttcgttttgatcaattttgccagggctaccgatatcagaagaagatcctcaaaaaggtaacccatttaaaaagtttatattcgtgttttctagtgctatttttaattgatgcttgatggcttttctaagtctcattcttgataggtttactgtggtttactaatctaacataactagctgtttaagttgattgccttgcttagcatctttggagttcccagcaacacatcttttacagtaagtatagaagcatgttaatggacagctgccctaccatcataggttaagtttatcctggttggtttatgtctttaaggctccagccaagatatgtaattaggctagtcattttaaggtacctatgtgggttatctgttctattattgtgtgtttcgaagtgcattaccatctgaaaagataataataattttgaaagcaaaagagtagtgaagctttttctgtagagttattagaaaacaatacggaaactaggaacgataatttttcaactactttatgttttgcttgggaagcgtttgcttcttcattgtatcattatctgagttgagttgttttagaggatttgtatttcggattaatcttgcattcttttgtctttctaatattatgttcatttttcattttcagttgaaagaggaaacacagaatggagaatcatacaatagttcaaatcaagatcttaagtctgattagtgaagatgtaagaactctgttggtaacgatctgaaaagctctctgatttcaagttgacatctctttggtagtctggtaaaaatgatagaaaacctatagtggctctttatggcaatgcttaacatggggttgttcgaaactgtgataaggtgtagtccgggggaaagtttatagttttaaggttgtaaaattagagtcaagagacatgtccatcttctttttcttccccctgtttttgtggagagtatgtttaaatcataatatgaagaatcagttcctggctacaactgtgtttaatgtttatgttgaagttatagcttttcattccacatgagaaacttcttaccactgcaattatgtactctaatttgttagagagcagtagagccactttttagtaattaagccgagtcctcttcttaatgtaacaacactgagaactaaggttaatgataacaattattattgtctgctaattgtctgtggaacctcaaagctaaaacacaataaacaaaagcagattagttataattattaattatgcctggtaaatcacttattatatacctaactaagtggctcatttgtttgtagctaaccatttctcactatttttgtcttcatatttgacctttacatatttcaattgagtacttcactccacttcatacttcttatgctacacaagtatcaaagtgataattaagataggatagcttcatataaaaatgggttgaagtcttgaagaacattcacaagtgtattactattatttattatttttctttattcagaagtatatatatatattttttatttaagattttaagtctatgtttcaataaacaatcagcagcccgtctagctcagttggtagagcgcaaggctcttaaccttgtggtcgtgggttcgagccccacggtgggcgtcctattcattttattatttgagaggtttcatttattttaaccaaattatcacttaaaaaaccatatatttgaagaagaaaccaagttcgaaccttgtattcttggctttattaagatgcataagaacacaccagcttttatcaaaattaataaaataaaaaaattgaacacataacaacaaagtttttgaggagtgtggatttctacttggcctttgaattttgaggactggtctacttggttcagccaactccactccagtttgaattttgaagctaaatgttaatacagtgaatgtaattagtgaaagtgaagtctagatcgagattctagctagaactgactcccttaatggttgtgttgtaagctgctagtgcagttgcttgattgaataaaattcctttcctttgcttccaaaaaaaaaaaaaaagaacagcttttcttgaaattataaagaagacaagaaaaaaaacaacaacaaaacaaaagggtaattgaaatcatttcaaaagtataaactttattgaggtgccaacctctacaaataaacatgtgtattctattgaaagagaatggggtgattactgttaacggtgaggctctccttaaagcacataggcatacatacatagcagtctgtatcctattaaattttttgtctgtaaatgaaatgggcaatcattactatccatccgtgatccaccgagttgcatttcctgtgcatgcttccaacatttaacgtaccactacttaatggtgtgggacagactccaagagagaaattaagattatttgcttatgtatggaaattcatataatctgccactgcccatttcagcatttctccctgttggctctacaataatgctgccttataacaccatcaacgatgcagccgccgtgcttgggcggaacctcacctatg

SEQ ID NO: 14962 - DNA, 8228 bp, Cannabis sativa
gtaactgtgtaattggaagtaattgagagagtaattatatagttacttccaaatacacccttaatttcgcgatggcaataaaccttggccactcgaatgatgccatgaaaaaatctccaaaagcttattggccatattggccactcgaataatgctattggccatattcaatgtccacaaagcttccactaactcctcttatgagtagaaatcaccgtaccatcatcaggtcgggcttgaactaagacgaactaaacttatgcctagggctcacccaatccagagaccccaaaattatttttccctttaatatttttcaaaaataatacatatttctttaatgagggccaataatatattttttgtccttaccccccacaaaattttagggcactatcactctccatagtagctttgtaatcttacactatattgcccattagcttcaaaatgccacatcattttataaggaatctcacggcaactaatgggaatattcacattccaaagctcttttctaacaaaatcttccttccaacacctattaaaacatttctaaatatgctctttaaataaacctttttagctaaaataggcaatgagattaaaaaaaatgagtttcaaccataaaaaaaatgtctctattatagagaatagatagaaagctctctactgttttgctaaattttttttaattgtattttaatcaaaaatactattttattttattattttataaaattaatttatatttaataaattcaaattataaaattttaataaaataatcaaatagtactatagtagagagcatggttggagcaacaacaatgaaaataactctattttaacttttagctattttagctaaaaaaaaaaaaaaatagagtaccattgaagatgctcttagttaaaatagagagtgagacttgaaaaaaatgaattttaagagcatctctaatagatgtgtaaattagtggtgaaaagaagctaaatatagttcatttaacgaatagtgtgctccaatggtatgccaaaaagttatgtaaatttggtacatataaaattttgtgccaaatttagcacaacatttgctatgatgtaaaatttacaccacaataaatgtactattttttaatttacatttatgtcatttctattattttattagtatatttaactatcacattagattatgaaacgtttatattattttttttattgtcttacatattaaaataataataaaactaattataaagttattagattttattttttttaataaaacattaattagatattaaattttacatcaacattttacaattgtgtattgaagcacaaagttaaaatttgttttgtgccaaaaaataactctctataatagcaaaaggatagggagctttacttttttgctaaatttttttaatagtattttaatcaaaagtattactacttctttttattattttataaaattaatttatatataacaaattcaaattataaaattttattaaaataatcaaatactaacaagaatcgagagagcatgaatagagcaataacaataaagttagctctcttagtaatataaaatttgccacctccaactctcacacctagctagacaactcatcagaggagtgattggttgaaacgcagacaaacgagggagccaatgatccttaacattttactaccattcccaattttttatatataaacatacatatagattttcaccaaaaaatacatatatatatatatattctatttcatattctaccaagggtggggtcagagactcagaagtagtgagtagatagtgtttttgccgagatttttagaaactcaatataataaaataagagctaagtaaataaattaaataaaagaattaaaaatggagaatatttttacatggttcaggtgttaataaaccctagtccacaagtcaataatattgggctaaatagtcttgaagtgttacaccaatgttcttaacaagcttaagagccctaactttttgccaacatcctacctactcagtgaccggaagaaaaaaactatcaggtattggaagtgaccctgtaaaataccccgtctctatcaagcctagtaagggccctagaatatgcaacaataaccaggcttgaaatctcatatgttgttaacaaggtatgccagttcatgcattcacatttggagtcacattgaagaactgttaaaagaatccttcgatatctaaagggtacacttgactttggacttaacatgaagcactcttctacccttgattaactagggttttgtgatgtcgattgggcatctgatgttgatgatagacactccacttcaaggttcaatgtctaccttggctcaaacttggttagctagtcctcttaaaagcaacaaacagtacctcgctcaaacaatgaagcagaatatcgaagcctagctagtgtaacggctaagagcacttggatacaagctcaacgaagtgactaaagtccaaatacacctcgaccaccaacaatctggtgtgacaagctcagcatagtgctaatgtctttcaatccaattctacatgctcaaacaaaacacattgagttagatctatactttgtcagagaaactatcctggccaagactctcgaggtgaagcacacagcagcctatgatcaaatatattgttgatatcctcaccaaaatcactatcaaatgctcgatgttcttctcataagcaaaagagtaaagtctctctctaccctaagtttgagggggatgttaagagacttaataaccaacagttgtacctaatctcttctgttattagctactcaattagttaagaagttagttaaagggtagtttagtcatacttggaattcgttacattcatctttatataagtttgtaatgtactttgataatcaatgagaatcatttctttcccaagtagatcttccttaacaagttcatgtctcaagatgaatgtggatgcaacagttaacactgtagcttgtcgtattggtctgggagctgtaatcagatatgagatgggtcgagttcttgctactttatcaaagccactaataagttaaaatctcatgaaatggaagctatggctttatttcatagtttactttgggcttctcagttgtagttacctctcttataaatgaaaattaatgctcttcgcatttccaaagcaataaatcaccatggatcattgttatctatttttacaaatattattgtagaaattgttggaattttatcattgttccctagagttggtatctctcatattaagaggggtgccaacaaaattgcacttggcttggaaaaacatgttagggttggataaagattgtgtctagttggaggatattttctctcctattttatctgttattgtaataaaggaaccattttaatttataatatcaaatattatttttaaaaataaataaaaaaaaataataaaataaaggcctctatttatatatgtggttggtagctagaaatctgtattttttttttctttttttgtagtgatttgttaattaattaccaagactaataataatatataaatacactaaacttaagagaaatgctagcaatactccaaacttactaaacattataatgcctaataccaattcacacaccaaacttaaaaacgtcatctccatcatcacagtacctaatagcaatgctctaaacttaaaaacatacacacagacaaaacaaacaaggtggtttagaaaggaacatacatcaagttcaacctaaccaatgtaggttaggttttctcttattttattttgacgatatatagatatagatatagatatagtacgatcagtgtactgaggttattccgagatcaacttgcgaggagtacaatgcccgaccacatgccagaaactttcatgatggcaaatgtttgggtagcaacagggaagactatcatctcctgcataacattctgcaccgacttgcgaaatacattgagaatcaggagtacaagtaccactgaatccataaccatcgcaataaagtccttcacaacagattttgccttcaacaaaagcacaatattcagtaggtatgtaacacctatttggagttggattattattattattcaacataaaaacattggctacatccattcgaccaagggaccctacaaccatagtgatcacaagaattattattattgaaataattgatgaggacttcatcatcatattataagaaataagagaaagaaaacgataataataataatgtgtgtaagagaaagagagagtagtgtggaagtgaagagacaccacaggtcttacttttatagccctaaaattaattatttgtatatgaaaaaagagcatagttattgggcaccaatattggctaacacctcactacaagaaatgtcacttttaccagcacatttttgtgctggcaaaagttggtattgtgctggtaaaatagaatttacttgtgatgtgttggcaaaagggagttggcaaatcaatattggtattagaacttttgccaacataaaatgaaaagcgcgggcaaaaatgacttttcccagcgcgtaaatgcgatggtaaaagttagattttagccactgcaaatgtacgctggtaaaactttgacctctttgctagtgcagtttgtgaaatgcgctggcaaaagtaacttttatcagcgcagtagcaaactgtgctagtaaaagtgacatttcttgtagtgcattttgacatgtcgtcttgcaattatctagcgatactttctaaaaattattacattcgactatatgggaccctatatttacgatattaattatacataaaagggtacaggcaccattagtgccttttagtatttcacatgaaaaaatgcctacatccattcgaccaagatacccacccaacaaccatggtcactagaattattagtcaatttatttagtatgaaaatgatgttatgttatctattgaggttttattatgtgtgtgaaaaagttgaactgtcccactttttctttttggtaaatttgaactgtcttaatatgtattcaggcaggatttacacgtttgattccactagtagaatttgggaatataaagtgaatggggttccatctcaaaatctattggcaatgggacattccccctcaagatggtagctattttatttgctcaccatcttggacaactcgatcataagcggctcttttttggctcactatccctgatcacaagtggctctttttgctctatttttcatatcggtatttttgaatttttaggagctcttttttatttttggctctacttcgatgggtttattttttggggttgaatagtcgctagatattttttttttttgttttgctgtgataccatgttacaatttgggaatataaggtgaatgggatttcatctattttatttccacacattaacaactagttatatacctatggttaagtctagttttttcttttaaggaaaaagtgttattattataaagactagtattgctagtcattacagacacatttagaaagtattagacacaattagtacccaataacaatactggtatccatgggcaagaagaattggtctagcttaggtctattccaatcaccacaaccaacgtacattagttttattgtttagtgagttattatgttttgtttttatttgtttgcaaataaaggaatgaacaaataatgaaaattgatggaaaagatgataaaaaaatttactttctggtgttgatttcgttaaaagatgaatcctcaaataatttaaagactgttgaatttttgggtataaaaatatgaaaattgagaaagttttgaaggcccacttgatgaaatttgtacattttaaacttttaattatatatataaaattaatataaatggaatattttatagttttaatagtaaatttattttttcttataaatatttatttagtactctaattttatgttattttttaaaagaaaattatctcatatcaattattttttaactttttttaatgtagattctgttgcgatttagctacgtggcttgttatgtgaatttatgtaaaaatataaaaaataaataaaaagaaaactactttgaaatgtaaaaataaaatatttttttttaaattttaaaaaaataagggtaaatactattttgaacactgtattttgtaaaagttaccaattggacctcctattttgttaaacgacaaaataaactcagtattttctaaaataggacccttaacttattttttgttaaaataaaacttaataataatatgatctagagatgttatgataaaattgattacattttctgtatctgctcgtgttaaaaattatcttaaagttggttatattaaaaaataaaatggttgaaaattgagttcagtgacctatatatttataccattttagaaaataaagtcaacaatagagaatccaattaataatttttacaaaacaaaaggaccaaaatagtatttactccaaaaaaaaaaataataataagaaaaaaatacaaagtccaatcatttttctttttctttttctttttctttttctttttctctttctttcttttcttgtgcagccgtgtcccccaactactaggcacgcgcgattgagatcttttcagataataaagtgcatcgtttcaaacacttgccactaacttcaagtaatattcaaaagatggcttatacactctcaaccaaaagtttcttactttttagtctaatatttatatttttgaactaaactaattgtagtaaaaaaacaaaatagaagaagaagaagaggaatactttcgaatgagatttgttggctagatatacaaatcaagctagataaaaattaaaaaacaaataaaagaataagcatttcttttattaaaggaaaaatgttattaatcaaaatagagcatatattacaaaaatcagcacacagaacaacaaaaaaacttatttacatattacaaataaaatcaaatatttattggtccctcttaaaaagattcctcttgttaactagggccagtcttgaaacaaagtgggtcataggtaaaaaaaattttttggttccttatgttaaaaaaaatgtataattttaaaagaagaaaaaaaaaatttggacccttggactgggtgggccctaggcacaggcctagcccgcctatgttcagggccaggcctgttgttaacaagtagtaatctaactttaagtatgattctaatcaaattattcacatgagaaactaaaaaaaactttttgcttaaagatacaagcattacaattccaccaaataatataaactgttgccgcacaagtagttgcaacaaccctataaagcagattgggatcacgattagcattcaaccacaaaagccgattcaggtaagactcaagccaaataattgccaagccatgcatggatagcacgcataagcattattactaatttacatattatttaacaaatgagaaaaagtgaattccaagtaatatagataaattaatgacatttttaaaacaaaaaattaaaattttagaaaactctcttgaattatattcttattcaccaccatcaactatgtacttcctataatgtcattaataactcaacaagaggaagttcaactaagaacgttacagaattatttacatcttacacgtacagccacactttcatgtataatgtttctcatgaatatggtgcatattcataacagttcgtatgtgcatatttaggattttgaataggtggtgaccacattcaaataggttttcttaatcaagttctacttctttcttctcccccacaaactaatttaatttttttttaaaaaaacattcaatttctattcataaatgttagatagtctcacattgctaatgtgtagaaagataatagaatatataaaagggatggactcatcttgttgccaattaattttaagatgtaaccacattcactttattttaaattctaacaataaatcatattttatgtaaataaaatttaaaaactcataaaaattttaaaaacacactacaagaaaaatgagcattaatgaggacaaatttcgttggtaaaaacccctgttttcgtcagtattgcgcatcaatgaggacatttcgttggtaaa

SEQ ID NO: 14963 - DNA, 18698 bp, Cannabis sativa
  modified_base (18308)..(18314): a, c, t, g, unknown or other
aaaaaaaaaaaaaaaactataaagatcatgattttattccccaattcctataaaagaaatttcaaaaactttctaaaaatttctcaaatttatgtgtaaatggtccatacatactttatttaagtcgaaattttttcaaataaaattaaacaaaatgaaaaacaatttatttcaacagaagaaagtaactgtatttcaatttatagatattttttccgtcttaaacaatctcatggaaactgattactcaacaaacataatatttgatgcaatgagtaaaacggagcacaggtaagtaattagttaagtgtgtggcagctcatcataaaataaataaaaattgaattaagccaaagatagaaagaaaggcatgcaaattacaactacgcacagccacactgtattcagctctttctttctctctccgtacagagcagcagaagagaaacacggccctccatccactcctcttcactggacattcctttctttctctctccctccgaacaacccgtcccaccatccaccaacttttccttccaatttcctctctctctctctgaaatcgggccttgtcttccttattgcatgaccctttcttcttcctccacgtgtcacttcccgttgtatcaactctctcctcctttccactcccctctaattctacaaatataataaatttctctttctctctcttctttcgatcatgtcattttgatctggatttcatatttctagctatcactttgcttcacccatatacaggtattcatacagttatttatatatatatatatatataatatacgtaagctcacgaactatatatatatatacaattctcaaataatttcttctctccttaaccatgcaaagctaaacggaattttaggttatttcctttctttaattttctttattccgataatttcattttcttggaaaatcaaatgtaatgtagattttctttagtatgaccgattaattttctgtgctgttctcttcgaaattcggtatatcaatgtgattctcgttagaacgcggctctgtttggttagctggaaaaaccttgggaaaaatgtgaatattatgcattttctgatggtaatatgctttcaggtttaatttcggccggggttgagtacgtttaacgatcatccctacgtcgattgatttcttaaaaaatcaaattcgcttccaatgtatattattattacaaatacttgtaaggccgcaattttgtgatttctgtttgtttagctagaaaaaccttgggaaacgtaatgtgtaccgatttccattttcctttctagaatttctcgaccaggaaaccaacctcacgggttacagacgtgtatctttaaaaattgatttcagttcttgattttctagtatcatatggtttcgaaacttggcgcagggacagggaaattttgaagcgcgcggaggagtatatatcataaggcctcgaggttacatcaatgtctaacctcgagtcaggcccccaggggctgacgaggcggccatcgcgcagtgccgccaccaccttctcgacggaggtgttcgacaatgaggtggttccttcgtcgttggcttccatcgttcccattctccgtgtcgctaatgaaatcgagaacgagcgacctcgcgtcgcctatcactgtaactccatcaccttacaggcttatcgtttgggaataattgattttcagtagtgttttacgaaattgttcaactgttttttcttttgtcttcaccaggccgattttacgcgtttgagaaagctcaccggttggatcccagctccagcgggcgtggtgtgaggcagtttaaaacgttgctccttcaacgtttagagagggtacttattactttcctgttttgtttttactcttctgtataaatataagaataaaaaaatcattgtgctatgcaattaaatgaacgtgtccgaaggtggtgagctaggaaattaaattactcgtgcaaagttttccttaccatgtcagaagttgaattaattttactgttaaatgttagagaattgctaaaagatatttatgttgcctgctacctttttcgtatcacaattgagtcttatataaaaatacgttttaaaaaatatagttagctaacaatgaaatgtcacctaaaagactaacagtatagtaatcctctaagatgatgtttgattgaaactaatgaaattgaatagaatgaaaatgagacaatctttatttcattcatttatttagttgcatattaaataatatattggaatttcatttcaatagaataatctttccaccattttgatagaatggttgttctattttgaaataaaaagaaaaactatttcaagatgagaaaaaattaatttgataatttttttttatcatgtattttaaattttattctattcttattcttattttcattcttatttctctattttgattcctcccaatcaaatgtcacctaaatattctttccaatttaacaattttcccggtcaggtcatttaaacttttgtaattgcatatggtatataaatataaataaatatatatttgtgaatgctattactcttttattggattaattttttttttagaaaagtttaaaattagtgtaaattaatattaagtcctatatattttaatttaataaataatataaaaattaaatcttcatgatagattataaaatagttctttaaatgtgtccgctgctagcattgtacttattttctgatatttcattgttttgtaataactttgcttctgcttaattaatgatgttaatgaacttgtttgattgatggccaagttgtcccaattcagtagattgtttgcttatagctgatttatagtattctcaatgaaattttttgctttaaaaaagaaaaagaaaaattataaaatagttttaatagataggaaaattattattaactattacatgatattttccatttttacgttcataaataattgcatatagaagaaaagaaagcagccttacaaaatggggaaagtcctttgctattgtgtcttattttagatgtattgacatagtatcccattagtaaagcttatatgctatacaagaaattaagaggataggggtaatttgctattgtctttgttatatattaataattaaatataacaggatcaagtgatatacaatttatttttctctatataaataaatagaagtaagagaaaatttgcaaaacaaaattctttttcaaatgtcgatcaagattctttattaaagagtagtgtcctgtgttaaacgaatttaagtttgatacgttaattaattttttatttattaaaaaattaaatctctaattgaatcaataaaaaataattaatgtgtttaatttaaattgatttaactgtgacactaatttttaacaaagaatcttaattctctacttgctatcccacattctcattttttaaaacttttttctccatcatatttaggcatttttaagtatcatgtacacattgtttgttaatgatatctttgtgtttagttgtacttgattttagctcattctaattttaaagtttgcaatcctttagcctatatttctctctatttgtgttgatttttttttgttttttttttttttttcatttcacgtttgtcaatgttcattctttttttaagaccatttttattttctgtggtttatctatttttttcctaatagtatttggaattcttttgaaataaaaaaacagggttcccaacacttttatactaattcaaagactaaatatgtttacagcataatctattctatatattaagcaatgctcacacgttctttttattttatactacttaaaaaaaaaatacattgtgcattttaaagtaaaatttaataagtttgatttgactatttttgtttagaaagccatacattgctaaaggtctaacactacattgatattgatgtagcatgagtagataatgatttttaatattatttattaaataaaaatgtataagatgtaatagtaaattactaatataataataatatgactgattataaagttttctgtttatatatattcaactgaataactcataatacattagtataaatgtccaggaaaataatgtctccatataatttatagattattaaaaataacgagttctatttgtttgcgattttaatgtcaggtcagtgagtcatatacaattttagggtttttttatccttaatttagttatttatttttatttttgaaaacgaaaagaccagaggcttgctaagttgctctccctcaacaagaaaatatataatttggggaaaagtttacttggtaacggtccatttcttcaagttagatcaaatataatgttattttgctctttggttttattcatgtgaaaatgagaatcagctgataccgacatttgttaccaattcttgttaaaagtgatctgatggaatggaatagagaaaactgacttcatgtttatttaatctaggacaattcttcaagtcttgcttctcgggttaaaaaaacagatgcaagggaaattgagagcttctatcaacaatactatgaacactacatcagagctcttgaccagggagaacaggcagataggttagtcacgttgtttaaaaaagacaaaaacaattaaaaaggaacagtctttcccaagttttctttctgcgtgttcaaagaaataccagtttttacactactttcgttgaaactataactattcccaattctgtaacagagcccaactcgccaaggcttaccagactgctggagttctttttgaagtgctatgtgccgttaacaagagtgagaaggttgaagaagttgctcctgaggttagtctaactctttctcatcattatcttatttgtgtttgtctgcgtacataaaattggatggtgttattcatcaatatcccgttaacagattatagcggctgcaagagatgtccaagaaaaaacggagatttatacaccatataacattctccctctggattcagctggggcttctcaatctatcatgcagcttgatgaggtattccttctgctattttagattttctcttgcattatgttttttagtacttgcaatttacctattcctgtttttaacaggtcaaggctgccgtagctgccttgtggaacactcgaggcttgaattggcctcatgcattcgagcagcaccggcagaaagctggggatttagacctccttgattggcttagagctatgttcggattccaggcatgtgtgtttgagtattagaagaaaaaaaaaatagcattattagttaatcatagttgcatgatttcttgaaagtcacttttggtttgattgtattgattgctacagagagacaatgtcaggaaccagagagagcatttgattttgctgcttgctgacgctcatataaggctgcagcccaaggctgaaccacttaacaaggtataaattaattatcctacttcaattttgatgttatagcatctttctttctttgataaaattgttgtgttacttctccttttgtcctgtaaaactcatttttttttatatgcagcttgatgatcgagctgttgatatagttatgagcaagctttttaagaactataagacttggtgtaaatttttgggccgaaaacatagtttaaggtgagatataacagtttctatgtgcacttctctttttaacttttgaaatcagatttggttttatagtttagtttatccttaataaatgtcttgtaaatctgtgtaggcttcctcaaggtcagcaagagatacagcagaggaaaattctctacatgggtttatactttcttatctggggtgaagcagcaaatgtccgcttcatgccagagtgtttatgttacatttttcacaatgtcagtggctcactaccttatttgttttctcttaactgaatactattttataaattgtacgttatgtctttaccttatcagtaacaaagtccagtgatatgtttagatggcctacgagttacatggcttattggccggaaatgtgagcattgttactggtgaaaatatcaagccttcctatggtggggatgatgaggcatttctacgtaaggttataacacctctttaccgtgttattgaaaaggtatgattcagcaacaacatgggtagtgtcagcaagtttctgctatatgtgttttaggcaattgtttttatttattcatttatgatactccaggagtcgaacaagagtggaaacggaaaagctcctcactccggttggtgcaactatgatgatctgaatgagtatttctggtatggtcgaagtcatttcatttcaacttcttataaagatttgactgctttgggtcatcttaagctgattcttccattttcacttataaaatttcaggtcatctcattgcttctctcttggttggccaatgcgtgatgatggcgactttttcaaatcaactcgtgatctgaaacaggtaccctgaacatttacacaacttttctcaaattcttaaaaggaaatttggtgtttaatacaatgtcactatcaggggaggaagggtcctcgaagaaagtctggaagcacaggaaagtcatactttgttgaaactcgaacattttggcacatttttagaagttttgatcgattatggacattttatgtacttactctacaggtatcaagctctgtaaaagagaggaaagaactcactgtattttgatatgctcttagttggatgcccatatcatttgtttattactaatgtttgtttaatcgcaggcaatgattattattgcatggaaaggaatttcaccaatagacattttccgaaaggatgtcctgtatcatgtatctagtgttttcattacagcagcttttcttcgcttacttcaaagtatgttgatcttaattaaaagaactatatgatctatttatttaaattgtaatttaagatattttatttcaaaagtgcaagaagcagtaattctgcctgtgctttgtttattaagcactctggtttcttacattagctattattatactgtcacacgaataccttataggcataatttgaatgataacaggaaaaataattatagaagaatctgattataggtggtactggctaagtaaagtacatctgaaatctaacagagttataagtaattaatctccaaacaagagatgtgatgaataattttcaactcttaaatacagctgctaatattttattaggcatgtagttatatgaagaacatttttgtcttttatgcatactatatagttctaacagtttttggctatagaagtgtgtattatggttagttatgaattcgtttttctttttaggtatattggacctgtttttgaattttccgggatatcataggtggaagtctactgatgtactgagaaatcttctgaagataattgttagtcttgcatgggttgtaattcttcctctcttttacatgcattcgtttaagggagcccctgtccaaatcagagatatgctttcatttcttaagcaagtaaatggtgttcctcctttttacatccttgccgttgcaatatatttgattccaaatttgctagcagcagctttattcatattcccaatgctccggcgttggattgaaaattcagactggcacattattcggttcctcttatggtggtcacaggtacttgtatcattctggtctttttatctttccatttatgtatttagtacaatgttgaaaccctcatccagcagcattttgttttaggacaatggtgatctcaaatacttctttgggttacactaacatgtactcttaatataattctcattatttaaaaaaaaagttttgtattttcttcttttttttcatttccttctctttgttcctgtatccagagtcagcataatatttagttttctagataaacaacttcgactaattatgataattgaaataattgattccaagttaagttctgtaagattatttttcatatgatgttaagaatttggaattcaacaaatcaatgtttaaggctgacatatatttgattagctcaagtttgcatcagacgaactacttactggtgtaagtagtgcatgcatattgcatattattcagattttgctttcttttcccctgtttatgatgatattagtttccatgaatcttaaatatatttggaagctacttctgttttcgatattttcctaattgcactaactttttgcatttaaagaaattgtaatttgtatattttttttaatatattatttgttctatgcagcccagaatatacattggcagggggatgcacgaaagtcaatttgcacttataaagtgagaatgtcaagaactatatttaccaactctgtattttttggtgaaacctttataattgttcttatttcttgatatgttcaggtatacacttttttgggtgatacttttgtgttccaagcttgcattcagctatcttgcccaggttttattcatttatttcatatgtatatttttttttatccatatgttagacaatctactattgttacgttaactttccatttgtcttttcctagattaaacctctagtgaagccaacaaaagatataatgagtattcacagagtggaatatgaatggcatgagtttttccccaagggtactacttgttgcttcttcttgtggcatgagcacaaaattaacttgttttctatgtatgctaataatctctttccaacgcagctcaaaacaactatggagcggttgtatcactttgggcaccagttatcatggtccttttactacatctttccttaagtttgatataatgattcattaatatgcccttgtataaatggaacttcttgctgcttttgataagacaactgacgctgtgccccatctcatcaggtttattttatggatacacaaatttggtattcaatttattcaactttgtatggtggtgtcattggggccttcgatcgcctaggagaggtattcctttttattatcatttttatttcatcaatttaatttaatgtaagatgtatcttacgcttcctgttcacttcttgggatagcctggtgatgaatgaaatcagtactttcttttcttctcattctttaataaaaactgtcactgattaaagcatgcctacttttcttacagatacgaacattggggatgcttagatcaaggttccagtccttacccggtgcattcaacacatatctggtgccttcagataggtcgcagaaaagaggattttcttttgccaagcgttttgctgaggttgcttttttaaaattttttaattttagtcgcatgagaaattgtatagattcattcaatatatctttgtttgcactgcacccttcagattacagcaagcaggagaagtgaagctgcgaaatttgcacagttgtggaatgaagttatctgtagcttccgagaggaagatctcattagtgacaggaaaggcctaaaattcagtcatattgtgattaattaccactaacttgtgctcatcattttattaaagatataccgggctctttactccagggaaatggatttgctgttagttccttattcatcagatccaggcctaaagattattcagtggccaccttttttgcttgccagcaaggtaagtatgaacatttttgaggtcttacatatgttactgtgctgtatttgaccttttcatttttacctctgcagataccaatagcattagacatggcagctcaatttaaatccaaggactctgatctctggaagcgtatatgtgctgatgaatacatgaaatgtgcagtgattgaatgttatgaatttttcaagcatgtcttgagtgttcttgtggttggagaaaatgagaaaaggttatattggcagcaattggtttctttacaattagaatatataattctgtttgttacagtttttagcaatcaaagagtcagaataaagtaatgtcttgttttgtagtctataatatcaatgagttacacttcttacagtttctgaaacttctttgtcatacctaaaatctgctcttacaattgacaagctcaaaactaaattgagaagtgaaaaaggtgctgagatattacattgtcttaaaagaatgtaattttccaatgactttcttagcgtggaccacttgattttgatcgttccatttttgtttttattgttttgcattttccatgtctgagccaaatttcaacgatttctttttcgcatcacatattgtttcatttaagctcagtcttatgcttgatccaaataacctgtaccataatgtaacctgtagagattacaaataagtgtttaatattttaatgagcgtggatatcaacaattattatgtctcaacatatataaaatgttgctataaattctgatttgattttgtggtttgcaggataattagcatcattattaaagaagttgaaagtagcatctcaaaaaatctgcttcttgcaaacttcagaatgggtcctttacctactctctgcaagaaatttgtggagcttgtagaaatcctggtatatcattagaagaatgtatatgtaattatatacatggtatgtgcttagtttgaaaatgcaataaactttgttattgcaatttctctgttgcagaaagatgctgaaccatccaataaagatacagtggtgttgttactgcaagatatgctggaagttgtcacccgtgacatgatggtgaatgagcttaggtaggtcaaacgttacgtcattctatttgaagaaactgctgtgtcttaaagacgaattgtagcggtggacatatatatgctcagtgcatacatttcttatgttatacatttcagggaattggttgaagttggtcatagtagcaaggatactgggagacaactttttgcaggtactgatacaagacctgccatagcattccccccagttgtcacagctcagtgggaagaacaggtataaaaaattactcagatgggttttcattgcaatctgtagtaactgtttaactgaaacatgcttattgcttgctatcattctagataagacgcctatacctcttgttgacagtgaaggaatctgctactgatgtgccgactaacctcgaagcttgtagaagaatctcatttttcacaaattcactgttcatggatatgccacgtgcccccaaagtccggaaaatgctttctttcaggttggataaagttttttactcatataaatggaacactttgaattctatatgtctgattcttcttgaaactagcaagtgtactcataattagaatagcaaggttttttaaggcctcagcatagaatctaccagtacctttcacgcggttattttcttcaaacaaattggctagaaatattttatgtttctatgttatatgtgcaagaaatattttatctgcaatagatcattcttgcagccatagctttggctcataaaatgaaatattgatgcgtgatttgttcttacttgtctgctactggcagtgtcatgaccccatactacagtgaggagacagtgtactctaaaactgaccttgagttggaaaatgaagatggtgtatcaatcttatattacttgcagaaaattttcccaggtgtgtggttctatcttttaactatgtttcacagtaaattttagatttgatttatgactttgaatttaatatttaaccattttgcaacttgtagatgagtggaataacttcatggagagaattaattgtaagaaagatagcgagatatgggaaactgaggaaaacattttacaacttcgtcattgggtctccctaagaggacaaactctctgcagaacaagtattggatgcattcctttttcatgtttattattaataatcagcttcctgtactgactaagtttttgtgtttcagttcgaggaatgatgtactatagacgagctttgaagcttcaggcttttcttgacatggctaatgaaagtggtaagagcatttacttccatatctttaaccaagaaacattgaaaaatcatgtaaactctggtgctttcatatattaggtccaaattgggattgtagcttttatagaaatcaacatcaactattctgtcttctaaaaacattattttagttgcttcataaaatttctaatgtatctttctgtgttctagttacttcctagtcctcttttagtctatttaattgttcatctttatcatatgccggtggtggttgcgtatgaacacaatgaatgtttttcctgcttgctgttcttatgaggtagtataggtagttatattttcttcatgttagtaatttcttgctgtgaacagagatacttggaggctacaaagccataacagttccatcagaggaagataaaaaaagccaaagatctctttatgctcaactagaagcggttgctgacatgaaattcacatatatcgctacctgtcaaaactatggcaaccagaagcgaagtggagaccgtcgtgcaacagacatcctgaacttgatggtcaagtatgttccctgtttgttaattaatgtgacatgtcaattcttcatttcattcaagagtttaatttaatttattttttcctttgtacagtaacccttctcttagggtggcatatattgatgaagttgaagagaatgaaggaggaaaagtacataaggtttattattcagtattggtgaaagctgttgataatcttgatcaggtaaattcagaacaataattgtgcttctatgccttatgataaatatatatatatttatatttaaaattaatatgtatagttaaatttgtttagtaaccatcaatgggtaatatctattgagaagtattttccatatatatataattattttgttctggtttaaaggaaatctatcggataaaattgccgggttcagccaagataggagaaggaaagccggaaaaccaaaaccatgctataatttttactcgaggagaagctcttcagacgattgacatgaatcaggttaccattagaatttgaagttattttatgctgtcttttgaattgaggccaagtttgaggcttgaagctttcaaatttctgtaggacaattatttggaagaagctttgaaaatgcgtaaccttttggaagaattcaatgaggatcatggggtgcgtccacctacaatcttgggagttcgtgagcatatttttactggaaggtgagaatattatttcttttttcttttctatccggagctccaatctattttaatttaatccagtaaagtctagctgatactttttataaataatatgcatggcagtgtgtcttctctggcttggtttatgtcaaatcaagaaacaagctttgtgaccataggtcaaagagttctcgcaagacctttgaagtaagctttctttaactttatcctcgggaagaaacaccacagcagctatgttttagacacgtatttgttttatcatcgtatttagtatgagcaagtcatttgtaatgaaaaatgaaggcacatattttattttattttcactaaactaatttgtgtcagctttctatagaaaaacattagctatgttctcattaaaatgatcaatgggcatcatacatgtatgtggaaagcattttcttaatcctccaggattaatattccatatcataccttgttatactttttaatataaatatatattatatttaggggtggggattgaactcaaaactttctctataagaagagatggtgtgggtactacttaggctaaaagtctagacagcattccgtattatacctaaagctgcattgatttgaatcagggttcggttccactatggtcatccagacgtcttcgacagaatttttcacattactcgtggtggtattagcaaggcttctcgcggaatcaacttgagcgaggatatctttgctggtagcactctcatgacaaaataaaaataaaagaaacgatattattcatttagcaatgggcactggggattttgttaacttctgtttattaatgttgggtctttcaggtttcaactcaactcttaggcgagggaatgtcactcaccacgagtatcttcaggttggaaagggtagagatgttgggctcaatcaaatatctctctttgaagcaaaggtggcttgtggtaatggagagcagacactcagcagggatatctatcgattagggcaccgtttcgacttcttccgtatgatgtcgtgctattttacgacagtaggattttatgtcaatgccatggtaaatcttatacttactacttaatgcagaattgagatatttgattagtctatatacaaggagatggttctgatatttattcttcattggttattcatcatcttacttgaagtaaataagttactaatattatgtcttactagtattcccttcgtttcacaaaaaaaaatagatatatatatatatatatatatattttcattgtttctttagttgggagttcatgatagagaaattatattcaatgttttttcacaccaaactctgccttaagtaaagttgccaatgtgattagtttaaggaaacagttagtggtataaatagacagaaaaaataattcagccagtcgtatttactaaccatttatttttggttaaaataaaaggttagttaacttcatcctttttttcactaaccatttattttcttatgcagttggttgtccttacagtatatgtttacttgtacgggaaactatatctgtcattgagtggactagagcaagcaatagtgaaatttgctagggccaaaggaaacaatgctctgaaggcagccatggcttcacaatcagttgttcaattaggcctgttaatggccttgccaatgatcatggaaattggattagagagaggatttcgaactgcattaggggacatgataattatgcagctgcagcttgcagctgtgttttttacattttctcttggcacaaaggttcattattatggacgaaccatcctgcatggtggtgcaaaatatagagcaactgggcgtggttttgttgtcaagcatgagaagtttgctgagaattatagaatgtactcaagaagtcactttgtgaaagggctggaacttatgatattgcttgtagcatatcatatatatggttctgctgcacctgatactgcaacctataccttccttaccttctccatgtggttcttagtggcatcttttctgtttgcgccttttctttttaaccctatgggatttgaatggcaaaagattgtggaagattgggatgattggagtaagtggataagcagccgtggtggtattggtgtgccagcaaataagagctgggaatcctggtgggatgaggaacaagagcatttgcagcacactggcttcttaggacgattctgggagattgttctttctttgcgcttctttctttatcagtatggaattgtataccatttaaatgtggccaggaatgaaacaagcatcatcgtaagtgtatcatctgtcatttactttcttggcttcttctaacgggttacatctttattaaatctaatgatgctagaatttttattcatactatcaatgaccagttttatgtatttgaaaaatcaatattcattctttttgctgggtgggatagcaaattaattaatcattgtattgcttggactatggaaaaatagtccaatattaaaaaaattaaattagagcttgcgattcctgtgaataggtctattttatactgaagaactttagtaatttatggagaaaatactgaaagcatttatctttccttttacttgcatcccaggtttatggtttctcttggctggtcattgttgctgtgatgatcatcttaaaggtttatacttcatgcctccaatagcttatgtgtgatgaatgaaaatgatctgtctatgacgatttattttactgacctctgtaaacctctgagttgcagattgtgtccttgggtagaaagaaattcagtgcagactttcagttgatgttcagacttctcaaattcttgctcttcattggatttatagtcactctcactatcctgtttactttccttagccttacagttggagatatatttgcaagcctactagccttcatgccaactggatgggcaatactgcaggtacatcctgatgatcttaaccttctttcatagtaatttttctcttttaccatttatgttcgttttggtgaaaaacatccaaactaaaatgtagctctcatacatcactagagatatgtgggttttaaagtaatactatgatcttactgatttcaatgttgtggacagatatcacagtctctcaggccattaatgaagggccttggattttggggatctgtcaaagccttgggaagagggtatgaatacatgatggggctagtaatatttgcaccagtggctatactggcatggttcccctttgtatcagagtttcaaaccagattgctatttaaccaagccttcagccgtggacttcagattcaacgtattttggctggtggaaagaaggacaagtaaacaatttttctttccccaaggagcatgaaaaatattcaattgcaaaaaaagacactaatcatattcagagggattgaattttttggaaaaagggaatgatggtggcttaaaattggaagttcagttacattatgtcaaaaaaaaaaaaaaaaaaaaagaaagtcgccttgttctactgtgtcatccttgtagcttacagaattttactttaaacaattgagtccaatttttaaaaaaaaaataaaaaaaccatgtccaatacgtttagttgtaacttacatttttatattgtaatgtaaaaatgtcatacactgatgacattgttttgcaaatttttgcttataaatttactgttcgagtgtatctaacttgatcacatcagatttacattcctctttttcttttttctttatttcttttttacaattctagagttcaaacttttaattgaaggtgtttaagcttttagcttattatgtcaaaactcagccgttcatacggttatattattgttggtctgattcgttatttacggtactggctcggtctctttcctatcgggtttgtccatgtgcattgaaaacaggggtattaaatactaaaacacgaatatagttttttcaagggaatgtactgttttttttttttattcagacttttcttttttgagagaatagcagtatccattgaataaaaatttagcagttgaggatatagagtacaacattggtttatattagaagacagccttcttattcaagtctaaagcatgtttagctagacaatgagaagtgtcattagcctctcgtgaaacatagctaaccgaagcttgaggaaatgaaaacagcaagctgttgaattgtgcaatgaaatcttgcaaatgaagattgttggaataactacaaataaccgcatctacaagcgttttacagtcagactctatttggtgaatcacaagtgactgctcttggcaccatttcagagtataaagcagagtgtgcttccatgattagtggctggtggattcctttccaaggggtagccaaggttgtgatagtttcatggttgtgggttcgaactatcatgccaaagcccatcttgttccgttgagtatcttgcgctgcatcaacgttgagcttcaggaggtttggaggtggtggctgtcattgatgggagaagtttgtagcttcatgagtattgtgctttgttgatttggcatttgtgttactgatattagaacaaatagtcttccatccattggatggtcgtataggcatcagtagggatgtaaacggggcggggcaggtgcggggattgctcccccaccccatacccgcttcctaaattcaaccccatacccgcctcaatacatgtttaaattaaagcgggggcggggtggggattacccaacggggtaaagattctcatcgggtacccataacatatatatttttgaagggtaaatggcggcaaaaccccccaaaactttcattttggtttcacttaacccccaaaacccaaatttgggtggtaaaatccccaatactcgcattctgttaacaatttaacatttctgtccattttaagtgttaagtgacatgttggactggacacagtgtacacgtggcacaattttattggtccacataaaaaattatttaaaaaataaannnnnnnttattttaaaaataaaaattaaaaaaaaatatttttctttaaaatttaaaaaatttaaaattaaaaaaataattttaaaaaataaaaattaaaaaaaaaaaccctaattccctatcccattccctcacgccctcctcctcctcctcctcctacttcttcttcctcatcttcttcttattctatctttttctttgctaaaaaaaaccctaacctaaacctaatgcacctctctctccctccaatcggaccaccaatcgcaccaaaaaatccctccaaacaggccctaggcccacctctgttcacacctccaatcgcacctccttcttctctccttcttctcgggctgagctaaacgcagagagagaaagaaagaaaaacgagaga

SEQ ID NO: 14964 - DNA, 9808 bp, Cannabis sativa
  modified_base (26)..(38): a, c, t, g, unknown or other
  modified_base (7974)..(7980): a, c, t, g, unknown or other
atttaataatttttttatcaattttnnnnnnnnnnnnnaaattttattccattccattcttattcatattcccattctcattcccattcctatgtttccatttatcccaaccaaacaacctgattgcaaatcatgtagaacccaaatatcaagatgattcatggtgacttgccaaggattatcaccctccttcaaccttgtaaaaataaattgcttacgattatatgtccacagactcctctctataaccctttgaatattaacctcatgataaaattgaaacaaaaataagtttggaccgagttccttaacatacattcccatcttaggctgccaaatgtaagccatcagattctgaaacacattgaaatcaaatgctggacccgtcaagaaccaaacaccaccttgtatcaattactacctcttcttccctctcaactagtagcctcaaaacacttgtcttttcctcctctatactcacatctacccctctaaccaccatccctcgcccatcaatgatactagaagccatcacaaaaacgaaataccaacaatactcaaaaaaacccaaaacaacaatctcaaaaattagagaggcaaccaacatttcatacgacacgactaagatttcgattatttcgtcatggtaaagttatgtttatattcttagaacacatatcacataactttactacgaactaagtgacgtttagttgtgaggaattaaaatataggaatagaaatgagaatgggaattggaataggaatggaatggaataaaatttataatgcataaaaaaattgataaaaaaattattaaatttttttaaatcttgcattggaatgatctttcattctattttaaaatggaataatcatttcaccaaaataatggaaagactattccatcaaaatgatattctaatagttttaaatgcaaccaaacaaagaaatagaatgaaaattgtttcttttctattctatttcatttcattacctacgctaaccaaattatttggattttttttagagtacatttattttagtaaaaaaaagaaagtaaatatttttttattacatttatttattttattaagagttttggtgtatcatgtgggcaaataccattacattttttgaattaaaataaaaaaagccacatgaaataagtttggggtagaactggaagcggtgaagctgccaaattgaccccaaaaggcacactgactgaccgttgtcctggcttgcttgctagttgctacaacctacaacaccctttttctctaaagctggttttgagtttcgaaagttgaagaaagaaactagacataatggccgaagaactaacggcgtcttcatcgtcatcggccgcggcggcgctgactgggaaatcggacggagagatagaagagatgttggatcgaatgctgactcgtcttgctctctgcgacgactccaaactccaacccttgctctccaagcttcttcccatcaccatatcctccctttcttctccctcatctgctgtccggaacaaggttttcactctctccaaatcttccttttggctaatatagatagcctaatttcaaatatagtttgataggtttgaatttgagcttcttctgcttttgttcggtgtttgcggaatcgattctatatgatattttatggatttgaaactcaagttaaatgccaattctgccatttttgtgtgtggaaatttaggtgaagtacaaaggaaatgcggggaatattattaccactgctttgcaattaggacttcttgtatatagttgtttgattattatattttaataattaatgaacatctgaacaaggtcgtgtactatatatatgctaaaaatgagtgctgtgcttctagtcggtatggattttcatcgaatgttgtgaatttgggtttctaacaggtgcttgagatattgagtcatctgaacaagagagtaaaacatcagcctgagattggtttacctttggtagagctatggaatatttattcagaagctaatgcggctccaatggtccgaaatttttgcattgtctatatagaaatggcatttgagcgtgcgcccgctaaggttggtgtttgtttatttatttatttacttatattgcttaaggcactgactttcgtttgaagagttttgtaatgtttcctatatgtaggaaaaacaaattttggcacccatgcttctggtgaatatttcaaagcttcctcaccagcaccaagagatcatccttagaatcgtcactaaggtatcaattagtgcctacttcaatttcggattagttggaaacttggaagtgttttctgaagtaatttacttcatacatcgtattacttgctgattaagtaattagttttttttttcccaaaaggaatttgactctcacacctagatggtttcttgattatgccaatatggtatatgaatgctgccctatgtattgttacatttgttaacaatttccattgtagtcccccactaactaagtggagtgggcatgctgtaacctggcttttcaagcaaggtatgccaggttcggcaagagttcatgtccaaataatgttttaatcaaagtcactctccaacttcctttgggttgcatcatcttcctgtctatgctttgatggtttcattatatttagaattgtggtactcttttggtctctcttggaaattgactacccttatttacccagtgattgttggtttcaggttattggtgattgtcattcaaaacaagttgatgatgatgttgctccaaaatacagggcagttagtgattctaaggatagagaactatttgttgatttttgccttcatacagttttatatcaaccatcatctcaaaggtttggaagaaagtatattgtttttatttaatgaaacggtagtcgaatgttaatataacaggtgataagacatcaccttaagttacatccacaagtgccaagtattatttggcaatgcttcaaacctcatttttaaagataaaaatgggcaccctttcattcactcttccactatttaaatattctcaatatttatagaaagactattacacttctcgcaaaccacctacgctttgagtacacaaaatagctcttctctagaaagtctttcacagtccccactttgtttctatttatttgattcttgggtgcctaatacattatctgtagaagttccttttagttaagatttgtaaagaactcacatccgtagaaaggctctcttggtcatttgtttttaagtcagctatggtcaacaatcttgtacaagtaacgaagttttttctgccaaagtttctttcactaaattatctttacaacatcaagtggtttctctattcataggattgaaaattgcatatgatgcacttaaacaattccttgtatcttgctatgatgaaaataatgcttctataattgtactttgaaattcccagaactatcttaaccatttcatacgagtctgtatttggttttccttatgccattatgtatcctttataagagaaaagcgccatagccgcttcactagtaaagctttgttgcaattcaaaatgttgccaataccaaacctcctatttacttaggttcccaactaataaatgctctccgttcccatcaaaagttcttgaaccttcatttcatgtctcccactatcttctttggaatttggaaaagagaagagataacttggtggcaaacaacaccaactataaaccacctccgagtcacagatgttttcattctgtacaatctttttgctaatcttatccaaaattggatctcgaaaattctgatctaagtgactatcacccctacaaaccttaatacttgatgggctagctatccactgaatgacccaataaatttgctagctcattaacatataagtccccaaggttaattattgaaatcacacttttgctcatattagtagtcacacacctgacactagatagaatatttttagtagaagcgactaattcgttaagttttgtatctttggtttagtaaagaacaatgtatcgtctgtaagtgggagactttcactgtatctatatcaatgccaaagccttcgaaaaagaccttctagatttgctttcattagcaatctgcttgggtcatcaaccactagaataaattaggaaaggcaaaagtgaatcaccaacttttgtgacggtcttttgttcattaagttgaatgtgttgctgatgataagcaccctcccatccatgatatccattgttgctcacaacctttctttcaactttctcgtatgtgcatttttaaaggaaaaaaagggacaaaattctacaattatagctgaagctagactctcatagcctattaaaataggagaacatcacatctaatacaataggttaccctactctcttttttcaaagtcgatctttagaacaattccttcttgatcagccactctataatactccacaacttaatcagctatatcataggagcaacattaagaacctatctgcaacaataaatgccccttaagcctttgatactaaatttgattgctattttgaaacagcttggaattggcatcctatcatttgcctattgaaatcttaacttctgtttgatagccctctcttctaatataatcaatttctgtaacacatttccttttttcttcgtactgtcctttgttcatcttgtagaggatatttttgatcaagtgcttgcattctacccctgagttgtttctccaaacaccctggtattctggcttttcaaattgtctttcatactttttttactcatgaattgatggccatcccagctcaattccacaattttctatttaacagccgaagaaaaactcgtgaatattcttacgttctaattacctattctcaaatctagaaagtgtatcctgtgtgggattagttggggtggggcccagatacccatgggttaaaaaaaaaggaagaaaagagtgggtgctgactttagaacggtaatatccaaagttacatggcagcagtacatattattagagcagtatataaatctagattatttttttcttcccttttagcagaagtttttgttaagatggaattcttaaagtgtttgtttatgatgcatctatgcagtagacaatgctcacctggactttcaatctctcagacaatgggtgttactgggaagcagtctttggacaaagatatcgtgttaataaggaaggtaaatgtggtattcccttgttttggaattcagagattatttatttttatggtacttgttctgcccttgaatcctacattattcatgttagcagtctgaagatacttattgttataatattactattgtgaaacctacaaaagaagggtgaatcggtcctaacagtacagccatataatatatgtaagtcggattatatatggtgtaggtatgggtctgttaataatctcaatgtcaaaaaaaaaaaagaaaaacaactgaacaatctaataagtatgcttccagtccctggcaattgttttgggagttctgctttctagtattgttaaggattggaaattgttgtcgtagttttgcttttggtgtggacttctttactatttttaaaacttgtattgatctccttaaatatgatttctgtctcagtctcttatgtcataactcctaattgtatgtaaaatgatacgaagattacttacatctatgtagatattcacatagacaagtgtatattatgttttcttttatttacaacaataataatatatgtttaagtgaggttatgttccttattatacctgtattaattctcctaaactaatatatatactaatatattatatattatattaatatataatatatttatgtatatatataaagacaagtgtctttttgtgcttttaggatttttctccacgaactatgacctatatattattgtgccaccgttagccatcgtctttttatgtaaaaagtttatattaaaaaagaagcgaaaatcagattctctgttagcatcctgctattcacccctataataagatatcttttagtcagaatttatgatactatttacttttttctgtaagcagttggggatcttgaacgttgttgaagtcatggagctggcaccagagcttgtttatccactgtatcttgctgcctctgttgatttgtaagtagtaatttttagtactcataggttttttatttgtggtcactctctgtgtagcattttgttttttgaccatactttataattctgtaatgactttgtcgttgttgattgattctagtcaagaccctgttgtaaaaaggggtgaggagcttttgaggaagaaggctaatggcactaacctagatgatatgaacctcataaacaaacttttcttgctgtttaatggtatagaatataccttcttcttttcttacatgatttgaatgagttactgtattatattggagttgattaattgttgtctgagctaacatacttactctgctactaatgtttgtttgagatttctataccttttctgttcggctcattctactgtgtgtgcatatatatattaatgaactcaagggccttttgttttgttaaaaatgttatcataattgaggagctttggttttgttgaagataacgattgttacttaatacggtgatgcatatttgagttttgcttaatattacatacaaatattctgttgaaatataaggcactagtgtagtagcatgcttaaattttgtgattgatgaatgggagttccaccatactttgttgttttacttgacataaactttttttctttttcatagaaatactatgcaggatcaacataaagaaatactttgtgcatggtcaacttatctcttaatttttctgcaggatctgccggatctcaaaatgttgctcctgagtctagggttactcctgggaaccatgctttgaaagtaaagctgatgtctactttctgcagatccattacagccgcaaatagtttcccatctacattacaatgcatttttggctgcatatatggtatgggattgtttattttattttatatttttgtgttccaagggcttctacgtctttgtcttttgctggacttggaagctattgagataaaattgttatttcatctttttgagaaaaatctgatgcgccataaagtattcaagttttgtttaatcatatataaaaatgcatagaggatggtgaaaactacatttttcttattattatacatgtgtttctctttaaaaaataaaactacatttttaagttaaaacgtcctaatagtgttttctctcccttcttttggttgtttgtattctttgttatggaatgagcgttacttttttctccatgcccgtggggttggtgaagggagggccccaattggtagaaaaaaaccctcaacccccggcttcttcttttttattttttttatttttttttatgtatatatatatatttcatgtattaaatgtagcattttgtatcttacaaaaaatatattgataacaattttgtattaaacaaaccctcttgattgcagtttcatttcttcaatggctttctatactactgaaatatgaacggttgaaacattgttggtagactaccttgtatgctcttttggaaaataaaaaaatattatgctgcctctgtcaagatgaattgcagctagccttttggctttgtaatgtaaaaggcttcaaggatatccctctctctgttttaattagagagtggaatttcttcgggtaattttaatctttataattttcttttcgctatcactcatggttcgagtgatactctgatctttgtaaccatggccttcctctgccatgagcgagggctgtcattatgtttggaaggaggtcattcatggacatattgacctctctctctctctctctnnnnnnntctctctctctctcttctttttttctcaaagaaaaagacaaaaatctacttgaaatgctctgtatttatttgatcatatgtagtttgtagctctttgttctaatctcgtagatgacatctttacacatacagaaatgtattggcttatttagtgcaagttataaagcagatgctcattatattatttagctgggaactgcagtagggtaaaaatgggttgttcttttctgtgatttgaatggtttttttctcctcttttccagctcgtcaatgacttggaagcattaaccatttttgtatatctctttcttgttttagtggcacacattttttttactagaaagtggcacacatttagttactgcattttaacaattatagtgatttgcaacttattacgtaattgagggaccaaaagaaaaaaatcgattttttggtagttatgtgctaatcaatgtaaaagttgagtctggatttggaggggttggggttgttgtatctgctgctaataacccctttgcctatagtacttgctaggctaccatttgctgaactttgctttatgtttttattttctgatgtgaaaggaaatgatactacatcaaggttgaagcagttgggaatggaattcactgtctgggtatttaaacatgtaagtttttttttttttcgtggattctcttttctacacccaaaaactttttctctattttttttaatatttatctttttgtctacttttaatttcttgtgttgtgcagtcacaaatgaaccagctgaagcttatgggtccagtgatactgaatgcaattttaaagtcacttgacagttattcaaatacggagtcaggtttgtcctatgcattgaagtttattggattaatattgccatcatcatttttatttatttattttcccaaaagaagataaaagaaaagtgacatttctattgtaaatattcaattggtcattttttttaagaagaaaaagaattatggcatttgtggtttttaatcatatgacaatcatgttgatttatagtataacattgttttactgtactaaattcaatcagatgctgctgctaaggataccaaaacttttgcttaccaagctattaacatgcttgcacagcgcatgcctcaactttttaggtacattcttctacttctttcttctagtactaagtatcatccgtacaagttatttctttctccaagtcaacatatttgtttcatatacccaagaggggttagctcaaatggttagacatgtagtttgctctcacaaggtctgaggtttgagtccctcctgggtacatacatagtaattgctataatttcctagtccccaagtattgtatggttaggtggatcctagttaaaaaaaaaaattcgtttaatatcccccttttgtttcctttaaatgttaatccaaacttttaaagatgagattttaaaggtgaaactctctctttccagagataaggttgacatggcggtgcgactttttggtgcattgaaactggaggcacagtctcttcgcttcattattcaagaggcaactatatcactttctagtgcgtataaggtatgttagtgtttacaccttccttgaaactatgatttaaaactttttgttatatatatgtacacacaaatctatttttcttattgaaatagtatgtcagtacttgtattactaataatcaaaataatacaatttttttgaaagagagaaaaaggtcattgtcacccgtccctcctgatatatatatatatatatatatatatatgttgctgaaaattattaattactacgcaagtgca

SEQ ID NO: 14965 - DNA, 10710 bp, Cannabis sativa
tttaaatttaaattaattttttatgtaaaatatttccataatttttatttttaaatataaataataatattataaaattaataaataatattttgttaagttgtagtatattctattaaagttaatgttataaattaaaaaatacaaattaaaaattcaatatatttatatttatagtgcttgtttcacattttaaaattgaagacacagatgatttctccatttctgaaatttaataataataataacaagtagctagctagagaggaatgaaaaaaaaccctcttttaactaggcaatatggtaaatgttggacgacattattacgttcttatctaaaagacacaactgaaataattaggtgtggtgttacataatattcatatctaatcaacattcatgaattactttttctccattaggttgaatggcccttttcttatattaaaaaaaaataaaaaattgaaagcatttgagcaaacccaaattttcattataaacatgggcccagaatagaaagaatgattataaacaatatttggggaaaaaaagcaatttcttctttattgaaagaaagtttttgttgtattgatttacttgctattaaaaaatatgaataaaaaatcaatttattttgctttcagttcctataatactattcaatggttgggattcttttcttttttttaaaaaaaataataaaaaaaaaatcttaaattggtttagcttaggcccttgagttaattggtcccaaaatagtagaagataagtttgtgaggagtgaggaaataccatatctgggaagacaaagtaattttaggtgggacagaatcataatataactaccaaacagacacttgagtcaatgggactagtactccatgtgaactgtggattgaattacttatatttaattcttcacaaaatattagtaaagaggagagaggaaaatattagaaagaaacaaaatctaaaggaaaaaagagaaaaatattttctatcaattattatttggtattgagttgaaaaatagaaggagagaaaaattgtatatttatattatttattattttattcatattattaattttattttattttaaataaaaaatattttagtattaaaaaaatatttccattcattttttactttattttaggagagaaattttgtttgatgagacctattaatattttacactccatttttttttttttaccaaacaatctcaaattttggttctatctatttttctcttatttcttttctttcctctaatttttctgctctactaaacatagtaaactgccatatctttgtaatttgaatagagaaaaataggaaacttgttgttttcgttaccgcttgcttttagaaatttcttcaaaccattacctaattaagagcactcccaattaggggtgttcaacaaagttataaaccccccaatttaaataaaccgttcaaaccaaactgaataaactgacaaaaaatacaacttgaaataatacaatgacatccaaaccacccaatgaatatattgagtagtttacaaattattctaaatcgctcaattaaacccgattttaataatatattttttttttaataaaaatgtatataatataatacataaattatatttattagtaaaattattttgtatttaaagtttggacattttagtgtttaacttaaaatctagactttatagttactaattttggttgtatttggatattgaagttgaagtttaaaattttatacaatattattacttttttttttattacactattcattatttcatgtttactcaattatatttatcttatgttaaaatttttaaaattaatttagactatagcattttttaacttgaaatatacatatgtatttttattttttaaaatttaattttttgaattagaaactaagaataataattatataaaaaaaagtgaagaacggtttggacgggttaacccgaccaaattgacgaaatagttgggcgggttgaactttttctaatttttaattaggcgggttacaattgaatatttgcaacccgatatttatattggattgaaaaaaaatatactataacccgactaaactgaccgacgtatacccctactcccaacatacaatcatttttttttttctctataacatttaaataataagttttaaatatatatatataatacacataacaaagaaaaaaaatactatttatatattattaaaatatttttaaaggaggaatatttttaaagcattgttgtattcttttttaaaatacattaattgtgttggactatagttttgcattttttcatcgatttctcttcttcgttctaaagaaaaactggtttaaaaggattcaaattgtctcttgctgtcccatctcatgtcgctttgatataaaattgtcacgtgtcttctatatttttttttaataaaaaatcataagatctattaattaataaattcgttcaaaacaatagaacacacttcagaggaacaatcttccaattgaagcacatgacatatagagaaacaagagtctcttgccaagcaatgagccaacttatttgtagatcgttttacaaaacacaaattgtgaaggcataaaataccgcttgcttcgacacacaccaaactatctgtttccaacatgactctatcccacgaatgagttacaatccaactcaatgcttctttaacacctattatctcagcaatatcgggttgaacacatccaatcaatataatttccaacatgtgtcttctatattaatacacagtaaaatatgtttggaaaaataaacaaagtaaaattgtaattatagacttttttttcttattttttttttaaattctctccatatatttcttaacactttaattacttataatgtgaaaaaatataatttttaatttaacaaataataataatagttttcagccattaatttttttttaaaaaaatcaataataataataatacttacaaataaataaataaagagtttttttttcctaatttcacataataaataatgagaaaactaatcttaagctgcatatatatatataaaatttggttaacattatatatcaatatctgtacaatataattaaattactaatatatatacttggaacaggttttaatggttacataaaatatatgtaactatgatggttacatttatttttagccatttaattattattgaatgattgtaattgaattagaaattaaatagaaaataacttgtaacctattgtaacctattgtaacctagctaatactttatttctttaaatttttttaattaagattaattttattttaaaattaaattaattataattattaattatttttttacaatttattaccaaacaagattcttttagcaattatttttttacatttaaattattttaatatttgtagcaaacatccttataatttaaaattataacacataatcttataattttaaataatttcatatacaaccttataatttaaaattattacgcttataaccttaatttaaaatgattatacctaaatatttaatttttatttaataatttatttaaaaattcaaaaattatattcaatcaagattaaaatctaacaaaaataataataaaaaaactattataaaactaatagagaatgctctggtgtactgtaccctcccattttttataagttgacatgtttatatttcattttactttttagtttataactttattaattttagctagtagctagagtcaatgtgtttttatctttcataaatttacacacccacatatcaatttcgtttatttcttcttcaccaatcgatatcacccatcatctccataacttttttcaatgggtttctacctttacaataaataaaatcaacaaaaaaaatatatgtagactattattttttctctcattttcttttaagtatttttcatgcttaaatctgaaggttggtcttttctttctttcttcttcttgtgtttttttgttcatattgtgttctcaacacaacaactactatatagtagtcttatggtttagagctaataaatttatatattaggagatgacttgtaataatttagatgatatatatttaatgtcatctttgttcaatttcaagtcttgtatttatttatataaaatataaaaatgagttttttttagatgaataaaagtagaagttgaatcgaatagaaatttatttataaaatcatataatatttaaaaatattttaaatcatataaaatatttaaatgaaggataataaaacatattatttaataataacagaacaaactaataaattttctccaatgtcttagttaaaaaaatatttaaaatttgagatgaaatctaaaattaagatataaatttgaaaaatacaatagtgacaactacaagtgaattacggtaatgacaagagatgagatatagtgatgacaacaagtgagatacgctgctgaaaataagtgagatacaataataacaatagttttaaatgatcaaaatatgaaaataatacattatgggaacatcgtaattttttttttctacactactctataaaaataatttcttttgacaaaataatttaaaacaatatatataataaattttaaatttcttaataaataattttaaataataattaataaaattgtgtatttaatttttaataaataaaattaataataataataataataatatgtaataagataatatatttataattttactatactttaggatatacttttaagaaattatttattataatactaaaaagaattaataaatatattgtctagttaaaaatattatgagtatacttaacaagagtattttaacaacaatgaataggaaaaggaaattgaagtttggagctcaaaataattagtatgtggagttaagtgttaagatgggttagtattattaccccaaaatcaaatatctaataaatagatcgataagagtaaataaataaacgctgacactaattaactaacctgctttccttgccaataggtgaaccccttgccacgtcctcgcccatcttcttatctccacgtcaccattaaacagtctccgagaagaatacttgatccaacgctctacaattttccacagctccttagatcaagcggctcagactacgtgttctagagccttcgaatcacgtagtagtagaaagggtagaggagagaggagagagagtggtcagtggtcaccctgactagcctcctcttaaccagggttaaactctctcaacgcgttgggttaaaggggggttcagagagagagagagaagaaacgaacagaacaaatttcagaaggaaagaagagataaagaagagagaagagagaagagaaagagagggttttgtggtttggactagtaaatatataaaatacataccatatatatatatgctagtcgactcgggggattcttcaaccccttgaaccttcttccccagaatctgagactctgacgttaacctcatcgtctgtttcttcttctttattctttgtacgagtggtttcgtcattgggagcttcgtaagcttggtgcttctttcggatcttgcagtctggtgagtcaccgcctctcagtctatatggttcagtgatttcgggagctcacttctcagtaatggctgaggatttgttcttcagtattgggtattcgtaaccctatgaatgaatagagttcatttcatcatttcttgagttttgtccatttttggccctgtgatatttgtctcaaatacagctgaacttgatttggctgagcagccaaacaagacatacagctgcttattttcgtagattgccgccattagtaaccaaatgaatgatcttaactcttcggaaatctatatgaacgaatctacttaaacttagagatttgctagattcacttgaagtggaggatatgttgtaatttgattattaagttttatggcttaaaacttaattctttgggtttttttttaggttaataccatgcttatcaatgaaaagtgattttgtttgtacatacaaatataaagttattttcttttgtttcttgtctgcttattgcagctgatcttgtcctgctgatatctcgcaatggcccattcaatgtagctttaagctgtattcactttcttctgcattattcttgtctcgtgataccgttgattagttggaatctttggcttcaaattggatttattctgtttaatgattttttgggaattggtttgatttctaattcgatcacctgtggcatcggtgtttggtgtctcctcgggagggacaaacttctcgtcctccgccacctctgttcgtggccgtcaaacccttcctcgtcttcttttcgcttgatgtctcgtgagttggacagccctgttcagactcagatggcagtagcaatttttaagagcccgcttaggacggagtatcatcatggaagccagagaattgaagggaggcagcctgctgggaggagacgtgttttcgtccaaactgaatctgggtgtgtcttggggatggagttggatcgtatggataatgctcataccgttaagaggagactgcagattgctctgagtgtccctaccgaagagagctcgctgacgtttggggatatggttttaaataacgatctcagtggcattcgaaatgattcccctcttcttcttactcggaaccttttgcatagaagctcgtccactccatgtctctcacctaccggcaaggatctacagcatagagataagagtggtcccatcgagatattggggaaatcagaaacgagaactaaagaattagtcaaggatattgtgaaggctgtcaagatgggggtcgatccccttcctgtccatagtggacttggaggtgcctattactttagaaactgcaaaggtgagagtgttgctattgtgaaaccaactgatgaagaaccttttgcaccaaataacccaaagggatttgttggcaaagctcttgggcaacctggtttgaaactctctgttcgggttggagagacggggtttagagaggttgctgcttaccttcttgataaggaccacttcgcaaacgtgcctcccactgcattggtgaagatcactcactcaatctttaatgtaaatgatggggtgaatgggaacaagtctaacaagaagaagctggtgagcaagattgcatctttccaacagtttatacagcatgattttgatgccagtgatcatgggacttcaagttttccagttggtgctgtgcatcgtatagggatcttagacattagaattctaaacactgacaggcatgctgggaatcttttagttagaaagcttgatggtgttgggcaatttggtcaagtggatctcattcctattgatcacggtctttgccttccggaaaccttggaggatccatattttgagtggattcattggcctcaagcctcaattccattcacagatgatgagctcgagtacattgaaaagcttgaaccgcagaaggattgtgacatgctgaggagggagctccccatgattcgtgaagcatgtttgagggtgttggtcctttgcaccattttcctcaaggaagctgccgcttatggcctctgtcttgctgagattggtgagatgatgagtcgtgagtttagaagtggtgaggaggaacccagcgagcttgaggtcatctgtatggaggcaaggaggatagtagcagaaaggattataatttcagaagaggttttatctccaaaaactgatatgaatgatgaggatttccagtttcccatagactacggggaatgggagttagatgcatcgacaaaatttattccagatgaatctatgatcaggtcaccttttcattttggaaatggaagtgggcatggacgatctccactctccaaactggaagaaagcatagaggaggaggacgaagagaaaagtgatgacgaacatcaaaaattgtttgcaaatttcccaaatattgagaagatcccaaaaatttctaacctttcaatgtcgcttaagagcactagtctaagtgagaaaaaccaaaaatacccaaaatatgtgggatcaaaacctgaaaatggttacattgtgaatacatcatctggccacagaagtgcaaatgagcagcttccagcaagcatgagctttgtgaagttagcagacatgagtaacgaggagtggacacttttccttgagaagtttcaagatttgttgtacccagcatttgcgaaacgcaagtttgtgaccctaggccagaggcagagacagaggcttggtacttcgtgccagttttgagtttgtggcactagtagtgtatggtatgagaaactactaaaagatgctgaataagatttgtagggtttctgggagtcgagtattactattggtataagtgtaggtttggtttatatgagtcttctccctggaagtagtgggggttcgacagcaggaggatgtgtaaatattcttggcatcagctgagcgatgagcttagtagatttgatgtatttcttcgtttacgttttgtttttttatttcttttgtttttttttttatctttcaccccttgtggacttgtttgataaataatttgtagactgagatttggaggaaaaaaaaatatatgtacagtgaactctgtttcttattgtatcccattagaacttggcttttatatattgtagcttgcacaaacctgagtcgagtattttcttcgatttaacatgtttttactggggtgtggcatagccgtgaatatttcagagaatcaacttgaggaatcatcagagtgatgggttggatggacaaagctaaagttagttaggtattggaatcttattaacatggaacaagttggtgagcactttgaagatgtataatattgtatagctaattgtatcgtctgtagcttaaatttctttgcttgcgggaaatgcattcatacgctgtctaaaactaattagtctcttttgatcaaactcgtatgtttcttgttttgttgaaactgcccagaaaaggattgtgtctaatcttaccttatttaaatatagtaacataggtaacgcacttctttccagcgtaagcttttgcagaaaacaggaatactaacgtgatattatgatacatagttgcattatctaattttgttgtttgtcctaaacagttattattaatagactcttctcttccctttctaagagtagatggaatcttgaagcgtgtgctaaaaatctgtcccttgttgtgatggagaccactttgtgctgtgtctttttaaacagtaataatgctgtgtttggattgtattgaattggtcattctacatgcatcatcatctcacgaaaccttttttgttctgtgaaacaattggccctaatccacagatagaatttgctgtctaattaccacttgccgactcaaactctaggatctgatatatattgtagtgtattattttattcactttaaaagtacttgtcgttttgaaaaagacgaccaccgttcatgtcatggttgttgagataaaattttaggagatgggtttattagggaaaagttatgtccatgctgacatagcaagcaaaaaaagattatcagcttccaactccaactaaggagcatcacatgcttaggccccactaacaagttaaatttgggctcaaattattttattattggccctttcactcgtcatagggtcgatacaattacaagtattttgatatctaaaacattgtcggtttcttcatattttggtaaattgacattttgtttttaaaatttttcattgtttgtgaggggaataattggataattattcttagccaggtgaacttgtccttatgttaactaaatatatggaataataaagtgttcggtcataattgagcttaagaaaatctgttgaaaggttaagggaagtcatcagctgtagttttggactttcttaataataaaagttgtgagataagagggacagaaaagagtacggcttaaggaacaatctaataagattgttactaatacaataagtaactagtcagcaaaaaaaaaaaaaaaaaaaaaaagtgcaactagtcaacaaggaaaacttttaaaacgtatagattattagatcaagatggttgttaagagaatgtcttaaaagtgcataaccaaacaagtaccatgagaaagcttgcttgaagattggggtggtaatgttaacatcaatggtgggatttcgttttctttgttaacaaaacaaacttgattcggacgataatcccatgtgaaagataggcttgaatgtttggtgggggtctttttttttttgactccttatttccttcaatcaaatattatttataaggagtaatattagaaaaataattttaatcacatttaaattactactagataatgtttcaagacacgagtatttaattttaaattatattataataattaaataatgttataaatacataagttaaaataaaaagttgctataatctacatgttgaaatatattaaggctactatatatgataaaatactaacatcactttgtatttattattattttgacacaaaccaatccaccttttaatggtaaaaaatctctaacttttaacta

SEQ ID NO: 14966 - DNA, 13636 bp, Cannabis sativa
  modified_base (807)..(817): a, c, t, g, unknown or other
gggtgatcatacgacctcttaacagtggtagtctaatatccatacgaacccgaaatcgaagaaaatgaccccaaccttcatcacaggaatcctcatgaacttcaagaaattcaccaataatattgcccaacaatttagccaaagattgggatttactcaggaaaggaagcatatatgcttgaacccaaaatggtgagaaaaccatagattcgggtgtgacattttgtaaaacagtaggcgtatacaagactatatgttgattttgaaaataccatggctccatccgaagagctctaagtttatccctaaagcaaccaaaagtaataaaaaataaccatgaatgatgttctaaaataactaccttaaaccgcccatcccaatgtttagccatttgacgttgaagagtgtttagccaaactttcctcggggataaaatgcggacaaccaaaacaagatccaaagattcaccaacaacaggagcaacaccatcgtctgtaatggccaccacagaacgttcagtattagttagattaatagttgatttcatacgatcaagaagggaatccatgctcgcaacagtgaatgcaaagagaacaaaggaactagaaaaatccgccaagaaacaatcaaaaacgaaggaaacttggattgaaagtagcagttactggtatgaaaaaacaagaagaagagggaaaataaggaaggaaactgggtaaaaccataaaaaactgttaaaagacatattaactgccacatagcactaaagtgggtagacgctcttttatctaatttatttatttatttttnnnnnnnnnnntttttttattttaatttttatcaaataaaaaaacaaaattttctatgcctttccctggtatttttcgccttgaagtgatggaagctatgcctttaatgtatagtctgcaatagctaaaggaccttcaattatttgttcactatatagagacaaattctcttttagtggtcaaatgattgtaatcatctaaattttctgtttccgatttccattgtctattaacaaatatttcccacttagtgtctaatttctctagagtgcagatttctcgtgtgtttagatttactaatactgttgctcaacttactagctaaatatgctattttgatggactctacttgtacttgattagaagaattgcctccttctataaatgcttattatattaagaactttaatttaatataatacacattttcatctttaaaaaaaacaaaaatttcattcaattttattctctttctcattttccattctatttttattttgtatccaaataacaccgaacagtattcctttccgtaagaataaagaaagttgcagaacatccctatcatcaatttccaaaaaaataaaaaaatctttgcaatcaccataggtcggtaggcactaaaccgtacattaaataaatatttaagcatattttctgatcattatccagaagaagtgacacaaaaaccctaaatccccaatttttaataagaattattattttcttttagggctgttttgccgccttaatttcaaaatttaccgctccctgttttgagtttccccctaatcagtaatccgcctttatatattctccacattccccaaccccacccatgatatatatatagtttcaaatccattgtttcagaaactatctctctctctctctctctctctctctctctctctatggtctaaaaatttgtttttttttttgtggacatggaagtgcaagctatgcagacacagtcaagcgaagccgtgccggaggctgaagagggagcattcgacagtcatgataaggtacgagaaattaacgagagttttgttgatgatcgagatatggaggttcaaatgaaagtcacggaaagtgatgagtgtgtgcgagagaataaagaaaatcccgtttttattgatgatagcggtattgggaatcaagtcaaagtatctgaatgtggtgagggaatacgggtaagtgaaagagacagttttgatgatcgcggtattgacggtgaagaggatgtcctaaaaagtgatgagaaagtattggcaaatagtgggaaagcatcggaatgtgatgagaaaatgcccgatagtaaggatagttttgttgtcggtggcagtatcgagggtgaaaaggaagtctttgaaggtggtgataaagtttccgaaaatgacgggaaaatatcggaaagtgatgagaaagcaagggaatgtcaggaaagttttgttgatgattgctgtgtcgacggtgaagttaaagtgtctgataatggccggaaactctccgaaggtactgcggtattgccagaaaggaaggagagttttgctgttgattgcggtattgagggtaagaaggttgtgatagccagggattcagctggggtcgtggtcggtaatggagcttctggcaacaaacgaggaaggcctaagaagtcttcgaatcaaagtccgaaactttcgaaggggaatggtcaggctaataatggtcaaagaaggaaaaaacagaagcttcggaaaaatgatggggagagtagtgttagtgaaagtgagaaagttgaaagggttggtgttagtggtgattctgttgataagcttgaatatggtccacttaagtctagtcttagggttagaacaaaggtcacgtatagggaaacaacggatatcgatttatatgacaaggattctaaaataatgaaggatggaggaaggggtcgtggaaagaagaatggtttacagagagaagtcgtgaacgatagcagtaaaaaggaggatttgacaggaggtcgattggaaaataaaaggaggataaaaaatgaggattccttaatgtgccatcaatgccaaaggaacgacaaaggcagggttgttagatgtaaacagtgtgagagaaagcggttttgtataccttgcatacagaactggtatgcattttttgatttgcgatgtgttggtttcttcgtttctaatttcttaacacgtcttgggtttcttgcttttattggtcttgaaattgcaaagctagtttgtgctgtacatgatgaaatatcatggatgcatatatattatcatacatatttgtggtgtgtttgagcatcatagcattccataaattaccgaagcaacaatgaatgcaataaggtagtcatacataacggagggcaatatattgtttttttaagtaacagcgtgggttgaggagatttttttatatctgttctacttgatttttttttttggtgaggacttgatcttggaattatatcaattagttagatttaatctggtctcagtcttgcagaacagagatttttataataaatatttagttttttttttaagtttggtagtcattacagttaggcgtcaactgatgtggtatcctcataaagataaagtttttgatgttctaataaacttataaacggttaccttttgtagttgttgactctatctttaacattgtgttgcctttttctcattgggcataaccttgtgtaggtatcctaatacacctgaagaggacattgctgagtcatgtcctgtatgcagggaaaattgcaactgcaaatcctgcttgcgcttagatgtacccctgaaggtcagttccccattttttgcagtccgcacatctagtaaatgctaaagtagttgattttacgagtgaattttcacaacatttggttgtgttgctgcagaaattgacgaagaaggaagttaatgttagcaaagatgataaaattgagtattctaggtatttgcttcatcaacttcttccgtttatgaggagactaaatgctgaacaagtaattgaaagagagctagaggctaaaagacaaggtatatcaacttgattctttttctcccattcttttctattagcggacattgtatcaagtccgtttcaggtcatgtgtgtagctctttgaaaatgtcaagagagaaacaagtgcacaattgttgtttcacttaagatggaattgaatatgttggttctttgtttttattcttgaaacttggatgaaaaatgtttatggaatttacaataaaaagtttgaatggatgttagtattggcaggaatagctatgtcagagctaaagatacaagaagcaggttgctctcaaaaagaacgtgtgtattggtagggcatcagcataaattaaaatagtttatttattattttggtttctcaaattcagttctttttggcagcaacaactgcagaacttcaatagttgattttcacagaagctgtcctagatgctcatatgacctttgcctcatttgctgccgcgagatacgagatggacacctgcgcgggggtggggaggatgctgtctttcagtttattaatagaggcttggaatacttacacggtggtaagcctaataaacctcaagtcactatcttttcggacagtgtaaggccaacctctgagtggaaagcaaatgatgatggaggaattccatgtcctccaaaggatatgcatggttgcagtgatggtctcctggaactgagatgcattttttctgaaaattttgtctctgatttggtaaagaaaggagaagaaatggcagaaacttacaatctaattgacatgtctgaaattcctggacaacaatgtttgtgctccagttcaagggatgtgagtcaattgaacaatggaacagtaaggaaggctgcttctcgagaggattcggatgacaattatttgtactgtccaacagccatagaaatccaacaagaggatctaaaacatttcaggttgcattggagtagaggtgaacctgtaattgttagtaatgtgcttgaaactacttcaggtttaagctgggaaccgttggtcatgtggcgagcatgtcgccaaatgaatcataccaagcatagtaaacatttggaagtcaaggcaattgattgtttggattggtgtgaggttagttttgtagccaaatttttgttaaataccaatagtgttaccaatgaattggttttgcttctatttgcttattattttctcttaactgcttgcttacttttgcttgtaatgagttcttaagtaatttttcttttatggttataatttataggatcaaatggtttagaaaggcgcatttgaggtggaggaaagcctcctcaaggcttaaacattaaagtgtagggagatgtaagcttccctgatttgaggtgctgcctcatagggtgagggaggtgcaaacctcccttaatcttttaaaatagggtaagagcccagaaaatgagcccattatgaattgaactttaatactaagacttcagccttggtatgttaagaattctaattatttataaagcccaacaaatgtatagttattttagaaacctaatcaacacttgagtagtgttcacctaattattttcccttttctcaaaaataaatagcaaagcttgggagaaagtcagtcaaagacatgcttcctttgtctctttttctaatataaataacaaagccattactaatcaaatttgttctattatagtagaatctaagagaattatagaaaattaatgggcattctatgctatgttggtgatagaataatcttagagtaaaaatatgtcccaaaataaataccagtaatgaattcctcaagtgatcttttttttgaaaaacaatgacaaaggtacaatatcgagttttcaagaagctcgtttctccgaattcccaatcttttgagaagattggtcttcccacatataatctactcctttttaattccaagctaatttaaatgaggttgctccctttctatttataagcattgattttaaaaagacttaggccacatgattacaattggatcaatagaattaaaatactaagacaactcatgctatgcacttaagagactaagtatttcctttaatcattttgtgatacaaaagataagtcttaggcttatcagttggagtttaattgacagtaaatgtcatgtgtaatggtgatttatttgacatcttactcttaatttcaatttttttttttttattttatgttttattattcattctttatatacttaggtatttataaatattttttaattaagtatttgaggctcatgcctcattacaccctgaggtttacaccattgcctcgtagagacaaaatgcctggaggcttaaaatgctttcttatacaagacgcgaacaatattgggatcataagacttgcatatttttgtccaggtttatgaattctgtattttcatcttctatataatgtttttaaaatttgttgtttcctgtactgtctgttctgtatatatgttaacccttcttttctcttctaatattataatagctttttatgtttgtgtcttttctttccatatatttttgtcatcatgattgttgttatgcttattgctttcatttaaatgcatgcatatgttttttgcaatgctgatttgacttgttgaaatgcaggcagacattaatatccatcaattctttactgggtatttagaaggtcggtttgattttaaaaactggcctcaaatactgaagctgaaagattggcctccaactaatttatttgaagagcgtctgccccgtcataatatggagtttttatgttgcttgccatttaaggaatacacacaccctcataatggttttctaaacctggctgtcaaactgcccaagaaggctataaaaccagacatgggacccaagacatacattgcatatggtattcagcaagagcttggacggggagattctgtaaccaagcttcattgtgacatgtctgatgcagtatgttggctatccttaaaatacatattctatctaagtcttggaatttgcatggagtatatgtaactcctatttcttaatatacttttaaaatggtggtaactttttaattcagaatgaaaggacaaaagtgaatgggtgaatcttgacctgtgtttcaattattctctcctctgagttggtaccaaagtagttttatgagtcttcttgaataccttgtccctgctagacaaatttatcatattatactgtagagatcaaaaaatgtttcaaggtttggttgtgtttcatagtttctaactttctaggtaggctattgtatcttctagggtttaatatacttttaatgcatgcagttggtctaaaatgttgattctgactatgtgatagttagagctctacctttttatacataatctgacatttttggaattttcatcatatatatatgtatgtatattttcattgagaagacaatttgcctcatcggactatgtgtagttgtctttttatacacactcacacaattatttattgactattagagttgggatgtactatatgtacttcatgaggtgtatttactctaatttcttctttgtcccacctctatgctcttgtccagcacttgttggacaaaatttatgattctttacacacattcatatcacaactaaccttctatgaatgacttcatcaataaggtgattagctccaatttgaacctttattctaattgcagattatatagaatacttatgattctactttttttgtattcatacaagctccttgctatatcttattgttacaagataatagtttactcttttgaaagaaaatcataagtacaattttagattgtagaagttatctggatcattattaatagcatttaccctgtttctcttcttaatatgtaagttattcgtatttcaggtgaatgttctgatgcacactgctgatgttagcttcacacctgagcaacttactgttatagaaaacctgaaagagaagcacaataagcaagaccaaagagaaatttttggaaatgatcagactgtggataacgaggttgatgataaaaaatctgtaaagaagaaagaggcaaagttagggcaagataaaagtggtcatagtattgatcactcgctaaattttgaaaataaactgcaaaacttggaaatggccgagggtggtgctctttgggacattttcaggagagaggatgttcccaagctgcaggaatatctgaaacagcacttcagagaattcaggcatgttcactgctctccattagaacaggtaattgcaccgtaaatagttttattaaatgtgttttttttttaacttaattgttgcttgatggtttaaaagataatgtaatcccagtttgtattttcagtgtttaaagttattcagaattactaattacttttctagtaatgtctctatgtgaaatgagattgttattctgtgaccttaccattcaagactttctgaatttgtttaagttgactcattattcctgtcaaatgtccattgttattgctcatttacactgcctttttatagtatgtaaatggaagggttttaacatgcttaaaggcttttaattctttattcttattgctagtggtgaaaacagatatatatatatatatatatatttaataactaaatgaatttatagtgcttaattggattttgtaggcttgttagcttttaggttttgtactgtgtcaaactggaatttggcctggctggttgattgaggctaggctaattcaatgaaagtattcttaaatattaatgtttaaagtaggtcatgcaactagcttagtatgtcaatttgcttggatggctctaatgaccatttcccttaagacatcttatttatgtagagaggactgggctggactcatagtattgcgttatagaccatcacaaattttaaccatgtcaaatgtgcttggttaaggtgcattgagttgagggaattctttaaaaatctaaatcttcaaaatcaaaaaacatagttggagctttagtgctagtatattatttgattttacttgcataatcacatgcccttcttcattccctggagattcatttggagctttagtgctagtttttatttgtttctacttgcataatcacatgcccttcattccctggaggattatttatttatatatttgggttgcctagtatttttattatttattgcttctttttggtgccataggttattcatcccatacatgaccagaccatttatttgactatggagcacaaaaggaaactcaaggaggaatatggttagttcattatagatgtgtgtggaatggttctattcataaatcaccccttttacatgcttgcatgctatttaataggaattgaaccatggtcttttgttcaaaaacttggagatgctgtcttcatacctgctggttgtccccatcaagtcagaaatttgaaggtaaaaaaatcacatgcttattatactgaagctgttatatttgttgatgaaacagatgatatacatatctctattccattactttggacaatcttactttgtaaagatgaaggccttgtaggcttgctttggcctgcttgtttttggcaacagatatttgctactttttcccattatctttttgaatgcatattccatgagtataagtaggtggctgtctatgtgtttttctttttccctacagttgcatgcttgcttctagtcatgtttattagatttaagtttgattgcctctttcaaatgttcattttgtgcttgcataaaaatttcaatgcatgttcatttgctataagtgggctgtattgttttttgtttcttaaaacttttatgcaatagagatagtttgatggttgatacgaattgttagctatttagaattaagagtctagtatattgtatatgttggaaaacattaatttgaccccaattactttaggagattaaatgttacatcttaagggatcttgtagttattgtattccttgattctatactctagagagttggtttgaccaaggagtttattgatctttaatactttagtaggtttcatagttttaatttggcctaatgtattgcatcgatgatgttttcttttgtgatggtattacatttttgagctcttgggcttcattatttttagcttctttgctgattttcttcaatttaaagaactcagttcttcattgttctttgatacctttaacaaggtattttctttgccttcatagctgattttcctaacttctaaagaactatggtctgccatgttctttgatacccatatcatagtatttattcttttgattgccatttttcttcctgtcttcaattcatgttggagatatctaaaatcacaaacacttctgcttggcaagcaatcaaaactaggtcaaaaattgacaggggtgatttaaaggctgtttgactgtttgactgtttttcagtttttagttttcataattgtttttttaaaagtgagaatgaaaaacaagttattaaaacttattttagtttttagaggcgttttttgaatgcatcgttttgaggcgcgcctcgaggcataagccttaaacgccttttaaaacattttgtttggctctagggtttgagtatgtgagctaaaatgtaaaatagaatatgttacataaaaaacttatttttgaaaattgaaaacaaaattttgatgttttttgttttttagttttttaaaactcatttaaaaaaagtttgccaaacaacctctattagttttttaaaaatattttttttgttttttaaaattaataataatttttaagttctgaagccaaacaacgtcttaatatgttggttgcttattgattgaatggggagaattgcttgcaatagtcttaagtagtatgaactcatttaaagggtagaggaaaaataagtaattttcctggtacaggtcctaaggaaggagatttgaaattcgattcatgggataaggaagattcaatagtgatgtcttggctttggaacttattctttagaaattagtaagacttgcattttctataatgttgccgaggagattgaaaggttggtaggctgaagtattcaaacatttgaaaagcaaaaatctatgagattaagatgaaggttgctactacaaaacatggaaatcaaattgtaactaaatattccaatctcttgcaaggtctttggcagagatggatcattatcaatatatgcaaatgaagtgtagtaaagattcagccaaacttgaaagatttattgaaagataaccatatgactttttgggtggccttaatatggaatttgatgtagaacacaagtacaaatccttgggaatgaaggtttgctttttgttaatgcattattttcattgttcttgctgaagagggaaggagttacgatagagaataatgctgttgggagattgacattagtgtttttattaatgtaaaaacaattgtgatggaaattttggttgaaccatcattcattgaaaaaaagcaagtagttacactagatgaaacctttcaataggaacaatttgtggtgcacttattgcaaacatcctatcacactaaagatatgtgttttatgcttctcaacaagctagcaacttaagccaataatggagcatggagaaatggacaaggggccaaggtaaagctaatatgattagaatgcaattaattgagaaacaaccctgtggcacctatcaaattcaatagattgagagattaaagaattttttatgatggctgcacttgtcatcaagctttgtaggtatttgtaatcttgccttttcaagtacatctttttatgctcttgatgctttggataatgcgactcacacatggattattagctttggagttacaaatcgttttaccttttcctccgcaaaatattattcctttataccttgtccttgtaagaaaatagcatagctaatgatttaatcgcgtcatttgtttgtcaagatgtttctatgaatagtccacatattttttttttccatgtcccaaaattattcactaatcttgtatctgtcccaaaactcattaaagatactgtagcgagacattaggtccttctcattgtgaattttgggaaatgggtacaaggaacattattgaacatgctaggaaaagagatggcctttactaaccaaatgaacaatgtaaagttgaaatggttttcctctattcaataatgatgggtattggcgttcatcatatttgtctttggttcccataatttattgctctttaaatcttgtttccttcagcattcaatagagttgttgttgattgttttcattgtgatgtttgaacttgcaaatcacaatcatgctacttttctagtaagtaataaaagtgcttttgttgtatgcactctttttcataatggggatccttaattgttcctggcattaaggagcttgttggattgtgtcgtctatatattttttggacttacaagatttatggcaagaagtaggaactcgatatatctaagactacgacactgtttagtgaatgcaacgtaaaatagagacaacagttagataaaaaaaggttttcgtgttccttacttggttaaacaccctcaatgaagtacaaggatgtttagtcagtcgtctcttctttttgatattgatgaagcttttttttttgaagaccatcgtgaagaagcatgacgctgagtcatgctcactggtttggaatgccaacctattaatggattgactcttatttgtaggtcttattctttttcgtgtaacaaatttgaccctaatctcccacaaccaaattgtaaggatgagaaatcttggtgtgatcattgtcagcaccattgataatttcaatcttcccgcaaggaaattcatggaaaactagccaagtatactcctcagtgccaaagttatagggaatcatagcaaaaccctaactcaaggtaatattgatatcccactaggcattgcttcactcatttagtaaaaaacaacttgaacatttatacgatcttcttgaattagtcctctctaaatttgttttttggttctagatctcttagtgctttatgctttgttgcacactatggtaatttctcctctaaaaaattctctaacaccattgacaatttcaatctacttgctcggaaattcatggaaaactagccaagtggactcctcagtgccaaagttacatggaatcgtagcaaacccagactcaaggtaatattgatatcccactaggcattgcttcactctcatttagtaaggaacaacttgcacatttctatgatctttgaattagtcctcactaaattgtttttttggttccagatctcttagtgcattatgctttgttgcacactatggtaatttctcctctaaaaaattctctaacaccttggataattgattcaggtgcttctgatcatatggccgatttaaattatttgtttgaatcctaaactccttattcttataattctatttgtcaatatagtctatgctactcttttttgcttttgtaggaattggtacaactaaattgttgagtgactgagttctcaagtcaatcattcatgctctttttttaaaatgaaatttaagttttgttagtaagttgaatactgataattgttgtcttgcttaatttatattcgactattgtcaactttaggaactatccttggggagtatgattgattgtgctaggattaatggactttatttctttgaaaatcaacaact

SEQ ID NO: 14967 - DNA, 14496 bp, Cannabis sativa
gagagagagagagagagtataaaatcagttaaagcagttagttattttaattagacagttaggttggttattacttgtacactgtactacttcgtgtatatctaatgccattgtatcaaacgattattcaatcaataataattactttattttttcattcactagttctaatatggtatcagatgaaacaaggtgaagctccaagaacttaattgaagcttcaagaattcaacaatggtgagaacaagagccactgcttcagctaccactaccgttcccgtggtcgatgccaccatagctcagccactcactcacacttccgctaatactcaaacacatattgatccatcaccatctcaggcttctgccgatcttcccccatgatctaatcccccactttaggctcctcgctttcttgcagttgatcgacctgcctatgaagatgtcaaatctatatattatctcagcaatgtcgatcatccaagcttggttcttacaacccttattctcacggattgaaacttctagccatggaaacgtgaccttaagctatccattagcgccagaaacaagacaccatttcttgaaggtacactccctcaacccctccaaatgattctctctttagttcttgggtttgatgcaaccaaatggtgatgtcttggattctccactctatgtcacctgaaataaaaagtagtattatgtatcttcatactgaatctgagatgtggactgtcctaaataatagattcaaccaaggtaatggtccaagaatattcgaattgaatgagactcttacctatcttcaccaagttgatgattctatttgtgcctatttcacaaaactaacagctatgcgggacaaaatcaaccaacttcgacctcgcatcctctatacatgtgcagctgccacccaaaatcatgatcacctttaccatgatcaagtcctccaattcctcaaaggagtcaatgaatcttttcatgcagtttgtgatcaaattcttcttattgatccatgccctcctcttaataaggttttctctgtggtcattcatcaagaacgataaagaactttgggcaatcgaaacataacccccccttctagttgctgctgctacgatgagagaattatagtggttcaatcagagctcgatcttcttattccactattgcaaagattttagcttagtttatttgttttggatcactcctttatacagaaagcaagtatactttaggattacataactaattagttttagaaccactttacaataaatgacagtattaaacaagaataaatgtttaaagaataaatgaagaacagttaaatctgttcttgtactaagtgaagcaacgtatgcgacttgttgagcacgagttgcctgttcatattctcacataagcttggagacattagatgtgtctggtattcgcaaggtggcctatgggcctactttttggatgtctacattcatctttgattgtaaagatggacatctcatgtgttagcaacgtggaacgtgcgagtccctaataagttattgaacacattagtcacatagaccacccttatgtgaagaattactagttgtaggagaggtctacttggtcatcacatataatcggtatatacgcaatcagtatcaaatcctcttggtcctgcttatttccttgactatgcgatgcatagtacacgactagatcctgtcatggtcgcatcatctcacgagtttagatcaagtgacactaaatctgtgagtgtcgtaaattaagatgtcctattttttctcgagaaatgggtccacgtgtcaattttatacgagactgctctcgttagagtgttcataaaatacccaatccatctgcatgatccaatcgaatctaagtgtggatatctgcacttgtgcagattggattggatttaaaagtttaaaatccgcacttgtgcagattggatgttgtttgacatataaatgtaactgatctattccaatccacacatgtttacatatttttttaaaaattacatatacaattaatatttaaagtaaaaaataacaatttaaaaatctaatatatatggtataaatatatttaaaaacttaatatattaaatatatatttaaataccattactgttgttcgagatcatgttagtactttgctgggtatgcgtgaagctgaggagggaagcttatatctcggcttgccaggcactatgaatcgaaaaaaaaactgtggtcttcggctatttgaaagatagagtgcgcaaaagacttcaaaattggaaaagcaagtttctttcgcgagcgggtaaagaggtgttgatcaagacagtggcctaatctttccctagctatgcgatgagtgtttttcttctctctttggatattagtagagatattgagtagatgatgtgtacattttggtggcaattgtccaagggtcaaaaactgtgatattcattggatgtcatgggagcggttaagaaagcataaacacataggaggtatgggattcagataccttcgtgactttaatttggcacttctcagaaaacaaggatggcgtcttctcacaagacctaaagtattggcctctcaaattttcaaagctcgatacttccaagaggtaaatttttaaatgctgagctgggtaataatccaaactttatgtggagaagtatttggggggctcaagaagtaatcaaaaggggtgtacggtggtgtattggtaatgggaacaacattaatgtcctcaatgaatcttggctgccacatgatgacaaccctttggtcatctcgtctcgcccgaccctcgagcatgccaaggtaggaagcctattatctgttgatggtaattcttgggacatggagatactttcggatttatttgaagaaagggatagactcctcattttgaaggtacctcttcacttgacccaagctaatgatcatcttgtttggtctaaagagttgtcaagggtatactcagttaaaagtggatatgatcttcttcaacatacccaaggaagatggaacgagaatgacaaggagctggctatttattggaagcatatgtggaagttaaaaatccctctaaaagtcaaaaacttgatgtggagggctggtatgaattgcttgccaacaatggtacaattgcgctctaagcatgtgaatgtgagctctcaatgccctgtttgccaaattgaagatgagcctatccttcatagactagtttcttgtcctgaagctacactttgttggaatcaggtgggaatcggcactaggagtacacccggtaacacttttcttgactggtgtattacttcatttaaggctttggatgtggaaaaatgttgtgtcttagccatgttttgttaggccatttgggaagctaggaatgacttggtgtggaacaaaaaggtaatgggggctggtgacattgttgtttctgcaaaaagatatattgatcaatggagacatgctcaaaactctacttcagaggtatcattgcctggtattcagatgggtgatggggctgagcattagcttttaccacaggttaatagtatcaagatcaatgtagatgcaactatgtttgagaaggagaatggctttggctttggcatggtggctcgagattcgaacgactttctgatcaaagatcgcactactttcttggctggtcaagtaaaaccggaggtagcagaggccatgggagtctgggaagcactttcttggatcaaagatcatcaatggcagtcgacttctcttaaaattgattgtcttttagttgtgcaagctctgcgaggcacttttttttttatgatttccttattttgacatgtaattgatgattgcaagcgtttgctttctttattgaaaaatatttatgtggtttttgtaaaacgatcagctaatatggtagctcataacttcgctagagctgctatattataccctaattgtcgtttcagtttagagtctgttccaactgatttgctaccttgcttggtagttgaagttaatggttaataaagatgatttttcattaaaaaaataatgtatattttattcttatatgcaaggagaatataattcacactataacaatatcaataattaattatacataagaaaagaaaaaagaagtaaaaagtttctcatttctctactttctccttccatggcgaggaagaaaaaggtgggacggaagccagtcattcgaattccaatcgaagatgcgtttgtaggaatcacaggggagacgaaagatgtcgatgattctcattcgattgagggattgaatttgattgcagagatggtcaaagctcaagatctaatcgatacagaggaattagatcgatctgtcaaaagtcgtacccagagctgggctgaggaggttgaagatgagaaaatgatgaagtaggatgttcaacaatctctgaagtcagcaatgagaatctgggagacatttacgaaggaaaaagctatgaatcttgatcaatggcttcttttcacagagcctttgattagagatggaatcaaaatcgcttaggtagatctggaggaggtccgagaagaggaaacttgctggaaatcagcagtaatatgcaaggttttgggagctaatccacccattactatattcgaaggatttgtaaaaagggtctggggccatcttggtgttgttcaggttagcaagatgtctatggggttaatcatggtgcggtttaatgatgaagcaactcgagatcaggtagtggaggtaggagtggtgcaattccattgaaaatcagttatagttcgtccttggttagcaaatttaaacacaatgaatctgcttcgcactgttccattgtggataagattacatgacctagggcttcaatattagggtactaaaagtctaagtgctctggttagtacaattagaaagcctataatggtggaccaacacactaaggatagaactcgattacaatttgctagaattcttgtagaaatggaagtcacagatgctccaccccgattcattccttctttcaatgagtatgggcaattacaaaattagaatgtggaatatgaatggttacctgctaagtgtgctcattgctctaagtatggccacaccaaagcaacttgcagacatgatgaaatcatgagaacgaagacagaaaaacagcaattgtaggaaaagaataagcagaaggagaagaaattaactaaggacaatacagccagtaactttcagcaacatcaggagtgggatactaaagaaaacagtatctctatcgacaacaactcaaactggaattccaaagaaaaatgcagagagcaccagcaattcattcacagtgttgcagaacaaaaggaggacagggtagcatctcaggtagctactgaacacaatgtttctgaagtttccttagttgcctatggataacaataatatagggtgttggaatgtgaaggggtttaatagagtggagaagcagaacactgttttttatttatgttgtttgaataaaataggagtgggtgggttcactaattgatagagagatgattgatagaaaattcactaattgggagtattatactagttctgttattgagaaccatattctaattatatggaggaaatattttactcgggtgattgttgttagagaagaccctcaatttgttcattgttatgtgaaaatggctggccaatcgaatgatatgagtatcacttttgtttatgggttcaacatagtagaggaaagaaaaggaatgtgggatggattagtcaatcttaatttctctgctaaaccttggttgttaacaggagattttaactctctttctgaattggaagatatgaagggtggcaaagaggttactttgaatgatattagggatgcaactaaatggctagcccaaagccacacggaaagactccttaagacaggttcaggctatacctggactaacaatcaagatggagataagagaatctattcaaagattgatcacacctttgtgaatgaagactggacagataactttccgatgactaaagctcattacagctgagagactgtttctgatcactgtatgtgtgttatttcgatggctagcaataagaaaattgggtttaaaccttttaggtactacaatttctgggttgaacatccagaatttaaagatgtgctccttgaagactggtatagaccgatgaaaagagagggaatgataactttatacttaaagctcatgcgattgaagcacactattaagaggtttaatagagagagaattggggatgttgggaagagttatcaggaagctaaggattattatttggaagccagaatgcaagctcaggtgcacacgcatgatttttcctatcatcaagccaagagagaggctgcaatgaactttaatgcccaagaaaagatgtaccatagtttcttgagacaaaggagcaaggtaacttggctgtgtaaagaggatgagagctatccttatttccatacttttttgaagaaaaaaaaaagaatgatggaaaacagcatagtttcttacataaattatcaaggaaagattgtagataattttagtgaagcggtaaggcattttatagtgcatttccacggctacatgggaattagttctagtcctactcaaaacctaagaactgattgtatggagctggggaactgactaaatttggagcaacaattgagtatgataagactgttaacaaccaaggaaattaagaaggctttctttagtattccggattcaaaatctcctgtgccagatggccggtatggagctggatttttcaagataatatggcctgaattaggtgctaaattcactaaagctgtggagaattttttcatgacaggttcaatgcctcgagagtttcatgcaactatgataactctcattcctaagacagaaaatcccactaaggctgtggatttcagacctataacctgctgctcaactttgtataagtgcatctccaagttgttgtgtttaatactttctcaagttcttccaggtctgattaatcagaatcaaggagtgtttgtgcaagggagatcaatagctcataatgtcatgattcttcaagacctcttgaagaattacaaaaggaagaacatatcaccaagatgtactctcaaggtggatattagtaaagcgtatgacacagtcaattgggagttctttgaagcgcttttgaatgcctttaaactgccagccaaatttatctcgtggataatgacatgtttgagagctacttcttactcggttttgatgagtggaagagagcaagggaacttcaaaggcgagaatggtttgtgacaaggtgatcctttatcccctctcttatttgtcatgataatggagtacttgaccagaaggttacttttagcagccaatcgttctaagcttagatatcatcctttatgcaagaacctcaagatagtaaatatttgcttcgcggatggcttgatgttcttctgcaaaggaaacttaagctccattcgggtgttaaaggaggttttggatgaatttagtgcaacttctgggcttgcaatcaacactaagaaatctcacctttactttggggtgaaagaggaagacgaacatgcaatgctgacagaaatggctcttcatgaaggagcatatcctctcaagtacttggggttcccctaagaccaacaaaatagaaagctgaagattgtgatgtgataatcaagaaaatcaagcaaaaacttcatacttgggctactaggcatctctcgtttgctggtagggctcaactcattcactctgttttacttgggcttcgaaactatttgatgagcatctttagtttacctcatagtgttacaaaagaggttgaaaaactttgtagaggattcttatgggactggaatggaatagaagtaaacttcatgtggcgtcttgggaaaaagtgtgccttccaaaggcttatggtggtttaggtttcaaagatggggttaaatggaaccaagccattcttgctaaatatgtttggaccatttcatctaaaaggttatctcaagaacaataagtctttgtggaactatgaacttaagagtgatactagttggtattggaggaaattatgtcatctaagggacaagtttactcgagaagacattgtgaaggttggggctggtgtgaactgattcaagactaatctgttatacaacagttgcattccccaaactcagttcgagttcaacaagtacgtttggagctccctaaacatgccgaagcacagattcatcttttggaaagcaattaattctcaacttttaactcgagacaagtttgctcaatttcagattactcttgacagcatcaactgtctggtgtatgatgcagcaactgagagcacctctcatattttttttgactgttgtttctctcaacaggtaatggatcaggtgagtaagtggttggaaatcagtaggtggccgactggtttccatagttggcagcagtggctgttgcagaacagtagggacaagaagcatcatatcaatgcttcgatattggcagccatgatttacagcctttggagcaataggaacaattgcctcttcaacaattactcgagtacaacaacaaagattacacaggaaattaaaaatatagtgtattatagattacaaatagttaaaaaaaaaattaaaaagttcatgagaagagatatatagagagattaatttttatgtaaaagatggtttgctgccaaactttttagtttgattagttatataattatttgtgattaataaaattcgttcctttttgataaaaaaaataaaaataattagttatacatatgctttgattaagaaattacttcattatatgtgactaacgtaattgtatatatggccttatgaggatggataaacgagtttatttgatgaaagctctgcaccaaaggagcaggggtcagtttttttataggaatgaataaagatgaaatcttgagtttttagttaaggtcattagttaatgtaatttattcggtcccatttacagaagagaagatataaatgaattgaagatttgataagattgtgtggtccattttgtttatttaaagctagagatcttaatcgatagacaacgaaataacatttggggacctcaaaataatttccggatttcctgatctcaacattgccacggtaccattagtaataaagaaatttggaactatatatatatatgtaataatttatgtatcacattgtttatacgtactcttcatattcatgaagattaatcatctaattaatgtgtcggtaacatcactagctaacaatttataaaactatatgacaaatatatacacatctttatatagtactagatgaaaattcgcatcgtgcttaatttatttagttctgtatacatggaaaatttattgctgttcgatataaatgagaatgactagtgtagcacttgtttcaaacattattttttttttctttgaaaggggtttcaaacattattgatttgaactcaatttctcaaaaccaaaattaaataaaattgtgattatataaatgatggagcattatcaacgggaagattattaataaaagtgtgaaaatgttgttgttggtcgattaatactgttgaccgcgccaacttgtcatgtatgtatatatatattattattaggaaatttctctgccataattatcttaaatttcaattatttgtgtttggagagatgtacatgttcttaacttattgaaatttgaaactaatgtacatgcactgttcaatgaataattctaatagcatcatgtatatatgtatttgttgtgtatatacatattatccttaatattagcaaaaacaacggccggtaccactaatttttatttttttatttttcatcacaagtacctttcgattggggaaattttggtaaggtgggatattcatcatgtattgtagtggatttttttttctttttcattaattttagaacacatgaaaagaaatcgtctgtgtcaggcacataattgtgaatgtgattgcaataacaataataataatatataagttaaagaaaaagtggttaagagatggatggaggtagagctagcacggacccgtaccaatttggattattggggttaattagatggattggtgggacaatgttggaccatggcaacacaaataataatatagtggttcaccactatactctcacaatttggatattaacagtgaccaatctatcgttccatttctttcaatctatagatgagttgagtacacgtacttgaaaagggacgtaacctacctatatattacatatttatctctatacatgtatgatgtatacatgaaatgaatatattataattgtgatcactcatggcttgagacttttacaataattctactggctatgacaccttaattttcaagaattataaacactttttctctcttctattttaattgcggaatttattccttaaaccctattttggaatactgctctgcatgaattaaatagtaaaatattaagttatattacttatcatttattggtttatatgaaactttgtgatttatgagagctatatcatttgtgggctttagattcacacatgttcaaatagtggcaatgttcacttttgatacagttcaagattggtgagaatttttttttttttttaaaaaaaaaggtcaccatctttaggaagaatattgtgggatactgtcccacatgtattaaatggtcaaaaattaggtaaaatataagaactttgactactccacttatcaccagtagattttcaagatggaatctcatgattcttctcaaaacactaattgagcaaacgagtcagatgaacacaagtgaatgtcgattaaaataaactgatttgtagacaaaaatgtaacaaggttcacccctttcagtgataataggctagtctacttcgagttttattgatctcaatggtcaagaagagttctccaagagtttagctttcaagtggattttattggaataagagagtgtccagagaatccctttacaattaattgacttcagaacttttatatatgtttatatcataaggtttagggtatcttaccctgatacttctttttttttttttttctaactatagttaagttaagtttataatacaaattaataataaataatattattataaagatacataatatttttaaaaattataaaaaatatatatatttttatttgagtccctaaaatgagtgggccctaggtgcaggcctaatctgcctatgcctaggcgcaggcctaacccgcttatgcctagggtcggtcgttattattgttagagtagttagtttgtacagttgtactcagagctatttattgtttacatcagttaaccacttagctttagctttatataaatactgagcaagagctcattgagtaatgtacagaatcattcaactcatttcttaattgttctctctctctctcttaatccctaaatccttacaattttacaaaggtgacatacaaatcaccattattaaaacaccaaacctaataccaaacacatcaaaaaaaaaaaaaaaaactaaatatacatttgtgatctgaaatatgggatacatgaccaaacactaactttaccaaccaaacactcaaaccggccagcccaagcagccagaaggaataggaggagtgtcacagaccacaccacagctagctaggctaggaacaagcccataactttagtgtgaaattccaatatatgttgactattaattaggtacaatttgctttgcgtctatgtcacaatcaatatagggccgggcttggataattatatttagcttagattttattttgaacaagatcaccaaataccaatattattattgttaatattctttaattagggataagacactagacttgtagctaaccctaacttattatgaccaattgtcctcaatatctcttcgtaagaatattatttaatagctagctctaaatactaagcatagtactactgtcagtaatataattttgtctttttgtcaaaataaatatattttaatgaatagtagtactactcgtgatatgcatgattttttgtttgtttatttcttctcattttttttcctcctctagtcaaaattttgagaagaacaccatcaagaaataatattataattatttagacagtctccatttttatgccctttaacaatgttttacattggattattagcatataaaaattttgaacagtcacattttcagattaagaaaagtatatgaattggattgaagggttttgttcaaatgaaacatcatcagtatacatgcatcaaatgagttcaatgtgcgaataataatcttttgatggccttatgatctgtccggtcgattatttaactgtttctctttttaaagatacataatgtgtcaaaagtactactctcaagagactaaaatattataaaaaggtaattaaagcattaacatatatattggcgatggggatctgattcccatagtcccaacatggaagtgctctaaatcatcgtaatccatcttttacatataaacttataacaaaatctaatgtttatggggttttgatcttctctctcagagccactaacctgactatatataaatatatatatacctatagtttattttattttatatataaccgtactgtagtttatttatatatatgtatactatataggaagactagctttaaaagtgaaccgcaacaaatattgtaattaataaggttaattattccgtccactatatatacctaaaagttatgttttgatgatttaacatcagggttaattatagtcatgaatttcaaagttgcatggggatctcaaagtaatttttttaataataagagaagtgttaaaagttgagtgattatggcatcaccaaacgatttgatgagagattattcccttatatattatcaaaagctttggtataacaaaatatatgtgaaagcccttatgtgggtacttctatagactatagggaagatcattattttatggggttgtctagtgggtggagagctatggggaccatgtgatagaacatgctatgataacctcatattataattttccaacccttataattgcatcatactcttcatatattatttatctacacgtggccggtttttattttttaatgaaatatatatatccatcttttatagaagtatttgtggggacttgtcactccttcttgtttggcacttggcacagagggtacttccaatataaacttactttcgctgctctaatgatcaaattggctcttaataatgacaatgaaaaggaagaagatcattactgaaagatattaatttttaggcaaaaagacaataatatttgtttgtgcatgtagatatattaggtttgtatatatgtatgtatacagataaagtcaatagtcgagtatatagtgcagtactatatataatattagaagcttatatatgtacatatacacatcaatttcctttcaaataaataatgacatattgttatgcatctctatatatgtaacatctattaaatctgccaataaaagtaataaatttaaaacacaaatatttgaaatgaaaaagtatagatcttttagtgcagtaataatcttttggtggttatgtataatcgaatgaatcaatatatataaatatgagagaaacatatatagtagcttgtgattctaccaattgtgtgggccaggaatacacatggctccaattttattccactaattaataaggtctttcacatgcgtttcttccaactgaattaagaaaaataaagaatagtaacgaagaagatcaaaggcaaaccgtaaaagaaagtggtactaatacatgcttttccttttattatctttttgccacgtatgcatggaaattgtggatcaaccccaatgagacccacagaaagatatttcttccattttttttaattcatgagtatgattataatattgttaaggtgttacaactttcacgatgagaggaggtaagagcacttacaattagggttcgtttgttaggccgtataaagattttattgtattaaatgaaaaattgggtaaaacattaaattgtattaattattacaattataaattttaatacaatgtgagtcatattatataatacataataaatgacacgtattagcttgtattataatatttacaaagggtctagcatcaaccccagtcccaacctcaatcttggacctagaacccagacccataccctaaccatggcagggccgaccctgaaacaaagtgggccataggcaaaaaaaaaattgggcccttatgttagaaaaaatgtagtatttttcaaaattggtaaaa

SEQ ID NO: 14968 - DNA, 3373 bp, Cannabis sativa
attaacttataaattttgtagaatataatacacatatattctttccatcaaatttttaattgtggtttatactatttacttatattttagtgggttgatattatactattgttgagttagaatctaaagagactatgatgactggtatatattattttgaatatgaatgcaaatgaataattatttataagaggtttaccttgacatccaccgggaagatatgggtttcctcgaaatccactattgcatgtacactgatatttgatagattgatctaccatagttatattattgcacacaaccgactcagaagaagaagataacatcttatcatccaaagaataatccattatccagtccagaatcactggaacactatccatatttctaaatttgcccaaatcttttgattgattttctgccaaccaattttcatcgaccaagaaagcgtacttgcactcatcatcattggaagaatcattgggcctgaaaactatgcgaaatgaaggtccaagataaataggaacagtagccttacaacaatctaagccatcacaactttcaattaatatattactattactacaggtggacttgcacccaacttgaatgattgagttatctgaatctgcatcaataatagcttccacgccacaactcactgcaatgaatatgttgtcaccgctgaatccaaagggtgatccatataaattattcagtactggtttattattacgactttctttgtgttggcaattgaaaaaacttatgggacttttagtctgaatggtcccctggttgactgaaatattaagcacttctagtttggtgcgtttaaggaagagggcagggttggccgcagtgcattccacttcgaaccaattgtttgcgtaacaatttcgtccgatcccgaaaggaaatgggatgctgacgtttccacaatgcgtcggacaaccgggcctggcaattcgttctcccacatctgatcttgctactgttattaccataattcctaagtacgtaaatatggtaacgagtgtgtacatttggtccataattatgtggcataccctcgttatgatcacatacatttgcctatacttagatgaatatcatctaattatattacatcagaagtttttcatttattttattaagatcatgatatagttgacttgtttttaaaattaattttgatcattgattagtaaatgacataatcaacgatatccatatttcgtgtggtctatctcctttaccaattgaagaagaagctgcatgcgaagctgtggataaataaagtcaactgcaacatcataggagttcatacagctgtagttccttaatgtacaaacaagctagtattatatgatatgttcactgttgaatagacgactaatcaatattgaaattgagtaattaatgatgtgtatgtgaagcgttatgcgttgccaaaacctttgagaaaaaaatatgtagtcaagccaaccatgtccgtttaataattttgctcaaatagtcaatttaaaaatataataaataaataaataaaatatgaagaaaacctattctttgtggctatgagtataattattattatattagcttaaatttaatttcaaagttccacaaagcatattatattttaaataaaacgcccacattttagaatattgattattattttatctcataaatttaaacaatttaacttatattataataattataaacatgttaatttaagacttcagaaataagctctacccataatgttcacagagagagcttctcggtgtgctcttggagagagcctctcggcatgtacatggaaagagcttcttgacatgcccttggtgagagcttctagggacgcacatggagagagcctcttagcatattcactcagagagagcctctcgggatccttttggagagaacctcttggcatgcacattgagagaacctgtcgacatgcactcgaagagaggctcccaccatgtgcttggagagagcctctccacatgcatatggagagaggctcttagcttgctcatggagagagccggcctctcgcatgctcttagagagagcctctcggcatgcacttgagagagcctctccgagtgcacatgaagagagcctatcagcatgcacattaagaggacctctcgacctattagaatattaattgaaaattagttagaaaataggaccagataattggccccaacgttgtttggcatctagcatgaatagtgcggacaagtacttaatgcccttcagagtaaactggatcgagaaatgttgtagagtagttagaaatcttcttaaagtattgatgaagaggcaatattgtatctttctcagcatggagacaagaccatgcacagagcccctccctagggttagtggcaagctacctaggagtaggtaagaaatcatcaactcctcaacatcctctctagaatgttcaacctactcttcactagccatcgcaaagagtcgagaaaaatgtgggtcctcaactgaggcccttttgtaagtttttctagttttctccatcaccttacgcctagacggaggatctcgtttgatggtatgctttgcgatgctaactactatcaccgctagtacaaaatttatcttggagggctttgggaggccctcgagaagtgtatctggaatgtcaactcggaccttatacgtccacgaagcaggcaagtaatgcctccaggctctatttgattcccaaatgaacccaccgtacccttctccgctgatttggctggggtagtggtgctgttgccccacgggcttcgaagacttcaatgagtcaattgtaacttcaaacttgtcaaacctcaaggtcgatgaactctcactcggagaggatgaagcaagtcgttatctatctggtgcttacctctccagaaagtgcttgggttcatctacaaaacaaggaaagagaggtaagaaccagacaaagaggtatgattttttgcaagagtaaaacatgtctgatattttgaccagatggatttaaaagcaaaaaaggatgaaatttcattccaagaacaaaattcccaacaccaaaggcttaatgaaagacaataaacctggaaaatacccataaattttgaacaagtattttcaagcagttttaagtagaacaatgattggaaaacaatggagaattgggaatcgtaatccatacagatatattgaaacaaaaaaattacaaacactaatttccttaacctctatcgtcaaggaacaattttgcaaacctagattttcacaaaagaaattcaaaaataaagtgaatgaatttaaaagaaatgggaaagtgaacaagaattactcactgctt

SEQ ID NO: 14969 - DNA, 9641 bp, Cannabis sativa
  modified_base (35)..(48): a, c, t, g, unknown or other
tcggcgtgttaaacttttccgaatttcttaaaatnnnnnnnnnnnnnntaaataactataatgtacatgacatgagaaaaaatttgactaaaaaattatttcgagtcttaaaacagaaaagggtgcatcaatatatccattttaagaggtgcattgtagaatttccctaatacatatattataattcaggaacaaaaatcttaaagagcctaacagtaattatggcccttttaattttattagcttagccctctcaaaataaaataaaataaaatatggaatcgagttcgtgagggaccacatccacaattaacgtagctgtaggtgggaactgggaagtgggtaccactatagtgtgactaaatttgtagtattgtttagatattttataatttgatgacttaaatggtcaggaaacacagttggtcaacttggttgcaaaagggcttaatagtctttgtagtattaaatacaggagcaagttgattcattgccgcatccaataaaaagtggtgcaaaggacccaaggaagaaaaaaaccaacgtgtatatgttaaagtttttgtcgtacgagtaatattaaaacaattaaataattatatttgtaaaatcacaaaatattaattgatgtgattttatttaaaaatatgtttaactgaatattatttttgtgttactattatatatatattagcttttggattttattattattttgtatcttctacttatttattttgtaatctgggtgttacatttatcatcctattaaacaagcttgaaaacttataataaatgaagattatattatatttttttcttgttttatttctaattataaagaaatactataattaaagtaattaaagaaataaggggacaactgtaaagataaagactaataaatgcttaattaggagtttatgtggactcgaataggaaaaaattgaccattgtttcttaaagagaacatgggtgacatagtagacttagactattcccaattttgaccatctttatgtactagccattaatattaataagtcagtattcacgaatacgcatctgctccatgtgaatattatcaaagcataataataggaacctgattcgactttcactgtagttttttttttactatagttagatcttagacctaccgtctatatttctttttttaatgcatataaatatagctttatgtgtgtatgtagttttatttaactttttttcttgtttggtaattaatttaactttcttacatttaatacaaattatctatagaacagaccacgaataaactgtggtgaataaacaccaaccaagaacataacaaacattaacaagatcaagaacaaaccagttagaatcaaaccagaaacataaaaccagtaaacaacaatatcagcaagaatataaataggaatttgcacacagagttacaaggttcaatcacaagtgaggagcacttggatctaatccttgggaggaactgccttgaggctttgcctttattactttgagattaagctcagagagagaacaatgaatcacaatacaggactgaatggagtcatgctcctacaacacaagcagatcactcgagagccctgagttataaaatcaaaggctcttttacatatacagatacaccctcagctcacacattaatctcacacagagaaataacaaaatgacctttatatatataggtcgaaaaaaggaagtacaagacctgacacaaaataacagaaataactgtctagatacaactgtattaactaacaaactgatacttgtaccagtaaataaaccccacataaacaaggcactgctaatctgcaatgccaatgaccaagtttgaccaaaaacattatattttgagtatttgacattgatttacttagttgagtttccatgacttatcttctgatttctgatgttggcatgtgacagttcaaattcttcaaacaatatccagaaagttacagctgagcggttattggaacatcagtcgaagttcttgtacagatagcaatggcttcaataagacaattgtccctaaagatgttttaagcaatgtcgcatgtgactgttctccagaaaatggtagtactattagtatttgccatgtcaaaaccatgtaagtttttttttttcaattattttttattttcatttcttgtagcacaaattaccgtttgatgcttcctttgttgacgctcatgtttgacaagtaagctaatttgttgttgaagtatgacattggttttcaaaacatttaaatatatgatatgacagcgagttgaagggtctcaatctagttggagttatacctgaagaatttggaagtcttactcatcttgaagagctgtaagtgacatttggttattctctcaattacaaacttagatgcaaatttacattggattttaattttatagaatattgctagaacatgttacctatagaggacattgaagagattatcaaatctggaatatataactttatcataaatagatttaataacttgcgtctttaattgttttcaaaattacttatataagtggggactatacacagcacttcatagtttaatgagagaaatgagtcttacatgcttttactttatacttacaatacattcatatttatataaatattttgattataaatttagagtgcctgacgactaaagtattttcaataactaaacagtgatctaactcgcaactacctcaatggatcaatcccactaagcttatctcgtgcacccctgcgcgttctgtaagttatttgtgctcttttatcaaatatttgtatcactacctatattcataggtataattacttgtcattggttaggagtaccggacaagtcagtgattttgtaactattggttggtgtggtgcaggtctgctttgggaaaccgattcagtggttccattccttcggggattggtgaatttactatgctcagggagctgtaagtcatgcaagcagtatacttcaattaaaattaaacaaagtgaagattaaatgttgactttcttatatgtaaatggtaattttttcagggtattagagaataatctctttgatggccctcttcctccagaaattgggagattgagtaacttggaaagactgtaagattgccgtccttactcttgtcccttcttttttaaataataataatattaataatagaaagggcaaacttgttatagattggatttattccgtatatgcgttgaacaattttttttaacattttctcttgtacagcctactgagtgcaaacaattttactggaccaataccagagacgtttgtaaacttgttgaacttaaccgacttgtaagtcaaagaagtttacttatagttcaaaagttttgttttctcttcttttcaagttcagaaatgtctcacattatttatggtttgcagtaggatagatgggactagaatatcagagaagatacctgaatttattgggaactggaccaaacttgatagactgtgagtactgagtttttatttcatttatcattccttctgttctctcattttcaaaatggtgggaagtttcttaaattaaaagtctaaatttgtttcagggatatgcagggcacttccatggagggtccttttccttccagcatatcaaatttaaaaaacttgactgaattgtgagacctagctgcttatctgttaattacaggtttagtttggtttgccaaaggagggttgtactaataatactatgattgaattacttgacactttttatcaggagaatatctgatttggggggaccaaatacaactttccctgatttgagacagttgaagctgttgaaagaattgtaagttcaatatgacttgaaatgctgctgctgttatcctatgagactatttccatggttttccgggacttactaagttcttgcactgatttttttcgattcagggtattgaggaattgcttaattaatgatgaaattccaaagtacattcaagagcttacaaacttgaagacattgtaagcacttaaattcgtctaaatattccttacccaaaaaaaaaaaaaaaaaatcgtctaaataacaaatgaaatggcctggcttgtgttgttgaagattcatttttcacataaggataaattagcgaactgaatttgattttgcagctacatataagttaaactggaaatactgtttgcacttatatccctacattgttgtttgacaaagtgattattattttatgccagctattaactatcatttcgtatccttgtctgctctttcaaagaactccagttttggtataggtttccattaaatatcagtgaacaagatagactgattccatctatgtactctctaattatttcaatgatatgttcattgttcacaaaaaaaaaaaaaaatggattgattgatttcatgcatagttaatttgattgtactcttaccatgttgtctttgctgaggaactaactactaagctatgtgcttgtatttgaatcttttagggacctgagtttcaacaagttgactggtgaaattccaaaagagatggagactctaaccaaactagattttctgtaagctatttaatatgcattggtttcattgtcaagattcttgaggtctattgttacattagctttcgttatatctttctttgactagtggtttatgaatgtaggtttttgaccaataactcactgactggaaaagtgccaagttggataatcagcagcaaacacgatatgttcgtatataaagctttattctttttggcttttaagtcatttaattgaaagcgccaatatacaaatccttttactaatttataagaaattgtcaatttctagtctcttgattatctttcactcgcatagcaaactaaataattaagtaccaattcctcgctatttaatttgcagtgatgtatcgtacaacaatttcacggattcaacacaacagcttagttgttcaagtttgcctgtgtaagtttgtaccatctaaatatgtgtgtatgtatttctctatctattttcgctgtgtactctgctaagttttaaactttatcgtgaacaggaatttaatttctagttacaaagactccgaggtccaatcgtaagtctctttctcattctgatattgacttgtgttttatttatctttacttacactaaattgaacaagcagatggtgcttgaagaaggatctcccctgcgcaacaaaaccaaaacgtaaggataaatccaaatagcgccatgtatcataacttacacacggaacttgaattagtctagatgaggtgctaaatgtaattcacattataactgcagatcattctttgtttatcgattgtggagggccaggcatggatgttgatgggaataaatatgaactggacctaaaccaagggggtcctgccagctttttcacatcaccatcagagaaatgggcttatagtagcactggggttttcgtgggtaacgaaaatttaccttacattaccagtacaaactcatcgttaaatggtacttcaaaattttatgaaacggcacgccttgctcctcaatctcttaagtactatggactttgcttgcgggaaggcagttacaaagtgcagcttcactttgctgagataatgttttttaatgaccagtcatttagtagccttggcaggcgcatattcgatatctcaattcaagtgagtaaatgtagattgacaatactaccgtatatagctagtcttatttgttttacttgattctttataacatttaacttagctttgcacggtcaattttttgtcgaagttagctaatgatgtttttttgctgacttatgaataggggagtttacttaggaaggattttaacataatggaaaaagctggaggtgctcagaaaggcatcaccgagacatttgataatgttcttgttaaaggcagcactctagagatccacctatactgggctgggaaaggaaccaatgctattcctgaacggggtgtctatggacctcttatatcggctattactgtgaccccaagtaggcttcatcgataaactttaatttatatctttgattaaaacttgagagagtgtcaaaataacctttaattttctcttcagatttcagcgttaattctgggttgtctgttggagcaattattggcattgtagctgcttcgtgtgtggttgttgcttgtattttactagggcttcgaatgaagggttatttaggggggaaggaccttgacgatccaggtaacgataaatgactccagaaattaatgtataccacaaaagtcatttgtatatttaccaaatattcattcttttcttgcaaatacaaactaactttggaaaggattgacgtatgtgcattgtgtaactgttggagtgcatgttcatgatgttgattaactgctctgtcgttaatgttcttgtgatatgaaataagtatttgcattagaatgttggtagtgtcttaatttgccagtaaagagtactctttgtagattttggttttttcttttagtacgttatacacattggtggttggtttgcatgcttttcttgtttttcaagtgctaagagataaagtattctcgtattaattgattaattttctatcttgttgaagaagtatacattgctttcctttgtcttttacatttaggagattatattttttgtcaactacaactttgtatgtacttcagctgactcattgactgccacgaatgatacagccttaggattttctcaaacatgaaaaagtactgttaggattttcttaatttcggattaggaagtataagaagatttattttgatttagtcaaattttgatgcaatacgtgtgaagactacggactacttttgcttgccagaacttcgcttaaggcctatatgtagtttgaaatatttccttttcatttttccttctcaacttttacattggagggagcgtcttatatctttctttgttacagagctacgtggattagagttacaaacaggatatttctcgttaagacacataaaatctgcaactagtaattttgaccctgcaaacaagataggtgaaggaggttttggaccagtttacaaagtaaggataatttttttggatcacttgaccattacatataatgagaaaatttgtgctttctatattccagacatttgatgtggatatacataacaattttgtagggtacactatcagatggtcgtgtggttgcagttaaacagttgtcatcaaaatcaaagcaaggcaaccgtgaatttgttaacgagataggcatgatatctgcattacaacacccaaatcttgtgaggctttatggttgctgcattgaagggaatcaactgttgcttgtatatgaatacttggaaaacaacagtcttgctcgtgcactctttggtaattatttgaatgttcaatcgttgtttctctgtcacatagtttagaacaatactcatctcgtttttcttacctccaacattgataggtagcaaggaacagcaactatcattggactggcaaacaagacagaagatctgtatagggatagcaaggggtctagcttatcttcacgaggagtcaaggttgaagattgttcacagagatataaaggcaaccaatgtgcttcttgataaggatttaaatgccaagatatctgattttggtttagcaaagcttgatgaagaagagaacactcatatcagcacaaggatagctggaacaatgtatagttctaactttttcttcttcaaagaattttggttgtatttcacaatactgcggcctatacttacaaacaaaatgcttgagaataaatcttttattttctgtgacactgtactcactgttgtgaacttatctttttctcttcagaggttatatggctccggagtatgcaatgagaggttatttgaccgataaggccgatgtttatagcttcggagtggttgctttggagattgttagtgggaagagcaacacaaattacaggccaaaggaggagtttgtttatcttctcgattgggtaagtcacagttaatctcacaatctggttcctttttagagtttaactttctatttgcatattatcagagtactaaacgtgtgtattttgtttgttttctccacatgtaaatgtaattgaaggcttatgtccaacaagaacaagggaatctattagatcttgtggatcctagtcttggttcaaaatactcgacagatgaggctctaagaatgcttcacttggccctattgtgcaccaacccatctcccactcttaggccaccgatgtcgtccgtggtgagtatgctggaaggaaaaatcccggtccaagctccactggtgaagcaaagcacgatggatcaggacgcaaggttcagagcctttgaaaagctaacacatgacagcataacagacatgtctgggtactcgcaagagagccaccatgtaggcacttctatggatggaccatggattgattcttctgtttctggtcagagtaaagatgagtcgaccgtcctgcaacataattcaagtaccaagcttctttaggattctgtaatctctcatatgatctcaatatggtttgatggaaaagcaagccaactcttataggaccaatgttttcgaatttttctatctacttatttgtttgttcaatattaggttttccaattttgttcccaatattattttgtaaaggtgttgaatgaatatttatattttaatacgagagaaacaaagctgaacacatgtaaggaataaaaaagttacatggaaaatattgtgtcacttctttaagtcaatggaaaattacatgtgcaaactcatccaaaactaattatttgaacccaatcatggtgatcaactgttgattttcaattaaactttttagagaactgtcgaagagacttagtgagatttggagtcctcatcgctttaatactaacgaagaaaatgtaaccggcataaattaatgactttttttaacaactaaataccaaagtttcaatattgcaattgtaattacttttatttatttatttatttttttaacataataattaattttatcgctgagagtcaaacaatatattggtcattatataaggaagaattttttccaaccaggaaacttcattttccatctgtagtacatatcttgctaacccatgtactgcagtattaccatttcacatcacatattgaagacatgcacctagaaaaacagataacatagactaaatagatctaatattacaactttattgggagacactctcataaagagaattgattgaatttataatgatttcagcatcactttccactaaagaaacaaataagtctaattgcaaataccattttaaagcataggaaattgccaacgctttagcttttttgagagagaaaaaatcaggcaaaaatttagcaaaacatcccaatggaaagccatcagaatcacgaactaaagccccaaaaccaataatactgttttcacaacgaatagcagcatccacatttaactttaacaattcagcaagagattttaatcaagccaactatcataatattgaaa

SEQ ID NO: 14970 - DNA, 4683 bp, Cannabis sativa
ctgaatacacgtgtcctttaaagaggaatctggtctcgagtttctaagtgagagaaatctcactataacaacatttaccaaagcctgactgccgattacattactattatccccttttgaccacttgtactatataaggccagcagaggctcccctacaggataaggtttggaaaattactatgcaattaactctcaagcaatataatgctcattttcttcatgggtgctcaaaatattttctctaaggttgtccaaggttcatgtgtgttcatcactttttctttaactttggttttctggtattaacttaaaataattgttaaaaggtattagtgatgtctaatacccttttatgtggtaatatagctatttgtttaattaaatattaagtcttatataatttaatttaataacttttaggaagtatcattagtcaatccaaatgcgacatgtgtaaaagtaataagcactactggtgcccaatagcaatgctctttacttaattaagtgacaaattttgatagtcaacacaaccattagttaaaagattcatatttatttaattaatatattgttaactgttttatttattatagtaatcttaattaattctatcatgataaacagcattataacctctttattaattaatataaatttttttttcatatgtataaaaattattctcgaataattaaaacattcaattgttaaaaaaatggaaaaaatgaagaatttcatatttttttttcaattccaaaataataataataatattctctttacatacttttagtttaaccctaacaaatgtttaattaagcacccacatgatgcatatatagacactcaaattttccttttagtttaaggtgtatatattcagctggggttaagcttttctatgattttgttcgatttcattggactatcaatcttcaaacctccaatccgtggcttaatattttcttttgtcttgattattgctaaaaatataagtctataaatcaccaccatcccaaataagatcccaacatcaatccattttgaatagcctagctccacttgccaaacacttgttagaatttcctcaccactaatggtgggcgatcctcctcccacttggttacttgggaaagtcaatccttgaaactcattcttgtagaatccttgatttgcatacttgtggaatgctatataatacattggatatctccaaaagggcttaggaaggtcatttggtaagcgaaaaaagccaccgtttaacatcataacaccttgaattccagcacctgtgatgatccccattagaaaatctggcactatgcttgccacaatcatcataaggctctcaaccaacatcatacatacaaaaagcatgattgaaaagtaggcaaaatgcccaatgctcttttgaagtccaacaaggtaataggctatgcttcccgggattacggatatcagaagtaggtatggtattgatgaaaatgtgttccccactacaaatgatgccactccgtagtgcccatttagtctttctctcccaaatatctacaattaagaaataaaaagttaacaagtttgttttacagtaataacattcaattggagttagtttccttattgtgtgactaaccttcatgtcctctacaaaagatgggaatccaccaatggccatgaaagtcaaaaatgctgctacaaacatcagcattgctcctctagcctaaagtgaacaatgaaaactcatacagtttagcattcaattaccctaagtagttaaagattttttttcatttttttttatgaaataactaggtgtgtataaatttaaattacctgtattgagccataactaaagccaatgtcataaaagatggtccctacacataaacacaaagcaatatagattgccagacgaagccaatagtaaccaagatcgcggtacatgttcacaaaggatctcctagtgagaacaaggcactgggtaatgaaacttgcttgacttcccttcttctccaaggtcgttcctttctgtaaatagaggaaaatgtggcaaactttattagatactcttacataaatttattttctctttgtattatgtgacaaaattagcatttttaaccattgtaaagccacatatttatttataaatttaccttttggcgtatctcgaaaacttggtgtttaacttgtttaaaagtttcggaagacttgtaggattccacaagagtgtcaatgacttctttagttcttgtattgttaccataaccttgctctaagtcctgtaaacaataaccacacatttaaattaaaaatgaaaaataaaatttgcaagtatatagagcaaactactgtaatgtaaaaaactcacaacatcaaagtccatgttgatagttctgaggtagtgatcacatggatttcttaatgatgggcaggggaagccattagaagcgaaaaactgcatcattttaaaactatttggtcaattttctcattaaataataaaattaggggaaatttaaccaaatgttggtttgacatacatacctcttctgccaatgaaattggaccaaagtaaacagttctaccagaagagagaaggcaaagattattgaaaagctcaaaaacttcactacttggttgatgaattgatgcaataacagtcctcccatctcgttgtgcaagcttaacaatgcgattcataacatggtaagaggctgcactatcaagaccacttgtaggctcgtcgaggaagagaagctttggtcgagtcaagattgctatacatatgcttactcttctcatttgtccaccactgaggccttttacattccaacctccaattcttgtgtccatggaaccttgcaaacccatttctcttattgttgtctctgctctttctctcttctctgatttggacattgaatcaggaagttggagttgtgcagagtaataaacagcttctcttactgtcaatgttgtcattagagtatcgtcttgtgttacgtatgcctaaaaaaatcaatatacggtaattcattatcatgaaacattactattaattatgaaagacttgtagtagttactttttttttttttgcagtaatatctattaaaaaggtgacatatgcataagtaatagatagatcaagttacttgtcattaattaatatttactaaatatttttgtcaactatacaataattaaaatcaataggaaaatattttgtatgtgtgtgtggactgtggtggtgtgagattttcttaccgaagtaccataagcaagtatttctttccggccattgataagtatatcacctgtctgtttggtttgtgaacttagtcgccctgtaatataaaataagtcaatactcctttcccgttttctttttttctcatattaaccttccgtatatataaagtacatatataatccttcgttgacaagatttaatttaataaaacaaatttaataagtcaacataattagagaaagaagataaactggaagaggaaaaagcttcatcttcccctaaaaatctgctgattttttttcatctccccttttattttgcatattttttttttcgttaattttatagttaatttcgataaaaacaaataaaaataaatgaaataattacttacaatcttctaaaattttacataattatatcacaccataaagaaaatcaatctaaacaatttacttgataaagtcgagaatgtgtactgatattgaaattaagttgtatatgtacatacctgctagagcgtccaagagagtggattttccagagccagaaggacccataatggccaaaacctcacctggctgggcagagccagtgatatgttgaagaatgctttttggtccatttttgccatctgaaactctaacacccaactcctcccatgtcaaactaatattgtcatcatctaatatttttatttctttttccagtccatgaggcttttcaccaacaaatccagtgctgaatgggaattccacgacaggctcatgatgatgagaagtagtattgctcataccaataccaatacctttattattagtttccatgatatccatctccaaattcaccttactagtcagaagagatcttgttgggcttgcacttggtgtccatctaggcaccaccactgttggaggcatgtcatcgttcatatttgagtttatttatttatatattgaataattgtgctatatattcaatgatatttgtaaatgtatttatgatgatgatgatgatgatgatttagaacttgttgcctcaaatttatacttcaactattctatcaacttgcatatttatactcatagagtcgagatatgtaatatctcaatcattttattaaattatatattattgtaatcgataattcacgttttaatttgctaattactttattttatttttattatctatttgtcattttcaaaataggtgggaggaaaacaaaaaaacaagtcaatatgtattgtaccaaaagcagaccagagaatgaactaacgttttttgcgtgcattgacccgcctatatgcaccatttgtttatgccaccttacaaaataaatattttatatagagaaatgataaatttgtttatgccattactaaatatatattttatattgagaaatgtcaaaagttgtaatg

SEQ ID NO: 14971 - DNA, 4228 bp, Cannabis sativa
taagtgcatacgaagagctaatcgcataattaaaaagaagggaaaccttgaacattaggattcccttcattgaacattatatttcttaagaaactgaaacagaaagaaaattatatttctaaaggacagaacagaaagcacttccttcaaaaacaaaataaaactcaattttgacacaaaattctccactaatattaacaaattttctacatctgaactaaatcttcagccctaaaatgctaattttaaatggtttacacaaatttaaaagccaatgcctaacaaatattatggaattgttgggtaggggaaatccttagtggttaattttgactgaattttcagcttcattttaggtcttcgttacaagtacttttaaagaaatcctctgtttcttttaaaaaacacatctggtccttttgagctatttctattgatcaacatttttaacggtagatgaacaaatagagtcccaattaagacaacaaacgtatgaaaccatgtaattgaaagaaagcaaaatctaaaattcatttaacataatttattgtgagtaatcataatgaagcgattaaacataattgataaaaaggagtttaagaagaagaagatactgactgatataacgagaagagcacggagagggctacccctccgagtccagagaagaatatgcctggcggtgtttttcgaagcatcgggaagcagtggagcgttctcagccagggaagttttgatccgttgcagcagcggcagcggagtagcagagtcggcgtcgggaaagaggatgaaagagatcatacggctgagaacggtgtatagtgtgtcattactacattcacgtttgttgctgttgatctctacgtagacgccaccgccattagacttctcttccatatttcttcttcttcttcttcttcgtcgtcgtctagtcagttattgaagctgttactgatttagagaatcagattcagatatcagaatcgacgaaccggattagggggaggggcacgtgatgtgatctcgaatacacgtgtccatccatttgtggcggggttatttacttcaattaaataaacttgaaacttggcaacataatacgtcacctcttcaattaattatacttcttgttctaatcctttttagttgtcactaaattgagatgctttctatttattttcatttaagtcacggaccaattgctttaatgatggacaactgtaatttcatttcgaaatgaaaatttaaattttgtatgggaaggtatgtttatgaaaatgttggctcactcttgtaagaccatcttaatgcttggagtaaaataaatatgttaaattcggcctaaaaattaggggttttcataaaaaagatgattcaattcaatgtgcacagtccaattcgcgaagtgcagatatgcgcacttgtgcgcattggattggattggaaaatacaaaatccgcacttgtggggattgaatgttaattgacatgtaaaagtaaccgatcaaatccaatccacatattactctcatatagaatcactcctcaaaagtatgaactcgacgctatgcttatctgaaaaagagagagttgttcactctctttctgaatctgatttatatgaccccaaccaatctccaaaaaattttctggttgccaaatgtcttgctaattcaattaactcgaaaacttttatcaaaaagatgggtgaattttggagtaacaaatgtcgttttgcagtcatggttccgagatgcattctgatctttttctcttaactttggcttgtgtaggtgatcaacgaagaattctttctggtgagccatggcattttttcaaccaactgatcctgttgcacttaccctcttctctacagaatgttactaaggatgacctctgccatgtccagttttgggttcaaactcaccgtctccctttcttaagcaaatccagggctcttgctaagaaagtcggggaatggattggagaatttattgatgttcatgaagactcacttcatgaaggttggggttcttttatgcgcactcgggttcggattgatgttaatcagcctcttatgcgtggcaaaatgattactctgcctcatgtgaaggatgaacattggttggaatttcgctatgagaatctacctgtgttctgctttcactgtggtaaattggggcatccatttgagaaatgtatttctttcatggaaatggtggatgttgggactgaccctgaccttgagtatggtccacaaatgattggagacaaacttccaacttctggttatgatcgataccgaagtgacttctctaaggcaaatgcttatccgtttctcactaggctgactagaaaaactattgtatcttcgattcctgctcttcaatctcatagaaatttatccattggtgtaagcctcagccacaacccctcaccatagcaaagttctcttcaactgaaaaaccagtcacaaatagttcaaagattcattggaagaagtggaaattcatgtgttcctctaaagctgatggtggtatgggttttcgctctttaattcattttaaccaggctcttttggcaaaacaagcatggagaattttggatacatttgattcactactgggaaaggttctcaaagctcgatactttaaaaatggggatttcatttcagcacagaaaggtatcctaccttctctcacttggcaaagtatatgtgatggcagagatttgttattgaaaggactcaaatggaagattggtaatgggcaaaatgttagatgtgcttcggatccttggctaccgggaaacactacttttaccccttattcttatggtggtgaccctcttttcacggcggaacattacatttctgagaatagacaatgggacactcggattttagaacatcattttggtgctattgatattgagtgtatcctttctattcctcttagtccttttcctagagaagacaagcttatttggcaccattcggatacgggtttctatactgtgaaatttgggtatcatttagctgttagcctggattccatagatgaacattcgtcatcttcatcacataggaagtggtggaaccggttatggactttaaggctgcctaagaaagtaaaaatttttgcttggcgatttgttaatgatgcacttcccacatccgtgaacctcgtccatagaaagatttctccatcaacagcttgcactctttgtaaatgtggttgggaatcggtgggacatgctattttttgatgtgatcgtgccaaagatgtgtggagaaaattttgttagaatgtgtgtataccgaacataggtaaccttaaaggttttgatcttttttcccatcttgcagctgcacataatgatgctgaattggaaatgattacatgtctcatgtggagtatttggtccgaacgtaataaagaaatccatggcacaaagcctaagccagcagatttgatttgcacatttgctacttcttatttggatcaatatcaaaaagtgacatcaacaaaggttgcttctgctgcaatgtttgtagataacagcactgcttctgttcaacaacaaaatacacccgtgcgatcctcaccaagttggcaaccacctatggttggctgcaacaaattaaactgcgatgtagcttgtgataatgaaggagcaattctgggatttggagctctaatccgagaccataatggtgatgttattgctggtttttcaatgcccttaagagggtgttattctcccaaagagatggaagcagcaacactgtttcatagcgtgcaatgggctattcaacatcaaattccaatccactttatagagattgattctctattggtagccaatgcgattaataatatgtcatctacaagttttgtaactccttttcatgatttggtagttgatatttgttatcttttgtcctactttcctagagcaaaggtatctcatattaaacgagatgctaataaagcagctcatgctttagctaaatttgctcttcgattggatgaagatatttcttggttgggagaaattccctccccaatcttctttgttgttattagagacgctcaattttaataataacagttctttctcaaaaaaaagtctaatatgtataatacaattatatttcaaaacttaattgatcaaatgtatattctatttttatatataattttttctacgtacaatttaaaataaaa

SEQ ID NO: 14972 - DNA, 13038 bp, Cannabis sativa
aaaaattaataatattttagaataaataatttattgatattgttatcatagtgttttacaccattaccatatatatatagagagagagattagagatatgagagagatagagagatagatttagatatagagagatccagatagaacttaacggagctcgatcgccggagagacggccggttgtgtgctcggccggagggcggaggtgttgggccggagatgagagggcggaggtgctgtgagtctcaaatgaagggttttgttttttttttttttttttatgtattagaaaggaatgagttgatgtaaagtacaagttattttaaataataatttaattatcattgctataaaataaataaatttattaggaataattttgataagtcgataccattgctattaaaaacaaaattttattgtttctgatagtgtagcgcttaaaattatttattgtagagcatatgtgtttaaatttaatttacatttattttatattttttaaatattcatcttaattatttgagcttttttatattttagaatccaataattatctaagaaaaataaattatcacaagccacaaattaatgtaaaaataattaacttaacttacattaaaaaatggcccaagtttataaatataaatttaaatataaaataaattacaaatcatataaagttgtaggtaagttgaatagacgaagatatataataaatatagataaaaataacatatatacttataaattaaacacttaagacaaattacaataaaaaataaacacctaatgtatattgtaaatttacatacacacttataatatttccattgtttaaatttctcatcatagagatacttcttgtctttccttttcttatgttttttttttttggcaagaatatcaattatctcatcaataatacattgctctttttgagcattctaacttgttctgattgaatgaaattagaaaggaatagtttccatcacaaactacaccatataattctcactaagatctaatcttatagtcttaaacttttggtaacaacccataatatatatgtatattactttattttttagagacgattcaataatgtaataacttgatgattattatactgatattaaaacttaaataagattttttttttgttttgtattgttaaaattttattagtttgatttttaaattttttattataatgtttcataatgatgatagtgtaaatcgctcaaactgtaccgcaccgtattttcacattatggtttttgcgattttaaaatctcacggtgcaattgcggtttaagaaattataaaaattacttatgcagtttgttttaaaaacaatggctacaactcgcaccaccaatacccctaatttttgatattgaaagtatccaataatgaatatattctaattttattgatatgagtgtaattctataaattataaataaattgattgagctaacttaaattaagttgctatagtatctagtataatgtaatgtaataaagaagaaaagaaagaaatattatagtgcagccagaaagaagattaatattatttctccccgataaatttgttttagtagattgtgaattgtgaatttgaaactaaattatcctacgttacaagttgatttcctaataatttggtgttttaggcctctgccaaaaacatagacaaaaaagatacataaacaaagccaaaaaataagagaaaaaatatgagttctagtgatacaagtatatataaaattcgaaaagcagttaaattaacttcaaatacatcctctcaagcttgtctttttgttcaaaagttcttcactgaaatcagccattcagttcttcaagcttggaatgccattgttcaatccctggaaacctgatcttcctcaacagatccacaggtggtcgttctccacgcaacacgagtcgtcgattcaaacctgtgtggaggtgtttcaatataaatttttgctaaaagcaaaagtgccaccttcagtgtgatcagttaaagattacattgctcagtatatacagataattaaattgtataaggggcaccctgatataagcaaaaatatagctactgcaaaggtacatggccatctgaagaaacccaaaaaaatcatagaaagcaaacacagcgtaaccgtggacctgcagggttccagattcaaaaaatgaggccgatgatatgacattccctgagaaggcagaaattatacccagaatttatcagacagggttgccttcgatcctattcagctgctgatccacctcctttttctagccggccgttctggtttaatctcggattcctctaacgtcacacttttgacagaaggcagcgcttcgctctccactttttttattgttattgcttctttctcacttggcatcggaagtttgaagcgctcacttcttttctttaacttctcaactgtgtccaggtgacgatcgtccaatggttttgtgttgccgtctttagcctctggatcagctgcatctttctcttcagccgatgggtgttgaatatcaagagtctcagctggcttggaaggttcatccgagtgtttagtgccttctagagatcttatgttattcttatccatctccttaaactttaaagtagatgacttgctcttgatagagaaatccctctccttatggcttgtccaacgttccagtttggaccgacctcgtcttgaatcatgctgctcgtcatcagatgcgccttccctttgttttcgggacaaaggatgttgcactaaatttttatgctcgccaaagccttgctcggtgctgccttttaaaccctataaaagaccaaataataataaaaacaagaagaaaaatattcaaggatagataagaagcagacacagaagtacatcaaagaaaataaatgaatataatgttgaagattgcagactgataacaatctgaagggtaacttccaaaatctgtaaatgcaaatccccccttttatttcttccatttcaccgacttgacgcagtctttgtgaagcaaaagtggttaccatccttcccccaccatctcccacagttagaatctcatatggttcacttctaaacgaggaccgacagtttaacacatagggttcaagaatgcagtcaaaacactagtgtcgtaggcaaagggtgtcacagccaaacaatatacaatggagaaatgacctcatctactattagctaaagtaaagtcaatttaaaccataaattattactaccaatcagtacatgaactaggtatttactctaactagttaataaaagttattatcccacctttctacctcacttttgttaatttaatacaaggacaacaataccaatttatatgatattttcttattaaagcccaatcaaagaaaaaagcagggaccttagcatattgaatgagagaagccccaagcaggaccttaacatattgaagcttaaaactttagatatgatctgataaaaaaatgcattcttgctccaactaaaatcagcgacatgataaaaaaagaaataagaatattaagaagtgagaacgaaaaggaaaacaagaaatcaaattctgtgcagttataagtgatgctggccaaaacaagaaagctaatatacaacttactctttaggcctcgtataatataaagcaatccaattgaacttgtttttcagaagatcatatttgacaatcataagtttgtaatcaacacaaactaataattacaataatgtccccttcaataagaacctttttttttttctttcatcattcctttctgtctgcatttatgtcagaaatcattcctgacaacagcagtttagcaatgatgaacaaaatattatatgtatagccggcaaggattggagccttgattccaagtttagggtacaacatactccatcaaaacaatttgttattcgttttccccttctaacatgtcaaactactcatgctatctattctaaagttttatttctcgtataaatcgtaagcagacgactaccctaaaaaatagatcccaaaaaaccatgttcaagcttttgttaaacaagtacaggtattgatttaacgagaaagtaaacattggtatcatcttatttaccaacccacaaccataccaattaaagacaaggtcatgcccattactattaaagtcgatggcatgacattgacaatgttaaatctaatcacctatctattatgattgctaaataaaagtaaatagttgtattgttatttttacaggtttatcattgtagaaaaataaaatgtttcgattatttccattatctgaattacaaaagtatgttgatcaagaactaagcttccctacagatgatagattgactgtgatatagatattagatatatagaaataatatatacatatatatatagtggagaaaatgtgatcttttaaaagcaggattccatatgtccaagagagaagttggttaacccagactgaggataatgagcaatgcatgtcctattttactaatttgagacacctaagttgggccgaggagactgtcatctgagaaattttaaccaataatagtatatcccaaccctccccaatcagatttatttgttccaaaacaggtggaatttatgaatttcctcatctacaaaaggaaacttcctagcatatggaatactttatgatgattcaagctttaaaaagagaaaaaaaaaacttattccttttcagagttctacactcttgcactcaaggaacataccgtctcattactctgaatgccatgctcttcttgatgtctctttgatgagactaaagtgctgttatcaccaccctcaaattccttatttctccttgcactctctctatgctttttgtcatgaaccctcacgtcttcagaaacattaatagaacgatcattgcggatacttagccgttcttgtctggatcttctctctccattacttaattgatttccacgagcatagatatcctcgttccctccatggtgagaaccctcatcctcaattctgtctcttcttttagcaagctcgatatgccgcaatgtctctttatattggtaatctttatcagaacctttactatcatccttaagcttaggatggccaacccatcctttgtcctctgaaacacgcccactccttgtgacactccgcccttcatctctttccctcttgggtataatttcttcatgagactgttttaacctctgccaatcctccctctcccgctgtctttcacctctttctctttgcaaccacccttcatctttatgtctgacagagtggtgatcatcaagatgtctttgttgcccgtctctcttccgaggatccaacacttcatccctttctctctttcgacgattcatattttccctatggccatgcaatatttcttctttatcaacatgatctctcctcagatgttcttcgtctttttttctcttgccatgataatcatctatatgttcatatctacccttaagactatcctctctttccctgtgacggggtccaacatccttctcataataaaccctatggctgccattatccatctgttttctcaaatggataggttcatctttgtcactcctgtcgctttctcggatcttactccgatgccttgattgcatttcatcaccacgttctctcttccttgtttcctcagtttttattcttctgctgtaaggatcatcatctctttgttgccaaaccatatcagaattgtccctttcctttcttctgtcatacccatcagctctcatgtgcaaatggaccgggttaggatcaaattctctataagaataagtatcttctctcccttttacagccatgcgatttctttccaattcttgtcttccatcacggtttctcctatggacgccctgttctttttcatcaaagtgcctcttgacacttcccatgcgtgttgaatgcccttgcataacttcctcctcaaccccatcccgcctcttttgataatctctgctgcttcccgatcttgctctgctgttgtcgctacttcttgcagccttcgagtcttccccgtcatctagttcttggacaaaaggctgttcagatcgagaacttattgtctgtttctttgttgatccatcttcaggagtatcagttgtgtctaatacatttgaggttgtctcatccttttccgttccagggcttccatcagccagaacaagctcatcttgatcatcaacatctctttgctcaaaacttgattcttgcgcatccctaactgcggcaggagacgacaacggaaggctatttttactgtccatgctctcaaccgactcttctggatcattattaaggtactttttatctcttccacttccacccaaggtcttacgaggagatctgtcatgtgttcttccatgtattcgcctgtgtttaaaggagagttaaatggtgcaacgaagatggatgtaaactttccacgtaattcatattaatatattgcatatcagtatcagtctatatacataaataataataaaaatagaagagaaaacataaaaagataccgggggaaagttctagaaattattgttaagatatactacaccaattcagcaatgtatacctttcctcatagccagcagaagggtcatcatcgggatattctcgaatattagcactagaagcgacattacggaccggtggtcctggagggaagggtaaaactccatttctatcaggtatatcatcagaaacagaacccagttgtggcatccttggttcaacaggctctctctttcgatcattgtaagtctggggaaaattgtcactacactcagggttcactggtgcggtgtcagctacacctccaaaatcctctttgcttgtatcattgtcggatctgtttgggatatcatttccagcagagacatcatcatctaaagagccctgcaagacaatctattaccccaaaagcagatactaattagtatgaagcaatcatcataaacttaataatcaaatgtagagataggattagggaattattggttcaagtacctcaatgattgcatctgaatcacggtttcgggctggtcgagtatcaatagagggaagacgctccccataaccattttccacctgtattgccctaccagttggctgatagaaaacaattaaactattgagttcggaatctaacccagggagagaaaaaaatgccacatgtatatttagtgtggaccactcaagaatttgcaagacattaattgaataatagttaacaacaaacagaaggtaagaatttaagatagtaaacaaagacttcaaatagaatgagtataaggacatactaatggtggacgtacacgagcagacccttttggtaaatcaccttgccctaactttcccgaacttgcattatcagaagaaggaacttcatgaatacctgctgcagctgctaattctggaggcagatcaggatcatactcctgagaaaagcatttaaagaatatacttataagctttgtatgggtacaaaacaagcatttatgctcgactcgataaaggagataaaaggccattggtcaacgagcccttcattacctgctctgcacgcccactttcataaacacgaattttgctttgcattgtagactccaagcggagttgctcctgcaaaaataaagttcaggactcttctgaatcctcaaatacgtactaagacaccattcataattgataaaatttaccagctgtttgcaataatctttccaggtatcctcatttaagccgaagttgaaaaagtcagatatatcaacactgggatatttccatggcttctcctcaaaactatcgatgtcaacctcaaatatagtcctgcaacgtcaacagatagcataagtaaccctgagaaacagccatcttataaatcctagactttgcacatgaaactaaattactaaaataaaagaggacagtgacacacgaaagagttcaaagggaccctactacaaagcataatgttccctccctttctattgcttcagtggtaccaaagtacgatggattacaaaaatacatgccttggtttctgatagcaccatagcaacttttaataaataatatctccataaaatacctcatcttgccactaataattaaaatgtacggttttaaagcacaaaaagatatctaaacatacacaagcctccagcaaataaaaactcatgtacctcatcttgcatatgcaagaggtttgaagtaaatacacagtacggttataaatttttaacatctaaacaaatacaagcctcaagcaaacaaaaatatctacaaccttggcaagcaaacaagcatcagatagtttcatagcctctacagtcgcaaatctaataagttatgaggttaaatggattcttccatcactttcattgagcatcgatatatgcaagttaattatgtcaacaaaggaacaaatagacccgcatgggcataaaatacagtgacagccaacactgccacagaagttaacccaatcaattgaatttcccagccaacaagtcatacagtgacagccaacactgccacacaagttaacccaatcaattgaatttcccagccaacaagttcaccaggccattcagcatgacacttacatagctatgctagaatacctggttaagtttatgataactaatggcactatcaatcaatggaagttaatgagcaatacagaaaataaatttacttgtgtgaaggaagcgtgaattctagtcctccaccaccactaaatcctcttcctgccgtattgccaccccaatttggccctccaaacccagaatgaaaatttttctgcataggagtaccagttttcaatcccattggtcgccaatcacctcttccccgaccaggcataggacccatactgataggaggacgaacttgacctggcactcctccaggaccagaagtagttgctccaggtattggtgctgcaccaggtctcacatacttcatgaaacaaaaaacagccgtaaggtttacttgcaaaaagaagaaacaaatgcagcatactgtcttagtaaaagtttacaggtatatcactactatataactaagaaaatattcaatggaaaaattcaaaaaacacatacagttactcattgcaacaaaaattagaaagacataagaagaagtcatataatttttcattgcacgagtacagaagaaaaataattatcaaatttgaaaacgttaagaagaaaagtacttgactatggccaaaacaatgtaaagcaaacacatagaaagtaaaaccatagtctagaaagatgtaaaaagagtaggaaattagtcgtacttcattaaacaaaaccataaaaaagaaataagtaattgtatgataatattactctctgagtagttgagttctaacatgtgaaaagacacatttcccaattgagattgtaatgaaggaaaaaatgtaagggagaaagagaggaatatatgaactaaagatgctgtggattcatggatgtgcgattgctaagttgacatggaattagtgacagaatttgaacacctgctctatcaaaataagcaggtttggtgtaaagtgaacaatgatatacaaatacacgaatgtaggtaattcaaaataaaataatctactattgacaatattacgggactcaaacacagtagtgcccaaattgaagataaccccacataaatttactttcaatgcatgaataattatacattaaaataaaggttaataaggtaaagaaataagagtcgcacaattaaagcctgaatcaccagaaattaaatataacattgcattcccccaaaataaaataaaaaaatatttaaggaattccaaatcagctcagcctcatgatcatgatcatgcctgatttatgaaaatattaaagaatccattggtccctaaggaacccccgaaagggctgccgttcaatggatacacaaaagtgatgaagttgctttaactatataatcatgcttgtctgtcggagcgaattggataattatccaatcaattaatcccccaaacccgggaagcttaaggagaaatgaaaagagtagggtgagggacactaaattgaagtcgctcgcttgctctaatgctcgtttagtaaacagcaagtgcataagttcctttaagaataggggcacgaagagccatttagggaaagatattgcaaaatattttggcattccaaacagtgggtggagatggaggccaacattatggagcgtactccaatacaatgaaataacaaactagagttaatactgctcagagttcatgatttcagctctttattcaaagaattagcatttgcatctattcttcataacagaagtacagagtacaagaatcgtaattcataatcacacctctaaccacagcaacaccactgtaaaagacatgtgagagatcaattaagacatgcaggttgcaacatgccaattcatcgaggtacgacatttttgaacagcagttgaagagcctaataataataatactagtacagcagatcattgcctttggctatgaagcatttcattaagctttagtattcttttacgtgtttacgttatgcatcttatcgaattctcgctaaagtttaaatgtagtaaagggagggtgagcttttggaaacattcattttcaaatcatacatttcattggactgaagatatttcaacaattttctttggctctcagcaagaagacatttttagaaatgtcaaaacaagcttaaacctgagactagagaattatctcacgtaagcatctttgtgtagctcaaatacttaaaatttcattgatctgcaaaactcactgtaagtcaattagttaccaagaaaatttgcatttcgtagtgtcatttcataaatatatttagcatataacagagaaaataaatgtggaggcaaaacagttcattcattttgtacaaatcattacaaactatatctatgctttaatttctcaccaacaagaggggaaaacagaccccatatgtacaaatataatccttagcttaatcagcagcatatgaagacactgaccttaaactgagaatgaaatggatgataaccatgagtgttataaccaatcttctgtggcgccacaatgccggcaccaactttcccagcttcacccacctccttcctctcgccatccgccacctgcgcagaatcctctccccattcttgttcttccatcacttgattaggatcgtcattagtcacaataacgagcccgtcttcatcttcatcgtcgtcgccacctcccattccacctctctccatagccaaaggtccatgattgttatcattaaggactatttgcaaatcgtcctcactatcactatcccaatcatcaccatcaccgccagcggcatcatcttcatcaactccatcaccacccaaacttctaactcccattgaagcatccacgttatcaacatcccccatcgtcccaccaataggtacgctactctcgagacctggaatcatcggttccgaaccaacatcttccatccccatattaccttcttcaatatcaaaagttacatctttctccatcaaattctcaacttcaccacacgattgcttcataacaacatcgttcccagactcaccaacaccatagttcaagttcaaattcgaatttgaatcctccacaaccccatcacgcaatttcaaatccccggacaaagaaaccctcgtccgagccactgcatcatctacaaccaccacctcaccgggaatgatcgaattattagtaacagaatcaaccgagacggcgggaggaggacctggaactagggtttcgtccgtctcattaacgggtaggacggaattgaggctgggagctcgaagcatagtgtcttcgacatcgctcttgagattgagattgagatcgatcggagggcggaaaggttgaggcggctcaacggaagggtggtgaggctgctgaacagaggaagacgacgaggaagcaaagggctgaagaacatcggtgtagagatctccgaactcgtcgtcgtcttccatggtggtagagagagaaggtgtagagaagaaagaaagggttttgaggtttgggagaaacaaagaaagaaacccaaatggaattttgtgcgtgtaaaagcctagttcgttaaactctctctctctatttgtttcttcttagttagtttgggcttttttttaggacttgtaaaactcctctctcttttttctcaatatacacactattttagattttagttagcaattccctccaaataaaaatataatttttttatttttacactttaaaacatttatatttttataaaaattcacatatcaacccacttagcaactaacggagaattcacattcaaaccaccgtaataaccattaaagcaacttaaatcgtaaattttaaaaaaatatatataaaataattcctaaaaaataattccccgattttattgtttatttttgaaatatatatatttaaaaaattaaatagaaacactaaaatttacataagattgtagcccgtactttgtgcaagagtaattgttatacccgatgtgtcctataaaaggaatataaattagcttaaagaatataataattaaattgtattattaattgcaatttaattaactcgtttcaattaattaaagttgatagaaatattcaaactcgctgacaacgtaagcatatgcgaaataagaataaaaactattaacagatataattgacgaggcagtatgtccacctcgggataaacagagtatataataagaacatacaatacgagacatcaaggagcttgcagctcattgaccacatacttgagagtaaaagcttgcaacttattgacccacatatttgtacatggagaagatacaatagaacttctatctaagagtacacttgggaccaagtaaattatattctaattgggaggttataactaaatag

SEQ ID NO: 14973 - DNA, 5674 bp, Cannabis sativa
aaatttattattctatagaacactacgagcataatgcaatacttgtatttatctttttcaatttcttgtctaattcttgaaacatagtgtataatgcaattaagttcattcatcaaagaaatggtaatgatgccttgttcttaaaactatttttcggttgtcgatttgttttgatatcattttgattgcagtggacactcttacctatgcgaatcttcttttcaaattcagggttgcagaactttcagcgagaactattgtctcacgatgccctggcagctaatatgttcccgtgaaggtttaaagctactgtacaatctagtttcaacttagctaatactcttttagattccgttgctgacatgggagttagcattgagcttaaaaacagttctaaacttcggaatatctcaaaaccagcgcaggagagggtgttcttaccccctttaaatagaattcctaagactcatgacagattaaaagcaaaaaaacatgttgattcgccacacagtattgcgcgttggcatttagcgagagatacagcaaaatctccggggagtcagtttagccaaaggaacaaggggaaggtagttggagatggtgagcttgtcaagcatatgtcgaacttgccagtttatctgcagcgtatcgagaagggagaaaactatccggaaaagattttaaatgttggagttcttgattggactcgactagaacaatggaagcatggaaatagtaataatgtcttagaaaaaggcagtgctagtacatcatgcagtagcagttattcaacacagaaaaggaacactggatcatctaggtcttctagcttagttcatgctgagagactttccgagcaacatccttcacttagttctagccttgtgttgtctagtgaggatggcccctctcaagatgtcaaaggccctgtgcagaatgctgtacgcttccaggaccttgaagcttcatcaaggaacaccattgctgccaagaaaagctttaagtcttttgaaagaaatcactcgattacaattgttgaaagggagaagataatagatgaagtccggaagaacgcatcagaaattggacgagggtcaggaaaatataaaagtttggggacctcgcatcatcccaatgaaactttaagctcctgggagagtagatctaagaagaccattgaattttcacatgaaacaaatagcttgagaacaaatactgataagaaatctgtttcagaagttgaagcaatgtcgactaaattgggaagttatgatatctcagttatgtctaaggaaagtacgagttctggcagtttgggatccaaaaactgggcacagggtctggaacaggttgaaattgataaagttaatcagcgtgtttctgagaagggaaatagtattgttcttctgctacctaaagagtcaccccaaaaaggatatcgtgaagtattgcagctttcacaacgtagaaagtcttttgatcaaaatttgactggactaagtaagaattgcttatcagaagactctgattctaccaacaacataaactcttcaaaactttttcccgaaattccacactcgtgcccacttgcttcttctgttcaaactaataccatctcggataggattcgaaagggtatgactagtaactacagtggagagctttcatctgctgtatctcacacgctctcatgttcagaaaagacagaagatctccattataaggataaatatgtaattaagaatcagtccaacgtgaaggctgcaaactcaagtgtcctggatcgggatccaattgcaactttaagtgaagaggctaccgagctgacagctaacaacagtagaaatccatctcctcatcgtcgatttagcttcagcttaggtcggatgggaagaagcttaagtttcaaggaaggctcgacagcttcaaacccacagttgagttctacgcatgtgactgtgaagtctggtccggtgacttctagtgcgtctgattgtggtgattatcagaataaagataaagtaaaaggtcacaacagagccaggtccagtcctttaaggaggttactagatccattactgaagcacaaagaagcaaacacaccccatcattctgaatctggtttacagccaaaaagcagctttagctcttttagtgggcctgtttactcatttccaaatgagaaggttgaagaatctcaggtgcaggctcttttgcagctgataatcaataatgggattccattgttcaggtttgtggtcaacaacagcagcaacattctagcagcaacaataaaaaaccgcacatccagtaaggatgattcaggcagtaacttcacattttatatggtcaatgaaattaagaaaaagagcggtggatggataagccaaggaagtaaaatgaaatatgtgtacaacgttgttggtcagatgaaggtttcggcatctgatttctcttgtacgagtgaactggacaatgctgagtgcgtgttgagagagtctgttctctttggggttgaacgaaaacaagtagatcaaggatcacctaagttcatacctaatagggagcttgcagcagctgttgtcaaggtccccagaaaacacaaagaatcaacggagaaaggctatgtaaagtgtattcctcagaaccaatcctctttgaaagtaggagaaaatgaacacttaaaccatgttacagtaatactaccaggtggtgttcatagcatgccaaacaaaggagagccgtcaccactgattcatcgatggaaatctggtgggtcgtgtgattgtggaggttgggatgttggttgcaagctccaagttctctctgacgaagaaaactccctcaaggatccattctcagattgccttgaactacacgttcaggtactgttttcttgttgaatcaagcacttgcctacatagcaactttctttttaatttagttcaatccattcatatgctggttttgccctaaatgcagggaggagggcaacaacaaaacattccaattctcagtttgatgccttccaaagatggaatatactcagttgaatacaatacatcaatctctcgattacaggccttcttcatttgtgtagcagttttgagcagtcaaaaagtgccggacctgtcaacaataacaaccccacctgaactatcaaaggtctttgatcagtctgatatgagtgatagaaatgggtaccgagtgaaattgccattgccaacaaaatatgctccaaccccaccactctctcccgttggcagggtctagttttctaatcgaaaaagattgccctgttagccatgtctgatcgtgaatggtcggccttccaatgcatgttagagtgggaaaagctacgtcgtacatgtatcatggttaacctgaaagatctttgtatgtatggtaaagtaccttttgtgtatgaccatggtaattgtcaggtggttgtactagtaccaagcagttgtattgtgtaaagaagataaactcgtctattatatacaactcataaatttgatctccacattttgtgcgcgtgtggcagttagaataacaaaccactttgtggctaattttgctcaagaatgagatcacatagagttctctaataacaaaaattaattaataagaaaaaaaaaatttaatagacatcatattaattaggtttatttgtaaaatgtcttggtcagtagctccttaaactatatttttttcgcaaattagttttcaaattatataaattttaataagttgatcttcaatttttttttttttttgttaaattggtctctaaacttttattttcttaaaaacataaagcttttactattaaatgattgtattttatttaggatgaaaatgtaaaatgattttaattttagaaactgaattagtaaacgttcatttttttaaaaaaaaattaaaaaaaaaaccaaatataataaattagctaataaaaattatgaaaatacatttactatctattgtttcttttttccaaaaaaaattataatatatagattaagtcatataattcttttagtattgcatattaatatattataacaaaaacgtagtaatatattagatcatgaaatatatacaacagtatttgatatattgtatttctaaaaattaatataccgtagtaataaagttatataccgtaaagaattataacaatactaaattaatactaaaaaaaaatatcatactaataaatttatatataccactattaaaatatgtatagataccaaaaaatttatataatcattatatataataaaatataaactaaatattatcttaaataaatgatacactataaataacaaaaatcatatatcatacaacaaaacatatatacctacaataaaaataaaataatataatataatattattaaaagaattgtatataccatattaataaaattatagacaaccataaaataattatatcatacttacaaaattatatattactttcatatataataaaataaaaactaaacatacaatatctgaaataaaatgatatactatacaataaaatttatatacgatataacaaaaaaatatataccttacaatagaaatatatatataataacaacgagtaaaaataaaactatataggatactaataaaattatatatcatgtcaacaaaaatacaatagaaattagagcttacatattatttttttttaaaaatgatataccatataacaaaaaatacatttatcattcactaaaatatatatactaacaataataataataaaaaaaatatattactaatatatatatactaaacaaattatatactacaattaaaatatatatataccatgacaacaaaattatataccactactgtaaataataaaagagaaacttattaaatattatttaaaataaataatatatcatacaattaaatatataaaaataataaatatatgtagcatgccaataaaattatatacatacattaatatttgtattatactaacaaaattatataccactattatacgtaacaaaataaaaaataaatatcatctaagaataataatataccatacaacaaaatacaaatatgttgtacaacaaaatttatacaccaacagcccacaagaactcataaaaaataaaaaaaaatcgacataactttaaaacaaaaaagattttaacaaaactaatataaatatatactaatataaatatatagtaatctttaagtaataatctttaagtaatttgcttctaattctaaaaaatatgaaaaaaattattaatttatttttatgtggcagtagataatataaataataaatagtgtaaaaaggtcatttctctacaagttttaaaatgaagacatttacttacatagtgctatgatttgtggtcatttactataatttcccttttatttatttttgtatttattttaaataggtttatactaatatattatcaaactaaatatgtatattttttatttatatgtatttttttttttcaaatatgacaaaatagagaaaaaaataatgaaaaaccttaaataataatattattttttcataaactaccgaagtaaattatattttaaattttattcttaacttatactccgcggaaaacccataaaattttaccaacgtt

SEQ ID NO: 14974 - DNA, 3390 bp, Cannabis sativa
agaagcttggaaggtcaatggattggtggttagcgatcaacccaacctcctaaaaattggcagtagtcattagtttcccaacatccaactccaaactataataagttgttcgatgagcttttaaccgaaaaattgtttgggttcgagaataaggacttatctaggaaaaagaaataaaagtcgtataataatgtgtaggcaaccaacaactgaagtaccaaaagtgaaagactaaaatagggagatgaatacttacacagtcgctagaagtttaggaggagagttggatgctgattcaaagggaatccggaggtataaaataagtattattgtatatttggaggataaatctagggactggtagggaacttaactttcttcctcttctttaagaggtagaagccatttttgttcttgtctttcttggaagggacatgttctaattcgtaaaagaagagaacctccgcaggcttggacactgaaatcttcctctccttacagaaaatgtaccaccccaccaaaagcttgtagctctacgagatcatttgaattggggtgatcctgacaaaggttaaaaatttcgtgaagtaatctctgagcaggaggcgggattcgatagtgatatggcccaggctccatgatccaaagccatctacaatggtgatggatttttcatctcttcgtgaaagcctattctaaaatacgcagaatgtatttttgaagtcgcattcttcttccaagcccgtcaacattttgtaattgtagaattttagggatgttgtccatctcccattccatatcgtcaacgtgatcctcctcaaggaccaccggtcctacattgatgttccaggaaggatcattgttattgcatcctacatcccatgcgcgttcatcattctggttctctttaggcataataaaatttggaaaagatgaacactaagaagttaacacctccaactgaataaaatattaaaggtattggagagtcctcacaggtatctgcttggagcggtccccaccagatcctatatccaggaataatttgcccatggataaaaggtttggagcataagaaagggaacaaaaagaaaatgtgttgctattcggcactagaaagatcttggatagaatacacgagttatagcaaaatcctcagggaacattgttggaacccttgaaatcggttgtcattcgaaaatagaaaacttgaaaaatccctagttttttttattttctatgcatggcaaggttctcaaaatcaataacttccctatggtctctaatttatcaaccatacaaagataataaaccatccctacacggtggtgcacgcatttccaatcattgaaaaacttagaaaagccccaaaatcatggcatattcgcctaaaacctgctaccctagaatctatctaatcaaaaaacacaataacaaggtcatgggagaggagtacttgagttttcaaagattgggggtattggtctttgaatcgccgctgagattctcacccgaaatttgcttagtctttttgagctcgtcagagtctctttgaaaatctatagaagacaattctagggcagcaatgagagagacagtatttgggaataatctcttttgaaacttcaataattagttgacggactctgaactgatatcaggcattcactaggaagaaaattttaagtttaagcatgtttctctctctaaaaactcaaaaattcaaagaaatggataaagtgccaaacaaactataactaggtatttataaggaagatggttatccatgtgcctctaatttaaaggctcagattaaatctgagaaagcacaactcccaccatccaatggtttgggaataccaaaggttacatttaatgcaatccacaaaattgaggagatgtgtatttatggtaatatttaccttgagtaacatgctaacataatcaactgtcagtacagcctaagacaccatgcgccctaacaaaactattgatgtcactgcatcatgtttgagcgaactatatcattgttgtagcatgggcctttacaaaactaataatgttgtagcactacaaaattttttacttttagtcacaacaaaagttgtggctaaatgtgaaaaatattatgaccaaaagttttagtcacaaatttttcttgtgacagcgttgcgactaaaaaatcgtggctaaaagttttagtcacaataaaaacaatattgttactaaaaattattttttgtcacaactaatcaacaattagtcacaaccaccttttagccacaaattatttatctttggcgataatgtttattttcattaatatttatttagtcataatttttgttgtcactaatacttttttagccacaaaaaaaattataactaatatttttttagtcacaacaaaaaattgtagctaatatttctttaatcacaacaaaaaattgtagctaatatttctttaatcacaacaaaaataattataattaatatttctttagttacattatagcattggcctttacaaaactactaatgttaaatagcatcaaatttgagtaaattgcatgtgctatatagttgagttgtcaacattagcccatattgtatgtgaatatggtatactattttatatgattttcttattacgtctttttcgctcacatatatttattagacgtaggttgttcaaaaatgagttagagggtttggggcagagagattgacctaggtcgatttgaatgtaatagtgcaccaaattatttcataaataaagtttgggatcctaaatcaatataaaggaaataatagaatttatttgtagaccttctttaactagtaccaaattttacttaaaatcacactttttttttttttatttaaacgtttatatattacaactatgttttatctggactcgaacctagaacctccaacacacacactcacctatggccacttgagctagtctcaagtggtttacttaaaatcacacttggatttaaaaatatgtcgcttcacaaggcacttgtttattaaaccacatggcgtccctaaagaacagggtgttacattttcacaacacggggttggtttagtttgaattgttggttttgatctttgcaaaatccagtgatttcttacctaacttgtttctcagatagttttcactatactctccatgagtgtatcttctatacttgcatgagttattttcttccaccaattcagccaaaggtccaatctctaattcataggtaggagcataaaaagtgactattgaaagcctatctttttcattgtgagtcacagctctgtgttccacactcttgtaccttccgttcgtaagaacctatatatgtatatgtacacttcaaagttaaaaaa

SEQ ID NO: 14975 - DNA, 5117 bp, Cannabis sativa
atactactgggaattagtagttggtataacaagaaagaaaaagaagaggtcaacaaagttgtagtaggagaaggccacattgagtaaatcagaaaacaaattattaaatctatttagatgctttgtttaatagatactaggtatgctatggcagccagtaattaattaaaataattaatactagcagtataacagagaagagaacaaaaaataatcttaatggggacaaatatttataatggaaaatgaaaaaggaaaaggtaaatggtctgaagaaaaaaaaaaagtggtaactggtaagtaaagtaaattaaagaaaatggtaaaagtaggttcttgcaagttttgagctttcaaatcaaaaaataaaagaaaaagaataaaattttgataaagtggcatatacatatgtgttggggaaggggccttatatataaatatatatattatggcttgtgggttcgtgtagaggaccaagtgaacacagtatttatttggagaaaaagaaaacatataacggcagtatcaacaataacaacaataataacagtgagacatatttgcagagttttccagagagagagagctctggcgtgttctctctttctcagcaatcttttagtccattaccattattaatatcgaagttgcagagaatttgaagaagaagaataagtacgaaagagaagaaaggaaggaaaacaaagatggggggaggaagaggagcttcttcaaggcttagaaaagcagcaaggaatatagcagttgcagctgctagtgcttgtggttcattctctagaaggaaagctcttgtagatcccattgcctttgacaataccaactctgaatctgttagtttcttcttcccaaccccttttcttctttcagtttttcaccaaacttttatttcttaatctgattttgtttagtctacttgaatagcccccattgtgtgatatttgtttttcttattattattttctataaccaagaaagaaaaccaccaaaatgactaattgagtttctccacctcaattgtctttgttccttaaaactagcttttctcttttatttgcatatgggttgttgggtttggtttttgttttcataatcagacaaaaaggactcatttttattgtaaaattgctaagtaaaaggttaaaccaaagagggtaacagctaatttcccttaaattttttgttttaacagatctcaggttcttccgttgtgtctccttcaaaatcaaagaatatatctttagaagaagatgaatatattacagaggaatttgtgtcttcaaatatcaacccaaatttgcctcctgctaaggtacaatacaccccttcaagtcattcttattcgtttgagctgaacccctcttaagatatgaaaaaatattccaaatccccgtgaatacctaacaaaaaataaactttaaaataagaaaagaacaaaaaaaaaaaagtgaaaaaaaggtaaaaaatgtcttctttatttacaaaacccattctttgagtagatagcctttggcggccgtatttttgactgttttttttttttctttttgagtcacagaagttcaatacttatttctttccttgatgatttgaaaggtgcagtagtcttaaagttttatgtatatttgtgtttctgcactttccagtcaattcaagcttcacattttctaaatcagaaacacccttgttatatttatgtacaataaatctaaattgcaaaaagaaaaaataaaaatgatatccaaacgcagagagtctgaattttaaagtgagaagtaattataacaggtggggaaatagaataacaaaagttgtgtggcatgtgaaggctcctgacacatgtgcactactagtctgaagtttgagaaaaaccactgttatccaaccttagacagcagagcccactcttaaaaagaaaagctttttcccacctgccagtgacactaattatagtgattactatgaccatgttattcaatcttttaccaccaccaccaccaccaccatggcattccctcctttccttttttaatttttagacaaacagtttcaatttggttattatgatggttttcaaagcacaattggttattcattcatgccactaatatttgtttggtagagtttgctgtggattcttttcaaagatcttggtacattcatgattgatatttgaaactccaactgaagtttagtttttttgtcatgtcaaaactcaaaccaatatgattgcctagtgtttgttgaaagttaatcaacttgtttcaaaacatttatattttttcactcttactttatatatgaccaaaagccaactatttagggacgtacttgataattgaacccgaccatgttcgatcacttcattccacagtgaaaaaagattagcttttctttatttaaagttgataaagtaatcaagcaagcaagtttgaattgaagcttttgtcctaccttcatgttttgtgtgtgtgtgcaagtttgactagttgttaagaattctaattattagtgtagttattatgtatttactgtgtgcttatctttttcttgtgttgattgtatatcacagaacttgtgtgcaatatgtctagaccctctaaactacaacagcaaaggaagcaacagcccaagccaagcaatttttacagcacaatgctcccacgcctttcactttgcctgcatttcttccaatgtccgacatggcagtgtcacctgccccatttgtcgcgcccactggacacagctcccccgcaatctcaacgctccttgtgcctctatcaaccacaccgaccccattcttcgaatccttgatgactccattgccacattccgcatccaccgccgctcattcatccgctctgctcgctatgatgatgatgacccaattgagcctgaggaaatgtctaactgcccacgtcttcaactctctctagtccccatcccgacgacctcaccaacaaactaccaaccgcccttggcaatgcctctcagtcgccatttacaatcctcaacttgctcttcttcctcctcatttctacaaacaaacagagcctatctgtctgtgaaacttgctaaccaacgagccacagacttggtcttggtggccagccccaacgggccacaccttagactcctcaagcaatgcatggccttattagtgttctctcttagaccaacagatcgtttggccattgttacatactcatcagctgcagctcgagtctttcccctcagacgcatgacatcttgtggtagaagagcagctttacaagttattgatcgccttttctacatgggccaagctgatccagtcgaaggactcaagaaagggatcaagattcttcaagatcgagcacacaagaaccctgaatcaggaattttacacctatctgatagtcctacacaatcttaccatgcttcgatgatgaacatggaagttccaatccccgttcatcgttttcacgtggggttcgggtatggaacatcaagcgggtacatcatgcatgggttcgaagagtttttagcgggactactcgggggagtaataagagagattcagttgagagttagaacagggaatgagtcagcaaatgggatggttgtacgaattggggagctaagaggagatgaagagaggagagttttgttagacttaggcgagagtggacatgcttgtgttgagtatagttacagtgaagacgtgggagaagttgatgaacggttcataacaggggaaactttggtgagtgttggagatagtaagagtgatgcagaggaatctagcttggccgaggaggcggaggaggtagcgggcggtggtagcggcggaggagggaggaaggatgctattggtggtgggagaccaagtagtgtagagagttgggattaccatgatccttatatggcaagaagatgggctaagcatttgcatggtggatataggttttgaagtaatctttacaattacttatatgcgtgcatattgccatatatttgaagcaaattattattctctttggtatggatttgtacattttcattgaaaaacattttagtttttacatggctgttgcttgaaaagcttttcaatagggatattataaacatatttgtttaatatagaatccccaattaattttatggaactaatttacaagtggagaagatatcatttatcaaataattttattgttaatttggtatttctaaaataaaaaaagtagctactcccaatgggaagtgattgcatataaaattaaagacgtcctttttaaaatttaactatccatcttcaaatcagataactgagaaaaatgtcaagataataatataaacacaaacaggaatatattttatatcaataacgtagcaagatagttttctttcttttctttcactttttttttttttttgagggattctttcacttttaatgctaatataatagtaataatgaatatgaaatattttttctctgttatttgttaacagcaaaagaattatatatggtgaagctaccaagttagtgtagtgggatgggagttaggaaatggggtgaaacccaaaattcgagcctacaattttttcgtaataaaggcactgtagttttttttttttttacacaattttatggtttttatacaatatgtataaggttaaaaaaaactataaggtatatcaaaaagctatagattaaaaatataaaaaaatcaaaaaaaaatgaaatattttatgggaaaaccgtataaggtaatttttgataaaatcacactaagataaggtaattagttaccctaaattatttttctatatttttttctttttataaaatatttttgtttttcttttctcgaaaataagctatatttttttataaatttttgctaaagctaattatattaaaaataataatggtgatcctcgtttatactggaaaaactgttgattgggatatgcaattttgaatatcaaaaaagttgtttaaattgtactacattatgacaaaaatacaaaaaatttaaatattttaaatttatcaaaagacatatatatgctagatttatgtaattaagattaagggaaatttgattttctat

SEQ ID NO: 14976 - DNA, 13257 bp, Cannabis sativa
ccaattagtttattttcttaatcttcctatcaaattgatttcccaccatgtttttgaactaggaaaatgcaactaaggcatctgactttgctttgagagggcatatccaagtatgtctactaaaatcatctacaaaatgaatatagtatcaaagatttgcattgggtatcatagggtcaggaccaaagatctgtatgaatcacatcaagcactctagtggctttgttgtcaaaaatttgaaatggtaaagcatggaattttccatattggaaagcttcacaaaataaaagattttcattggctaaaacttttacaattgcattttttaagacttaactcaagaccttagaagaaggatggcctaatcttctatgccacaagtctttggtagacacatgactcgaattaacacaagacattaactgaggaacagacacaactaaagtagaagagagactaaaacataaattgaaagactcaggactattgtttgatgaaccagagtttggaaattttaaattgcaggatttggttgaaccttctagctgatacagaccatctttaagcttcccctgcatcaccaccatctttgtttccatgtcattcacaaaacacacatcaaaaaagaactcaacaaacacttttgtagcagttaatttgaaaatactaattaagttctttgcaatttttagaacatgtaaaacatcattcaattgcaacttattaccacattcagattgtaaaatgcttgagccaacatgagaaatgtaaatatgataaccatcaccaactgttaatttttccttaccattgtaaatagttttgttgatcatgttatcatgattttaggtgagatgattactagccccagaatcagcataccagtcttcatgatccacaacttttagtgtggcaatgtaagcacttggatatccttcttttcattgcttgattttttggtgcttccaggttaagatcccataaacgattcatcatatttattatagcaaaaggtagtagaatgaccacaatgcccacaaacttggaaagttaatttggggtttcttccaccctacctctacgtttgctagagcttccttctctatcacttgtgatagtgtgagcctctacacacaaccatagttgttgttaaagttgaccactcaaaatttgagataaggtgagtctttgggtatggatctcctaaaagtgccaaactatcagcccaggatctcttttgttgaagatactcaaccattgaagtacttcccttacgaatggtttggatttatgttcgagtgtcatccatttggcacaagaatgagcaccataaaaatttcttagggctacgcagagtgctcttaatgttgtgcagcccatcactttagttgtgattgtctctgtcatggagccataaagtcacctcatttacaattgatcacagataatccatcttttatattctagattcagtacaggtcccaaatctaagatgtttggttccattcacatagccttccagtcaatgtcctcttatgattgttaagatgagattcctccagagtgtatagttgttcctatcaagtttaatggggaagggttgtgtaagagtgttaccgaatggtgcattactgaaatttgcaaatccaatttggaactctaattgagagttgtcattagtggcctgaggggagctaagatgaccaaaggttcattggtctacaccatttccttcatcatgttgttgatttcctccgtgtggagtctggctcattgcagacatggcataggtttagcacaagctctaatactaagaaagaatacaaaaaataattaattgagaaagctcagctcaaatcatagttgagagagagaacgaattcatttataggcaataattacaagatgattacaacagaaagaaattgacagatggcatagtacaatcattggaaaaaataaaatgcataacaaaatggaaaggtgccaaaaggtgaagcaaaaaatagaaccttctgtgaaatttctatgcctaaatacctttagtgactaatcctctgcattactcatctaagcatatcttaacatacacccaatctataatcgaacaaccaaattgcaaggcatgatccaacacaaggtggttgatattattaatttttttatgtaacaatatattaaatatacatgttgccccaagtttttttaatatacgtgacagtctcagcatgggacacgtggcaaacaaatacccattatccagagatgaataaaatatttaaccagatcccttctaaaggaactaataactaagttcaagggtaagctcccagacatgagaaaacagccctgcttcctctccgggaggtgaagggcgtatgaacccctacagactagcgaaactggagatgaacgaccacctcgcatttaatgcagcatggggaaagcgtctgggaacacccataaaaggacatgtcagacgtcataaacccgtcttttagtgattacacgataattaagggtgcaagtgatagcttcattatgaagaatcacatcaatcaataaaggatgaaggctaatctcacctaaagcctagacagcctactacgtgcatgccctattttatatattttggaaacttgtgcatgctcatggatggcacttaaagacaattaagacctttcttcttcctaccaatcgctataaatatccctcagcaaaatttatgaggggatcaaaaaaagaacacaaaaaatattctctgtaagaaacacccacctattaataacaaagactcgtggactacgacccattaatgcccgaaccacataaaaatatatgcattgactcttcctaagctatcattattacattaaatatttggttgccaaaaatctcgatcaacaatatatatttacattaaaatatcagtggattaatatacacaaacaagcagctaagactagtatgcaatagagtaatcttaaaggaaacccatggtgcttagcaccttcatgaggtgttatattaatactggtgcagttcaatataagaccttttctcatagtgatgttggtgcgtgatggtgtctaataaaaatattcatatgtaacacatatagagactctaacataatgatttttttcttctggattttctctccagagcaattccacaacatgtactccacttggggtgcttgctgaagttgttaaagcattggagcaagtggtggacttaaggattttaaagcaacgttgctattgcatgtcaaataaggtgtggtggcagttgtggagtagtggtaattgtggtgtggtgatgatggtggatgaagaagacgaagaggaaggagaagaggttactagtttaagaaaaagaaattgaaatttttatttttttattttataatatttttaaattttcttttttttatatttaaataaataaaattatggaccaacaaaaatatgtcttgtattttgttaaaaaaaagatatgtcttgtatatatgtgtatagtatacaagtgtatatgtggacaatgagacaattcacgcttacaactaattgaggaaactagaagcacattaaataacaaaaacataatcaaactaaggtttgtttagcagactatataaggagtcatgttgcattaaatgagaagaatgtggttgaataaatttttgtatgtactaattatgtattatttattacataaaaaagtagtttgtatttgtacgtattataatatttagaaatgtttcgaggccagagttcagagttggggaccgatcagggggctgagggctggggttcaaggttggggtttgatttgaggttcaaattttggggcatgggtccaaggctgggtggttctggggtctggggttcgggtctgagtccagggttagggttcacatccgagatcgagcctacgccggggataggtatggggcagggtggagtcagggtagaggtcatatatatggtaaatttagtataatttaatttatatatcctaatacaaattattaataccaaatattatattatattaaaataatattatacaatataatgcaattcaacacaatacaatagattagagcattgttattgggcaccagtggtgtttagcaccttctagatgtgtcgtcttgtaattggctagcgatactccttaagagttattatattaaattatatggtactcgatacttagttagaccaatagcaatattaacacgtaagagggtgctagacaccaatgatattttttatcatttctcaaaccttaatgtattagggaaaaaaaaaaactatacttgatgtatatccacatttataaatggggtttagcttttctaagtcccattaaagaatattttcgttagatattaaaaataaactgcataaacaatggtcaatattaattggtatctagtaaggtcaaataagaatttgaccaaaagtaaacttttacaacgtatggtcctattttagtcccctagaataatttgtttccaaaaatagctctctaatatgttctgaacaatcgttttattttattctttttcctgtttgtttcgttataattttagcatatctgaaataatgtatgatcaaaagttggatggatgagaccaaaatgtgttacagaattcaatgattttgatattgtgaatgaaagaagaagaagaagattagatggagctaagtaataagtcaccaaataggttgaacaacttaccgtttaatacatgcattgaattacctcctcaggtaaactcgcaagggttttggaagaagcagaatcaagataatgggttgcttaaaaattcattgccagagctggaattgcagatagtcatgatattctgcatgtcccactccttccatttcctcttcaagcgtcttggaattcccaagctatcttctgatattctggtatctaactaatatatacatctctataaaataatcaattatatgttaaatcacatacaaaatctattgaaacatacacactttttcacatattttcaggagaaactatcaaataaaggccctaattaaaacttctttcttatcttctcaatttaaaaacaaatgtcaaaatatattttttttatgttcaatgtagttacaagattattattttgtaaaattttgaaattttttgaataatttattgtgctgaaaataggtttaaaatttttttaacacagggtaatctaaaatattaataactctattctcgaaaaaaaaaaaaaatatccaaatttaagattgtaactataaagaatctcgttagtaaaaacaaacaaataaataaaatattgctgcatgtgttttcatacccaaaagtcatttataaataattataattatataaatatatatttgtatatatataaaggtgtaaatttgtgagacattaatttgttatagttaatatacaacctccggcctaaaaaaattgttatataatttttccaagggcaaaagtaattctacttagcaactcatataaaattataatctagattatttgatataatatcatacatatatctatagataactttttacaaattctaatgaaattccaaattatttaaggtgccaaaacttatttgtttgtagtacaaccgtgttttttagatattaagagcatgtttggtattgttttttgttatttgttttcaaaaaattatttttaaaaaagaacaaaaaatagtttttgaagtttttaaaaacaagtcatgtttagttagtgttttttaaaaacaatattgaccaaaagtgaattgatttttaaaacagaaaataatattttgttgttttcaaaattcttgtttttagtaacattgttttctgaaaactgttttcaaaaaacaacgccaaacaagctaattaaattgttttccaaaaacaattttcaattttaaatacaaaaagcagttatttagttatgatgtcaaatatgcagtaaattattcataatttttcaaacatgtgggattttttcattgatcaggaataatgataataatattgattaattatggtttgcatgaatgcagactggtttggttctgggatttgtactaatagacaaacatggaaacccaagagacgagactctattcactccaactggtcaacaaatccttgccactttatcaatgtttggttatgctctattccttttcaccattggtgtcaaaatgaacattggactagttacaaagtcaggaacaaagactgtcacaattggtgttgccacactttttgtcccatttttgtgtggattaataaccaaagaattcatagcacaacatctaacacttccagataagaacaaactctcttttgttttcgtaacacaatgtcttgtcccatttcctgtcatttctaatctcatatcagatctcaatcttctcaactcagaaattggtcgtttgtctatgtcttcagccatggttagtgacaccatcagtttctttctcacagcttcttttctcatgattagagtttcaatggattctttaagaaaagccattatagacacttcagcaacaatggcattcattctagtctctgcttttgtaattaggcctttaatgtttttcatcattagaaaaacacctgaaggaaggcctgttaaggatatttatgtctacaccattattgccttggctttactctcttgtcttatttcagacttacttgatcaacaaattttcatggggccttatgttttgggattattggctataccagatggaccccctttaggatctgctattgttgctaagcttgattgctttgtcactggagtttttgtcccactttttgttagcacatctgtgttgagagtcgatttgagaaaatttgtgtttgataatctcatgacaactaacataatccttgttatggtcactaacatagccaaattcgttgcctgctatatagcttgctttatctatgacatgccaaggctcgattcttgggtactatctttcattatgactactcaaggcactgttcaaataggcctctacacctcatttagagatactgatgtaagtgttgctattatgatgtgccatattacttttgatagttttactaacaatggctaattatcaattgcagagtatatctgaatcggtttacaatttacttgtattaagtatcttatgtttagccataatagtaccactttcagtgaagtttctctacgatccatctagaaaatatgcagggtatcagaagaggaacatcatgcacttgaaaccagattcggagtttcgagtacttgtctgcattcacaggcctgatgacattccagccatgattaatttgcttgatgcttcatgcccaactaaagaagctcccattggtgtttatgttcttcacctaattgagcttataggaagagcttctccaatttttatctcacaccaagttcaaaagaaggctctttcacaagtctcatactctcataatgtgatcctttcttttaagctctttgagaatagtaattgggatgctgtacaagtaaatgtgttcacagcagtttctcctcggaagttaatgtatgaggacatttgcattatggccttagacaagctcacctctcttatgatcttaccctttcatcgaaaatggtcaccagatggacatgttgaattggatgatggcatgttaagggccttgaacaacagcgtgctcgaaagggctccatgttcagttgggattctcgtgactaggtcgaattcaggacgagcgggacccttgctttcatcacaagatacttataggtactcggttgctatggtgttcttgggtggcaaagatgatagggaggcattaacttatgcaaagcgcatggcgatgggttcgagtgtgaggcttcatgtgatccatcttattggcccggatgaggaagaagttgatgaggataagaagtgggatatcattctggatgctgagttgttgaaagattttaaatacagaaatttgaattcagctcaatacattgattatgttcaagaggttgtgaatgatgggactgaaatggcttctgttgtgagaggtttagttgatgagtttgatcttgtcataactgggagatgtcacagcagaggcagccgccaaatttcaggtcttgacattggatggaccgagtttcctgagctaggaatcataggagacttgcttgcctccatggatattcatggcaaagcttctgtactggtgattcagcaacaagaaatagaaactgattaacaagtttataagctgttcttttattattagttctccatgcatagaccatttggtcttgctctattgcttctctccacattttggcctaaagctggctctgtagtctctacatctttcccagttgtaaattagtgcaacatgcatgtttttctgtagaaagattaaatagctccacatatctaatcatgggaattggtttgcattaatgctaatcagtgagaagaatttgtaatttgtaaatcatcaatctttgttttcaaatgttctttaaaatccaatgtgtataatcaatcaacaatgattgacccagctacatttctttatttattttctaagtaaccttgggtgtacatgaaatcttaaccacccaaatttaacaatgtggttttttgaggtttattgttagcattagtactttctattacattgcaaaactgagattatcccaggaaaaattttatcaactgaagaacagataataacaaaacttcggctcaactgaagcgacaaaattgctgagtacctaattagcattagggaaagagagtttccaaaaactttatagtatctataacattattgacattgttgttatctgtatcctacccttcggacgaaaactactagccgtccgcgcttgaatgttgtctcactgaactccaagtcaactaagtacgcttgaacaaaaatgttgcgagaaacagatccagcatctctgtaacgagttttttgttatgtttgaaaatccccgtcttgaagtgtttttctctctatcatgaagtagcatagcggttatttagcacatacttcacaacttcatagaatgaaatcacaataccaacagaaggacctgcgcgtccaacacgaggaccaacaccggtaaaaagtcctttcatccctccaaccctgtccaaattaacaaaatgcatcagtcaattgagagagatgttcaccagacacctaataaatagaaatttcagttcaacttaacacactatactctagatcaccattatggaacggagaaacatttgaatttttattggctaatgattcagaacatagcagtgacccgaatctgatttcttccaaatttatgatttcatagtgaagatacttgtttataaattaagaaaaaaatacctccaaacttcctttagtgttcgtgtggttgtcatttgcaatgccctgactggatccttctgtgaatttgaaaggggaataaaaaacagtatatgaattggcaaggttaaacaatatttgtcaatggaagtcttactatcaagtcatcagattctaactgaatgggataaagaatgaacctcaatctgttttcgggttttcgcaacatctagtggacatgtagcagcagcagcaagacttcctgcaacaaacccggcagaaaaatttgcacccaatacacttgcaacgctggtatcatcaccaactagacaaagaagttttctcctgatctgtacatagagaaggtggggaaaatgttaactgccaaaaaaagtagcaaaaacacaatctaaataataattagaaaataaactcacgggctcaagggtagaccagcagattgcagagaagggaacatcacgtgcaagctgtgctcccatgcctgtccaaaggacacgatatcctttcactgtaacaagaaagccacatcaatcatataagtgttacacatcatttgctgctccctcaaacataggtaatcttaatcctaatacttctgctgtgaaaaacagtttacacgatgaatgttaccactgtagaaaattgacttacagttttcttgcatattatttgtggttttgacatgagatagaatctcaaataaagtcttccagacgccaggaggcttcacgccacattgagtcaccttagaagcctattcatcaaacaaagtggtgaataaaataagcaaagagatccgcaaaatttaagaatcacagacaataactgaagagagatctcttgcacatgaaaatacaaaatatagaccagaataaacaataaccataacataggcatcaagatcaggtttttacctgcatgcgtgttcttgcaagctcaataggatagcaagttgcacaagccaatgagcgagccaatgatccagccactaaagggacataaggagtcatgattggtgcattctggatgctaagtacctctaaccaatttcgaaatatgtcataacaaggcaggtagatcccaacctgattaaccaaagataaacaagaatcttgtatcaagatcacaaagcatacaagcatgtacactttacgatggcagatacaaagaaaatgtaataacaaccagttaacaagcaattatagaacttactgttggtacagccagcgcaagaccagcatttgtgcctctccaaagtcttgaaaatccttcctgcaatataaatccaataaaaatacatcccaaaagaaaaaatgaatgcaaaacccagtaaactaaataggaacttataaacagatagacagccttaacataaatattaaacatcaagtgtagattttttttaatccataaaccaaatgaatcatatcatacaattcataccacaatggaaatcaaatatcgtctttcctctgttttgaaatatacatttacatggagtcatgcacttcaccccagaaccacacacactcattggcagtatacaaacaaatctaaagcaatgtaaatcagtagccgaaaagacaattaacgcagtttagagtccaacaatattttaacaatcaggctaaccctttttcacatcatacaatccataccacaatggaaatcaatatcgtctttcctctgttttgaaagatacatttacatggagtcatggacttcaccccagaccacacacactcattggcagtatataaacaaatctaaagcaatgtaaatcagtacccaaagacaattaatgcgcagagtttagagtccaacaatattttagaacaatcaggctaaccctttttcacatgaatatataaggaccaactttaaaattggaacagcgtgagagaaagaaaataccaaggctaagattggaacaggagaaaataccaacctgtcgaatgattttgttaaagacatctagtgttcctttatatcgaaaacaatgtggagggcatattgatacagtaccatggacacccgcatgtgcacatgatggtgaacaccttaaatctgcaaacatctgcaaaccataagataaaacaaagttaatagatacagataccggtagaggatataagaactcatgagcaccaactaatagaatcatacgaaattgcttgagcatatacgagccatagaacctataagctagttcataataagaaatctccatggcactggcttaatagaagttaaaaactatactacataacctcaactagttcagctataattgtacacaacagaaatccattgagaattacattcataccatgcttgggccaaaaaaagccatccgactcgtgatattacttaatgggtgagaataagcaaccccagctgcctgagcttgcagccttgtctggaaaatatgaggtgggaatgttcatcagttcaatttatagaactcacaagtagttagattaaacattgatcataatctaatcaaaaaacataaagatgtacactatatacaatttcaagcactatataaatgaagtgttatagttaactaaacaaaaaaccataactttaaacaaatttccctaattacaaaataacccatattcagttttgccagaaaacttgatcaaacaaaggaacatgttacataccttgacaacatcaagagggtttacaataatggcggaaaggaaggcagcaccagctgcagagagagctcgctcggcaatacccagtttccaatcagacacggttgtggagttgggaagcttggtagccgaaaacccagccgcatcatctctctccaaaaaggtcgattcagaatgaatttccacattagggatttgctcagccgttatccatggattattattattattattatgagtctcctctaattccaccatcttctagtatcctctctctgaaattgggataaaaaagatgggattttgttatgtaaagaacaaaaaaaaaacttcattttttttttataaaacaaataatcaaaacactttcccgatcccttggaggaaaaaaaaaacttaccaggaagaaagaaggagaagacgaagaagagagtaaggaaagggaaagaacctaaagaggtgtatgtgtgtgtgttgtcgtatacaatacaactgtgagaaatgagttaatttgagggttaaacctaattgtttttcttttttagattataaaattatttctttggtcccaagcaaatgaaaactagtggaggagaactctcttctgttgttcaaatattgaaccctaaaaaaaacacaatattatttatttatgggaaaatcctaaaaatttatggttatgtagataagtctttaattttgaaaattactgataaaagtccacaaggtcatgtattttgttagtatgttagtccttttttctaactgatctattagatgttaataaaatgtcacatgttaatttttttattagaattttttattaatctaaatcataattttaattaaagataatttaaactttatgaaaatttcaaattttttagtcattaagtaaatatgaccgtatctcgaataatcgttaataaaagtgacgaagtattcacaaacaccttgagcttgaatattgataggttcattcatacacattagtgtgaataagctcaagttgttctttgactctattgtcttttgcagaaaagatcttttagccatctttccttctaaataagactcgtatatcggaagagtttcaacttttattttcgttataggacatgtctttgttaatcagttaattctgt

SEQ ID NO: 14977 - DNA, 6827 bp, Cannabis sativa
  modified_base (5057)..(5057): a, c, t, g, unknown or other
caagtaatcaaagagttgaaaagaggtttagaatcaccacaagggagagattacactggaagtgaaccagagcactgtaacgggatgcaacccactagagagttccagagagagaaggttcatgcgtctaccactctgtctcattgatttgcttccttgtttttcaatatctttttagttttttttttttttttaatttgataattgagtcctaattttcacaccacacctttttcaatttttattactaatttttttccacatatatatataaaataattctatgaatatagttttgtccttatgctatacatatacttttttaaccattcatttatatgacttttgataagcaacatttttaatataattgtatgtagcatattaaatttttcatttaaaaaaaaaataaaaaaatctaacaccaaaatagaaaaaattaaaactttcattggttattaaacaaattaactagcaaataaaactaaccttatattttggaaaaaaaaaaaaaaaaactaattttacatcattatcatcattatcgtcatcccagattacatctccatctccctcattttctattttctccaattttatttgtgggacagagaaatggaatagataattttagttaattaaatgcattttaaaattttttttatctgcatttaaaaaaaaaccattaaaactttgtaaaaaaaaaagcttttttttttcaattgtatttcatagaacaaatagatgattgaaactcttgctctcttacacctaccttataaaactgttgatttcaaattgtattaatgttattaagtttgctaaaatattataaaatacaattggaagaagaagctattttttttttacaaagctttaagtttgttgaacattgttggcattaatattttcatataggttgtcaatgactctgaaaaaaaaaagtgtaaacatagttcatcaaggaagaagagagacaatagaggaaaattatttttttaaaataaatttgtatttattagaaattattaaaataatataatgcaagctaaatattaattattatcttacacttatttatttataaacattaaatttattatttatgactataaaaaacttctataccataagaacaaaacaataatctcataaacatgtcctatatttatacattcaagtttaagtttttcatcaaaacgccaaaccttttctaattttcattgttttttttttttttcaaatcctatgagctaatttatttcacttatatataaaatatatttttattcaagcttaatttttttttcatcaaaactcaaacttatttatgagaggaaagaaattaaattaatttgtgctatcataccaattttcaatttttttttcattgacgaaaaaaacaaaaaaattggagaatagtatcaattattggaactttcaatggtagattgatcaacaatcaataaaatgttcaaccgttcaagaatgattccttgtaagtagaagtttagtattagctcgaagttgtatcaaaattaataataattttaaaaaaatagaattttttagtgcttaattttgtaacatatattctcttaaattgtatttttttttaaagcccaatttttataattagaataggatgctaaaaatatttaaggcggtccaacctagtaccttctataagtggcgctttatgattggttagtgatattttcttaaattatatgaggtccgatactcaattatacaaatagcaatacgataccaaaagagtgttagacaccaatagtgtcttttagcattttttgttatagtgtataatataagagcattgtggagcccaataacttctatacgtggcactccatgattaatgtcctattcataagtattacattttagtaattctcataatatataattattgttattagctatcattgagatgagatgaccttttacaaatgataaatatactatatgattttgtcctgtgattgtactttcacggaatgtattccgcgatgtacggtagccgttagatgagggagctatttgatctgagggttgagattgatatagggataattagggttaaaaaataataacatatcctgatactgatataatgtaccctgagacccatctaatataccacggaatacattctgtgaaaatacgagacaaaatcgtgtcccataatatttattaaattaatatatatttaatttgttatttaattacactaaaaaaaatgacacgtaatagtggtactacatggcttactagaaatatatataatgtatatatatatatatatttatgtatgaaatgttgtagggcataggggctatatgagaagcattaaggacatgttcctttaatattattgttagcaggtgtggcagtatatttatgatcttacaacttacaagcaataattttatatagtgtatgcatgttcaattttctttaattatgttaaaaaaaaaaaaaaagagttctatttaattatggtttaaataggttactaatagtactatattatcattagatatatctttatatattatcaaaatattactctcatcattaatcatgataagacaattgaaaaaacaaaattgatgtgttagcaactatctatgtttctgtattgaaagaataatcatggatatatttgaactaaatataaacaattgagatatcaataaaaaaaacatcaaaaataatctcaaagcttaatttaaataacacttttgcaagctgtgtatttgggtaaaaaataaaacactttatttttatttttttaatagaaattagaattctaacttatacataacatgcaaattatgaaactataaagataagcaaaaattatgtcaaacatactaaatcataatacatgccatattaagagcatttctaattatgatctatgaacactgtttagctaaaatataaagtgagacttaaaaatacgagtttttttttagtgtagcgtaatggtatttttacaatcaatttatagcttataaattaaaggtcttgaattcaaacccatgacctttctttttttttccatccctccctcaccactaagttagccttaaaggttttaaaaatatgagttccaactatataaaaaaatagctctctataataaaatgggtagatatctctataaatatagagagctcctttttttgagagaaaaaactctttgtagatatatgaatagtgatttaacacttaatggtcagggacatgcgaaagttttaaatatataatttaagtataattatcgttaaaacttaaatataaatattcatttacaatcgataattaaatttaaatatttatgtcacaaattattctaattataagtaggtaaggatatattcacaaataattatacataaaactgacacacttatttaacaatgtgaccacatattaacttttgataaacacacttataaaacttaaaaactcggcagttggcttattaaggcattagacatgcgcctagggttcactcagtccaaaaacttaaaaaagaaaaaaaaaatcttttaaaaatattatctattcttttaataagggccaaaaaatttaatttttcctaagactcaacgatactcaaggtcgaacctgaaactaagatgcaacgaaagataactttacttttttagggacagaattttgtcccgtaatgtacttttacggaatgtattctgtgatgtacgacaaccgttagatggagtaattttttgatctgagggctggggttgatctaggggtaattagggttaaaaaatggtaatgtacactgagacccatctaatgtaccacggaatatattccgtgaaagtacgttacgggacaaaatcgtgtccctacttttttatgctctaattaacatatttttcattcacatattgggtcaactttagttttttttttttggccttaaaaggtagaatcttttgggaccttatgaaaagaatatttttaaaaatcactatatatgtattttaaaatatatttttttttcttttggactgagtaagtcttaggcccagctagcccaccttaaccttgggctatctttgttcacatgctaaaataataaattttaaaatatgagactttgttttgtcatacttttaaaatttatgttcttaattctaaaatatttgagagactcgaaccacccttatgaagagaaccaaacctctttattgattatcttaacaaaagaacaagtgtgtttgaattgaataattatgtggtacttgagagtagctagaatattagtagaaataaatggatgacaatagaacaaattatatagaaatgagcatttcagcacttttctagttcaaaattttgagattatattattattttgtaattttaagagtatttataatgaagtgctaaaaaatagaatattgctatattttaacacatttaataaaaaaaatactacttcaatagtattttaaaaagtgtgttaaatttgacacatgctaaaaattgtattaaatttgactcataataaatgttattttttatttacaataataccactaattattatgatttattgatttttactaaactttacattctttatttatcatattaccattacttaagcaataaaatatcaattgtctatcaatataattaattattttttttatttattttacatcttatacattagagtacaattataaataatagactaaatatagtacgaactcatttttttttatcaaatttagcataaattttaaatcttatattagagatggtctaacatttaaattgttattatcttactaatttctaattcaatggcacccaaatttgtcaggaatcgaattcatcttgcgatttaaacaatttgtttctatttgtattaggttcgagggaggaaatccatagtcgtcatcaacatcatcattgttattgagtactagtggtgttcaacaccttctataggcagcactccatgattagttaacaatattctctanaagttattttcttaaattatatggaactcgatatttaatcacaccaatatatgtatgacaccgaggagggtgctagtgttgggccccattcttctaccttatcggatcgctacctcaccttgactctcaaattagtatgatattgtccgttttgggcctaagccctcacgattttatttttgagcaccttcccaaaaggcctcattctaatggagtaggtggaacacttatgtccaagataactcttgcctattctttcaatgtggggttggattgatacctcaaaaatcctcccctcaaaccaaggaccacatactcgtggcctcccctccagcgaaaccaccttataccgtcgctattaccgacagaactcgccgcctaactatcacatttgtcaagaagactttcgacacaggtcctaacactaatctccataatgtaccgctgtaatcatcaacgggatatgctacttgactacccaatataaggtatactttcgatacaagacactatatagatctttaatcacgaggtcatcacattgagcgcttcttccacacattgcaaatgcagcccactatccaagggctcctaaacctttggctctgataccacttgttgggccccgttcttccaccttgttagaccgctacctcaccttaactcccacattagtatgatattatccactttgggcctaagcccttacagttttatttttaggtaccttctcaaaaggtctcattctaatagagtaggtggaacacttatattcaagataactcttatttattcttccaatgtaagactgggttgataccccaatagctaggcaccagtaaaatcttttagtaattctcgtaatataattattataattagccggtatcaatgattttataatataattattttattaggtataattgattttatgagattacgaatgataactaagtgctatataacaattattaaattaatatatatttattcgatacttaattatactaataaaaatatgataggtggtggtgggactacataactcaatagaaataaatataatgtaataattagcaatttttttttttgaattttcgacaatactgatttttccctttaaaaatatatggcttgttaagaattttccctgaacttttacatttatagaaatttattctctttgttaggtttcatcccattacttcgtttaaatgttgacgtgtctttgtaaattagcaactttgctgtctaaactttgacaattattaaatcgaactccctcaaattaaaaatgagaaaaattcaatatttttttaagtaaatcttaaaaaattaataaatcttaaaaaattaatttggaattaaaaaaattattttgaatgattaagaaaattaaaaaagaaattaaaatttcaaaactaattaagtgatttaaaaaattatttattttttattaaaaaataattcattttcattttgatattaaaaaaaatatattaaaaattcatttttgtaaaaattaaattttacgggaacaaacttgagtctattttatttttctcaaaaaaatgtaaatttgtttaagtaaacataatattttttttagtttaatttttaacttttttaaaaataattatatatttttatcatttttaattatttttctttatttgctaagatatgagtttataaatataaatgagtttgatatatcttcaaaaaaatcttagtttatttaaattatttattagattctcaataatt

SEQ ID NO: 14978 - DNA, 19842 bp, Cannabis sativa
  modified_base (3355)..(3357): a, c, t, g, unknown or other
  modified_base (12075)..(12075): a, c, t, g, unknown or other
tataaataattttccataattagatcataattaactactaatttccaaattaaactaagcagtctttacaaacaatgtgatagtgcaagagattatccacaccttcaacaggaaacgtggaaaggagggcttgttttccatcaaaattgaccttacaaaagcctatgaaaaacttagctggcaatttgtggaccatgtgttgagatgttttggggtcccggagaaattctgtaattgggtgtcccaatgtataacaacggcctctctcaatgtctgtctgaatgggggtcaggtgggtagaattttcccctcgtgcgggatccgtcaaggtgaccctttatccccttatttgttcatttgggcagcggaaatcctctctagacttatccatgatgctttgcgtattggtagtatcaaaggtatcaatctaagtcgaggtggccctactatttctcatttcttttttgcggatgaccttatccttgttggtagggctaatgttggggaagccagaggtatgtggaattgtctagagaagttctgtgagtggtcggggcaacgtgtcaataaaatgaaaacaactatcttcttcagcaagaataagatggaccacataaaagaggagatcaaagtggccctcggcattggtggcccggtgggtgtccccaaatacttaggcctccccctgttccgttctagaggcaaggatgcagattttaatttcattgtttaaaacctggcgtccaagctccactggtggaaatcgaaaaccttatccaaggcgggaagggccactttttttaaatttgtgggcttgtcaatgcctgtttatgccatgcaatctaccaagatttctaaccatttgagctctagaattgctggtatcgtgcgcgatttttggtggggttttaaaaaagataatcatggaattcatttgagggtgtgggacaagttgtgcctccctaaatctcggcgtggccttgggtttaggaaatcgaaggaaatgaaccaagcctttctagcaaaatggggttggaagctgcttacagggtgccaatcattatgttgtagaattcttgaagctaaatacctaaggggacagaatattctcaggtgcaaggccaaaacttcggactcctggttctggaagagtgtggtgtaacctaatgatatccttaggagaggggcctgtaaagttatcactaaaggtagggacacgaaaattttggaggacccctggattgcacatggcgacacattctacccacaattggctaataatcacttgtgtccttatcacttctgtgttggaacttttgacggattcaggtcgctgggacacaattaaactgaagaacgtgtttactcctgagactgtggtttccatcctgaaggggggtaacccgtcaggccaagggaaagaccgctggatttggacgaaggaaggatctgggcgtttctcgagcaaatcgacatacttaatccaggctcttcaaaggtctcgtcactgtgaggttgtccctttcctttggaataaactatggaacagtaggatcttagaacgccacaaagtgatgtggtggagcatcctctcaaatgccctcccggtaagggcagttttacttaaacgatttcatatagcggacagtatgtgcccaatttgtggagttgaagaagaatccatcgagcacctgctccttcactgcaacctagcttaccacttatggcgatcttctccttgggggatttttcatgttactggaagtggtatccgtatgtaggactgggtgaaatttttgtggaatctaaacagcaggaatatcaacactgatgaggtcttttatgcctctattgtaatcgacacaatttagcaggtccggaatgacaaggtacataataacagaatggataatgtgaatcaatgtattgattttatttctcactcttatgcagattacagagattccattattcccatctccccccgactcccccgctggctggaaccttccccccaagactggatcaaattaaattgtgatgctaaggttggaggggagcacatgtgcgtagtagtggttgttagagattacttgagcaggctgatttgggtgtttacggccaagatggacttctccgatgccctgtgtggtgaagctgttgcagtttgtttggcgctataattcgcaaaggagaaaggtcaccagttttggtggaaagcaattcaaagatagtgatcaacaccctcaacagtttggatccccaatgggaaattgaaaactactctttattttgtaaaagtattgctccttccttcatttcttgcttattttgttttacgactagatcgtgtaactgtatggcccataacgtggccaattgggcttatacccataactactatggttgtattgatgtcgcttctattcctaagaacatttgttgtaacgactgtgagatctaatgtcttatgaatgaacgtttcttttcaaaaaaaaaaaaaaaaagatgtgcatcaattatttttcctttaattttatttattcttttttgtgaacaacctagctttttctttaacattctctttcctcattttttttttatttaaaaagtttttttttgactacactaataattatttggtctcaaaaattgtaccattataatctactctttaaaataattatcttgatacatgaaaatcatatatttttttactagctaaaattaaaggtagtattttagtttttttcagatttttttttaaaagtttcttttatatttagtttactaacaagtaaaaatattcaaattatgaattatactaaataaaatatttcatgtttatgtttacttgttaaataaaataaaatagtattattgcgacttacttttaaatgtaatcattatgtttgattatagtttgctctgtattgtaaaaaataaattagtgttccaacaaatataaattagtaagtttattgacatatataattgtagtagactatataaaatgaaattaattgttgttttaatatacgaaaagaaaaatgaaaaatttatttcaatataccaaaataaactaatagatttattagcatatacgatgatagactatacgaaaaatgtaaacaaaaaataaatttgtttaaatatgccaaaataaactaataagtttatttgacatatatgagtatagacatacctgattatagaatttttagtctgatcatcgtctttttatttaaaattgatgattttttttttcagaagtaaccaattggtatcttatcgaaatcataactaattggtccaaaaaaaaaatattgtatttgtaatgatttaaaagttattnnnaactttattctttatttaactaatcaaaatgcatacattaatttacatttaaaaaatatgggtgacttaaacatttatgatatatattttttttaaaatacagtttactaaaatggtagcttactggataacaatttattatttttaaaaataaacttgaaagttactcaaatgtattaatatatcttaaataattagttgattattaaagtgtatatatataagttttagaggtaacctaaatgtatctcaaattatataatatataaaagtaatatttatttatgaaaaagttacttattggtttattattaacatcataagtaaccaaaaggttaccttaaaatgcagggaaattttaaaaaaaggaatttcgggattagttttattcagatattgtattttaaaattagatggtgtttggtttgttgtaatgtaatggtaatggtaatagtaatggtaatgtaatggaataaaaatagtaataggaattgatacaagtttgtagttggaatgaacattgtaatcaaaattattgtgcttggtttggtataagaatgtaattgaataaaatgtgtattgactaaaataaccttattccttttattataaaattataaaatattaaaataaaaatggtatgtaatcatttttattaatttttttttttttgtaatgaagtgtaattgtaataggaattagattagttttggtatgtaatcatcgttacaatactgaatataataagcattacattgtaatggattaaaaaagttaaaaaggaaaagcaaacaatgtaatggacctattcattactattacgattacaattgcaattacactaaaccaaatattaccttaaagtatttttttaataatgtcatattattgtaattgaaatttattaatttatttttatagttattttatattttacttatatattttttttttaaaaaaatcccatttatttttggttaaagaacattgaaatcctagtttcatcacttctctctttccgcctccagctagtctctctcttccatattcgcgcggctccatgcttctactgaacggaccagctccagtcgtccaccgccaaaacagatgccatattcggactccccaactccctaaaccttgttaccctactctctctttctctctctctcgttttcctctcctcctcgcactccctcgtatgctttggctcatctaattcgtcacaggatttggctgttgttcctactaattttgttgtttactatgaagttgaactcgtctccttcgttaaggtgggtgtcatttgcactctcttcggtgtctataccaatgtttctgcttgccttcacaatgacacttagaagagatttgcttaatgtgtgcaggaaaaggaatcttgggatatgaacacacaggagaagaagaaaaaggaagaaggcaatgccttgttcaaggctggtaaatatgaaagagcctcaaaaacatataagaaggtatattacagttaactagatacatatttttctacaaactcctttaatcatgccctaattataacactttttcggttaacaggctgtgagtatcgtcgaatatatatgattcttccttcagtgatgaagagaagcaacaagcaaaggtgctgaaaatcacatgtaatcttaacaatgcagcctgtaaactaaaactcaaagattataagcaagcagatctaccacaagactgaggacgagcttgaagaactcgacgttgatcgattcctctcgaagattgaaggttctgtttttaattttcttttttaaaaattgaaatagtttttatggaaagttttcatctttctcagatttagctactgtttggattagcagaatttgttctagctacgtttccaatgaaagaaggaagtcatagttctgcgcttggtaacttttggtttcgccattgccaccgagagacggagaagcgttgtaagcctattcttcttctcctttatctttttttcaaatctttctctacttcgtttgtttatgtggtgagaaatggaaattggtgttcttgtgttcgtttgtgattttatcttgcttttgagttgttgctgtgctctgtattaggaagttgatctgtctaaacaatggttttgaagtttaacttgttgtgttaatggagtagtgagattattacgaggtttgattaagctctaattttgaagttgcattaagttagtgtacttatatgtatatttaatttgaaatagagtattagaatttaatcgaattcctgcaaatatactactatgattttgaaattcagagaatattcatgtttccttttctagattgtagtatttaattgaaatattcaggaaaagatgctgtagtatgtgagatgttttatactagtatatacgttattatcataaacttaccatattattttatggaatggagtatggactatacaacaccatcaatctttatgtatcaattttttaggaatacgagaaacagaggcattgatctctatagtacttggtttgtgtcggtgacgtttggttaagactctaattgacaattgtttcgtcaatttcatctcattttgctttattttctactgatggtgtaattaaaccattcgattgactgcttattgaaatttatgacaacaactagaggagggattagttaaaattaaactgcgtattagtcttgtttatttatgttgtacattcaaacgttacatcaccttgttttttaaatatattaatattaggatagaaatatcatatgatgtgttacatgttcgattatttaagtaatttagatatattgctaataaattaatatattgcacgttcaaactttaccaatatgtgaatgaagtaattttgactaaaaataattattaattgacaacaccgtgttctgatgaacataaattttaacgaggggagatcaattgggaagttctagttcttgcttctgtgatggacttttagttaattttataacttaattagagcttcatcaatatagtagttatcgatcctagagagaatattatgaagaaagtactgccttgctctagcaatatatatacatatatatatattagcaaatatttgaaatcagaagttgctggcaacactaggtatagttttatgttccctcattttcaggacttcttatattatataggtgttttactgtgtttgtattttttattgttattctccttgtacaaaataaagatttagtaaaagaattcatttgtgttatgctaattctgacagtgtccgcagttttctttgtgcttgctacagtttcacattcaacttcaagatgaggttactttcataattgtggagatggtggtttttgaggaaatatttatgattgagattgactttcctcccaaagctgaccattgaggtataattttatcattttatgctcatatttactttagaagttaatcatgaagaagttttgatattataatttatttgaacttaagtattatttcataaattttttattggtcaaacaaacagtaaaaaatataatatgattacctttgtcatgaacagaaaaatatatatctaatacataaacgcatacgacaaacctttgtattcttgagtcctccaatcaaaccttgcttttgtccgatcaaaattatactaaataatgatcgcaaatgtaggacaatcaaaatttcaaaaattaaaaaaaatttctgaagacatttgtatagataattaacatatattaaatttggagtgttggatctccaagaattgggtgtaaagaaaacaccatcaagcaaattttgattttagattgatatagctagaaaatacacagtagtgaatctactaattatgatgtgagaaattagtgagttagaagtacatataagtgtagtaaaagggatttgaaatcttaccgttgctgtaaggaaaatggaaagtgattcctctgattaagagataaaagaggtagtagtgatgatgatagtgaaaatgtctcttaggtgagtgttaatgatagaggtcaatgaggctaactgaagaagaataaggaaggatctcaaggagaatttgatgattagtttgggacgtttagatatgcagatcatcaaaaaatgataacatttaatagtaaaaatagtttttaataaagttatatatattttgcaattttttaacttactgcacgttatgtagctctaaaatagctgacttactgttttatagcctaattattgttatataatatggctgctcgatgttatacagtatagctgagttactgttttatagctataatatagttgagttagtcagtcaaggaaggaattcaattgttgaattcaatcaaattaaaaaggataaattattgtatcaaactaatagtttttttttttggttaaaaaaataaattattgtttttttttttttttcataaaaacttaaataaaatgtcaataagatttgttccgtgtgtcaggtaaagcattgtgaaattcagcaattgttttgaaaaatattattggctttattgctctacttgctggacatggcttattaattagttttaaattacatgttaagagtagctgttgtagttgcaagtttttagaggtttgtttagagtttgctctcttgtgtctttgtaatggtgaaactctatttgcctaatcagttgttatgtttctctaaaaaaaatagttttaaataggtgaagtctatgaaaggaaacgttggtgataatgtagctgagaagagagtttatcttggaacattttttgtcagctcaatattgtaattccattaaagagattaataaagttttttaattattttattaaaaaatatttcgttttcaatagaaagtaaagaaaaagaaagagaagaaaagaaatgattcaagagaaattttcattgaatgaatggaacagtacaatatgtccctttatatatacatgacagtacaagaataatattagttacagacacaaactaacataacagaaaaactaactctgacatcacatcctaactaactcacccaattctgaaactccccctcaagatggagcaaagatgttttgcaatcccatcttgttttttaaatggttgaattgattagggaacaatgctttggtaaggatgtcagcaacttgttctttggaagtaacatgagctgtttttactaaaccagattgtatcttctctctaaccaagtgacaatcgatttcgatgtgcttggttctttaatgatacacaagattagctccaatgtgtattgcagcttgattgtaacaaaacagttctactctatcccaactcttttagaagagagatgagccatacaactctataaactgtagttgccatagccctgtattcggtctcagcaaaggatctagaaacagcgtgctgctttttgcttttccaggatatcaaggactttccaataaacacacaataccctgtagtagatctccttgaatcttggcatgctccccagtcggcatcagtgtaagctctaagttgcacatctgtttctataggaaaaaataaccccaaaccaggacattctttgacatactgcaatatcctttcagcagctttcatatgaagggttctaggactattaagatattgacagagtaggaaagatctggcttagttattgtcaaatattgaagcttgctaatgatttttctgtagctttgagaattatccaggagttctactgaatcctgatgcagcttcaaatttggttccattggtgtagttacttgtttggatcctaattttccaaagtcttcaagaatttgaagagcatatggtctttgagaaatgaatattccttcattagtttttgcaacttcaatctccaaaaaaatatctcaaacttcctaagtcctttagcttaaatctgtcattaagtctgagagtgagagatcgaatggatgcaaggtcattacttgctatgatcacatcatcaccataaacaagtaatgccataaagtgattagaggaatgttgtatgaagagggaatggtctgttgcagaatgtgtaaaaccttcttcaagtaagacacttggaaatttggcaaaacattgccttgaagcttgttttaatccatactagaattttttgagtttacaaacaggattggcaggtagattctcccccttaggactatacccttgaggtaaagtcataaacacttcctcatgcaaatccccatgaaggaatgcattattgacatcaagttgttgaagatgccaattatgcattgctgcaagtgccaagatgagtttaacagaaaccaactttgcaacaagggaaaatgttttttataatcgatcccttcttgccaagtataccccttggccaccagtttggctttaaacctctcaactgttccatctgaatttaatttgattttatgaacctacttacaccctattggatgtttccctgcaggtaaagacacaatgatccatgtatggttctgttcaagggcaataatctcatgatccatagcttgcaaccatttaggataagctgctgcttgctgatatgtagtaggttcaaaaaggcttgaaacagcaagaacaaaggctttaaaagcaggagacaatttcttgtaagtgagagtattagaaatagggtgagatgtagatggtgtaggttgagaagtgctgggaacctgagctaaggagcaatggtaatcttgcaggtaggatgggggtttgataacttgagtggattgagtaacaggtgtagatgtggaggcatcagggtgagtcttgagagtgtttgacaccttgggtgaaccagaaggagggagacatgaatttgaaaaaaaaaaaaaattgatgggaaaaaggtacagaggtacctgaagtataagggaaaatagactcataaaaattgaacatccgtagacatgaacattcaattggtatgaaggtcaagcaacctgtatgccttcatactagtgagatatcctaaaaagacacaagcaatggctctaggagaaatttttttttctatgactagggagtgtggaagcataggttgaacaaccaaattcttttaaatgagagtaggtgggggtttgattatgcaacatttcaaaaggagatttatgttgcaagttgggggagggagtcctattaataagataggcagcaatgcctacacaatggttccaataacataggggaatatgggactggaaaagtaaagcccgagttacattaaataggtgttggtgctttctttcaataactgaattttgttgaggatgctcaacacaggagtggaaatgttggatgcctagagagttaaaaagggtggggaattgtaactctttggcattatcaaatctgaggcttttcacttgagtattaaactaagtcttaactagatttagaaagttaggaatggcttcttgagcctcagatttttgtttgagaaaatacacccatgtatatctagagtggtcatcaacaatggtcaaaaaatacttaaaaccttcagttgttatagtattatagggcccccatatatcaatatgtatgagatcaaaaacagtgatctgaaaaattgttattggaaataataggcaatcttttttgtttggcaagatgacaaatttggcaatgaaaatcatcagaatgtgaatgatcaaaaatcaattctttattcaatgaatgttgttttatacaagcagaatggcctaatctatagtgccatatgttttcaacatgaggtttaaaatcaaaaaaattacaatttgagacaaaagaacttgaaggaatgtcaaggtaaaaaaggttgcctactcgatcacccctcccaatctgagtatgttggatagtctcttgaatgacacaggaattagcagaaaataagaaggtgcatgacatggatttcattaaagaactgacagataaaagattagtgttgaatgcagggatatagaggacatttgaaagagttaaggtaggagtaataatgacagaaccaatgcaagacacagatgctacttggccatttgggagatgaattggtgtcaaagaagggttaggaaaagtttgagagaataaagctaagtcatgacaaacatgatgagttgccccaatgttaataatccatttagaatgagatttaagagaattcatactagagaagtgagacaccagaggtggttgagtggtttttggtgtagagccattggtagaattttcttgaattcgatttgcaagcaattagattatgggttggcattgagcagtggtgagaccagcagtcatggcagagttaaaacccttgttattaagggtgttcattggatcacatccaatgtttttaggcctatccaaatctgatccaatcatatattagatgttagattttatcatccgatccgatccaattgatttccatcatccaattaatccaacatccattggatcggttctatccattggatatattttatgtatattatttgtttaatttctccattggatgtatttcatatatattatttgtttaatttgggttcatccaatattttagacctagtattttttggatcggatcgaagccatccaatattttaggtccagtacgtattggattgcactggatttatctaatccaagaataaaagagtaaaattttaatnttaattttcatatatacatataaatttgacgaataacaatataaaatctaattactcatccaaactaaaagaaaatactatttagttagattggatgttggatgtattagatttttaaacaccccattcaccatccgattcaatccaattgatatttaaaaataacattcaatccgatctgatcacaattgtatatcctttgacggtcagttgtaattgaatcggtcggttcttattggattggatcgatttatgcacaccccacttgttatctccactgttgtcaacagaggcctcaattgaatttgcagtaggttttgagacttgaggttttcctctcccatggaatttgtgacctggagggtagccatgaatcttgtaacacttagcaatggtatgtttagtcatcccacaatgagtacaaacaaccttagatttgccaaattgagaactcccatccaactgtcttaaaactttggccagattcattgttctcagttggggtattgtttaattctctttgtctttcttcttggattagagtagcatacactttgtttatgctagatataggatcttgcatcaagatttgggatatggcagtagaatatgattcatttagtccaaccaagaactctaacacacgatcttgttcctggtaggcttgtatagtcttcattgccccacatgtacaaataggtagaggtcgaaaatcacaaatcatgtcctggagagcccttaatttcgtgaaataaccctgaatgttggcactgccttgaacaagaacttgtagagccctcttgacctcaaacacccgaggtccattattttgctaaaaacgttcatgaagttctgcccagatggttgcagcattatccatatacattatgctgtctccaatatcagaagaaacagcatgaaaaatccaagaaatgactaagctgttacatcgactccatgcatcgtaatctttgtggtcaggagctggttcaggaagctgtccattgatgaacttcatcttatttctgggaagaagagcaacactcatggcgtgcttccaagaattgtaattttctcttcctgtcaagatcatgggaacaaggcttgcactcagatgattgctattactcaagtaataaggattccgagcttcatccttgtatccacgagaaacctgatcttgaacatgaatctgattgttgccatggccaagctcatcacttgaatgttgaccttcttctataactccttcactttgtgtttggaccatggcgtgatgtgagaaacagaaaaacagagtagaaaaatgcagaagaagaagccttacggctctgacctgatctagtaattcattaacttaaaaaaaaattaaatttagactcagttcataaatccctaaattgaatatttgaacttcgaagaagcccctttccctcgtctgtcgtctccttcctcaaatacagtgcaagtgaaacattgtattcagctcaaaaacttgtttccctgagaaacccatttcatggaatccagcaaagtcgaggatttccttgctgggtattaacgagaagagaacagggttttcgagatcaagattgggtcttcatctaggtttcgttcttccgttattcgaaacactaaatggagtagaaaaggtaaggtacaatttaacttctgttgataaactaaaatgggtattaagtttagaactatcagaagttttaaattacagcgtaataaatcttcttcctcttttgaacatatatatatatgtagctgaagatgaagagaacaaactatggttggtttcagtgttagttaatcatcattatcacctcaaaactccatagctcaaaatgccactactgccccatctgaaggtgcggttcattcatctttcttaaaatcagcatattttaaatttgggtttgtatttaattctcttaatttctggtgcaagttataaacccattaccaatttttttttttttatgaagttaggtaattaagagagtttatcttcaagtgtatgatcaccataatcactatttaatatttatacatatattatcctaaacaataggaatagaaaatgtacggatattatcaacccattctttgtagaaaaaacggcatttgcatacaattttttcttcatatttagtgtttaattattaattctctattttatcatatatatatatgtatatataaagagtgagctattttagtttgacttggctttctttcaccacaatctaactataataggttgaggaccactcacttatgagttataactattactactcgtatatatatatatttacatataaagaaaaacccaattaagctatttttattttcaatgtagtttattaatataatatttaatgcaactatgattgtactctctattgaatgtgaatgttgaagttcataggatatcaagaaaatagatactatatctctttaattactaggaattatgtgtacctgatgagaacctcttccatgggattccaatacaacagtagcaaaccagtaaaataactaagaaaatcaaccacagagttaacgattctatttgtcttatgtcccttttgttatttattttgttgtcttgtcttgtgtccctctctcattgtaacaataacattatttaaattagcataaaattcatgctaaattggttttgttgacaggaatggaagaaattctaatttctaaaacaagttgataagttcttgaaccccaagattgcacctcaagagtttgtggatgagattaaggtacttttactatgatataacattcttttgtttaaaaatttgcagatattaaatccataatatatatttaaattgatgttcaaaatgttctatttttcataatttaatagaagagtttgaatatctcatatattcatctatagagaagtaggatttgtgaaatttatgtgctgcagtgatataaggatggaaacttgtgtattatccgattgtttgcgattgaaattgacagatggttaggttaataaaaatagggaaaacgctgtccgatttttttaaaatatatttatcatattttctaagtagcgtgcattgatagacatgagaatataatgttattgtaggttgattaaagaataatgtctggtcaaatcggttctaattttgaggataatattgattttgtgccatcaactaatattgaagaaagacaatctgttagtaatacattagatgaaaatcagaatacagggagaaaaagaacttctcgtgcatgagatcattttactcctatgaaattgatggtaaaattaaagaggtttgcaatcactacgggcgttagttggtgggagaaagttctcagggactacgcatttaaatgctcacgtaaagaggtgtccagtcataaaagcccaacttgctgttaatcctactacaagcctttcaattcctttcaattttgagcctgatttagaaaggatcaaattggctcaaatgatctttaatcatgaatatccattgttcatggttcagcatagcaggtttatagaatattcaagtattttgtgtcccatgtttcaaatggtgtcaaggaatacaattaggtctgacatcatgaaaatgtataaaattgagaaagagaaatataggcaaagtctggaaaaaagtaggagcaaaatagccataaccagtgacatgtggactgcaaattatcagaagagaggatatatgactgtaacagctcattttattgatgatgcttggaatttgcacagtaagattctgagttttaagtatgttgcatgtccttacaatgctctagcactacttgaggcactaagatcttgtcttaatgaatgaaaaatataagacaagatcagtacagtgacactcgataattgtagtgcaaatgatgcgatgcttgaactttttaaaggacaagttgatcctgatagttttattttgaagggaaagttgctacatgtcgttgtttgtgctcatattttaaatttaattgccaaaaatagcttatttgtcattaattatagtgttgacaaaatttgagacagtgttgcttattggtcggacacaccaaaaagacatgataaatttaaggacactgctcgctaacttggagtaccatacaccaaaaaaatatcacttgattgtgtaataaggtggaattttacttttttgatgcttagcacaactttatcgtacaagacaatatttgaacgtgcaaggctacgtgagttgagattgaagtgtgccccttcagaaattgattggcaaaatgctcaacaattatgtgataagttagaggtgtttcatgaagtgaaagagttattttctgaaatttagtatcttaccgctaatatttttttcccaaaaatatgtgaaattaagactaacattgacttatagatgtcatcatatgtgctttttattaaggtcatgacaactcaaatgatgtctaagtttcaaaaatattgggaaaagatttacgagtttatgtgtgtagcggttgttttagacctgaggcacaagtttatgttgcttgaatattattttcctgtaatctatgaaaatgagcaatatgtaactgaaattccaaatgtttgtgagttttgttgtaagttattggaagagtacgggtttaagtttcgtcatttgagagagaagagttcaagtagaaaatgtatcatcttttctgacacggcgaatggatgccctttctaactttgacagatttgttagagcttcctatcgagtagaaaatgtgtagtctgaactagatttatatttagaggagaacttggtacctaggactgaagagtcctcaaatatcttttgttgagtatgatttttaaggatgtatttgatgtgcctgttaacactgttgctccagaatctatattcagcactggtggtagacacgtgagtcctcatcgatcgagatttcatccttctacattaaaagcattagtgtgcactggtggtagatatatggatgttgaccctttacgtggcaacatctaataatttgtttttttatttgtttttttttttattttttttatttaaaaaaaaagtcacccaataatttcttataaactaagaattctgttgtatagccacattttatatagaatagatatataaatatttatttaatgatttttacctttttttgtcagtcatcaaccaattctgtatgaacactaatgtttctaatgtagaatgatgaagtctcgatcgataaggactcacgtgtctaccaccagtgctaaatgtagattttgaagcaacagtgctaaatgtagattttgaagcaacagtgctaatagacacatcaaatacatccttggcaatcatactcaacaaagggtatttgaggactcttcagtcctaggtactaagttctccttcaaatataaatctagttcaaacttcacattttctactccataggaagctctaacaaatttatcaaagttagaaagggcatccgttcgccgtgtcgaagaagatacattttctacctgaactcttctctctctcaaatgaggaaacttagacctgtactcttccattaactcgcaacaaagctcacaaaccttcgcaatttcagttacatattgctcatctccatagattatagggaaataatatttgagcaacataaatttgtacatcgggtctaaaacaaccgccacacacataagcccattaatctttccccaatattttaaacttagacatcatttgaattgttatgtccttaataaaaggcacatctgatgacatccacgagtcaatgtttgtcttaatttcacatattttttggaaaaaaaatattagcggtaggatactttgttccagaaaataactctgtcacttcatgaagtacctctaacttatcacataattgttgagcattttgccaatcaattaccgaaatggcacacctcaatctcaactcacgtagccttacacgttcaaatactgtcttgtacgataaaattgtgctaatcatcaaaaaagtagaattccaccttgttacacaatcaagtgatatttttttggtgtatggtactccaagttgacgagcagtgtactcaaatttttcacgtctttttggtgtgtctgactaataagcaacactgtcttgaattttgtcaatactatcaccaatgacagataagccatccttgacaattagatttaaaatatgtgcacaacaatacatatgtaacaactttcccttcaaaataaaactgtcaggctcaaattgtccttttaaaagttcaatcatggtatcatttgcactacaattatcgagagtcactgtactgatcttgtcttcaattttccattcattaatactagatcttagtgcctcaagtagtgctgaagcatcgcgaggacatggaacatacttaaaattcagaatttaactgtgaaaattccaagaatattcaataaaatgagctgttacagccatatatcatctcttctgatgatttgtagtccatatgtcactggttatgactattctgctcctactttttttagactttgcctacatttctctttctcagttttatacattttcatgatgtcatatctaatcgtattttttgacaccatttaaaacatgggaaacaaagtacttgaatattttataaatccactatgctcaattatggacaatggatattcatgcttaacgatcatttgagccgatttgatctttcttaaatcaaggtcaaaattgaaaggaactgaagggcttgtagtaggattagcggcaagttgggcttttatgactggacacctctctacgtgagcatttaaatgcgcagtccctaagaactttctcccaccaacttatgcccgcagtgattggaaaccgctttaattgtatcatcaatttcatgacgagtaaaatgatcccatgcacgagaagttctttttctccctgtattctgattttcatctaatgtataactaacaaattgtctttcttcaatattagctgatggcacaaaatcaatgtcatcctcaaaattagaaccgatttaactagacattattcttcaattaacctacaataacataatattttcatgtccatcaatggacacaattatttagaaaatatgataaatatatttaaataaatcggacagtattttccctagtttattaacctaaccatctgtcaattttaatcgcaaacaataagataatacacaagttttcatccttatatcaccgtaacacataaatttcatagatcctacttctttatgatgaatatataagatattcaaactcttctattaaattataagaaatacaacattttgaacatcaatttaaaaatatatatatggatttaatatctacaagtttttaaacaaaagaatgttatatcatagttcagcacttcataactcaagtcctgctttaggtccattgtttcatagttcagcacgtgtgatggatacgacacgtattttcgtaacataaaaatatggaacacattatgcatttgagctaatactggtggcagtgccagtcgataagctacctgtcccactctctccaatatctcgaaatgacctatacatcttggacttagctttcctcgctttccaaaacgcataacccctttcataggtgacactcgaaggaacactttatcacccactgcaaattccacattccgtctctttgcgtcggcataactttt

SEQ ID NO: 14979 - DNA, 4064 bp, Cannabis sativa
aaaaaaaaatatgtaaataatttatataaacaaatttaaattcaaaatatttaaaatatttttaaccttgtttctaactttattattatttattttatattttaaattcaaatgatggtaataaagaattgattactttttagttatggtaaactcattcaaaacaccatatttttcataaagtttgagaataaaaaaattttatattaaatttacgaattcagactatatatagatcaaatttggttatgtgagttttggttaagaatataaaatattacaatatatgcattatcgaatacgttacctaattaaaaaaatttaaaaatacatatatataattacatttaaataacacaccaatgtagcaatagctaaaaaaaatttcttaaagatcaaaatttaaaacttcatttcaaaaattaaaaaaaaaataaatacattacctattttaaaaaaaaaatgcattacctaatgataaaataaaaaatattacaaataaattaaaattataatttataataatttttttttattattatatacttttttataaattgtatgcacatttaatatttttaacaaaaaataacattatttattaaataatataaaaaagacaaattaagtgtacaactaaaaatatacataattaaaataaaatttaaaaatataataaatatacgcctttaatggttaaatactatttttagactctatgttttgcaaaaattgtcaagtggaccttctgttttattaaatgataaaataaaccatgtatttttcaaaatagtacaaataggactctgaactgattttttttcaaaataaaattttataataattcgaatgaaaagtgttatgataaaactgtttaattgtcttcaagttttgtatattaataaaaaagttatcaaaaattaagctcaaggtcttatttttactattttaaaaaatacaagatctattttattacttaacaaaatttagatccaaaataacctttataaaatatagaatctaaagtaatatttaccggccagtaatttcacgtgatataacactattttatatgtatacatatatatttgacctttacattcatttgtcatttataaaattaaaaaaatatatatgtgttgatatttcaaattgtggtgatcatataaacttatttgactgaacttttttaaaagagtccaattgtttggaagttgtgatcatatgtacaacttgtttgacctattgcctttttttttgacaatattttattacctagtggaaaacatgataataataataatttattaccatgcataacaatttgtcattaccagttgcaaatataaaagggaaaaactatgacgtaaagattttatctcttatacaataactaattagataaaagcttaattagtcaacattctaaaacatcggttttgaaatttaaaaataaacatttatatctgaatatattatctaaacaagtgcacaaattaaggaaaacgaaaaaaaaaaatacagaattatttcttttcaaaattgtaatttctacttcctaaaaaaaatgataatttctactttgtaaatgattttaccacccaaaaaaaataaacataaataaataacaatacttttttcttttataattagtatcaattgcaaactctaataaagtccaaaattttaattaaaaataataatttcaaaatatggtaaggtggggttgtgtagaaaaatatagaaagaaacaatcaatgaaaaatagcataatagaatagacataggggaaagtaagtatttaagaagtatttaagaagtagcgttatgcgttaaatcaatctttaaataataaaattgaattatgacacattttttgtcttgcatttgcatgtggtgccatctcatcaacactatattggctacaccttgcgttggaatcacttccacgtagtactcctagataattgcctcatataccactcttttccttcaatttacaatgggcctctaactccattgttattatataaagccttattgcaccaatacataataactaccaccatcttcttcttcttttccaccttactattggtaagatagagaacatataacattttcttatataatggagcaaaaggtagcggcgcatgttattggcgtactagaagacgacttaaagatggagttagatagtagtcgtattcattattggaataatattatgatgaataacactactattaattctagtgagaatgtaattattaatcatgatgttgagaatagcagtaatatgatttatccaaactctctcttgagcaaacgccaaatgagatccctcactgcagtttgcgacacattgttgccatccatcgacgcttccgaccacaccaccgacgacgctgtactcaaattctacgccacctccgcttcaatggaccaaactccacaacacgtacgtatatatattatataagctttttctttctactttctctcgtacaattactagatggtgaggtacaacattttacttacatattttatgtatttattatatctgtgcagataggtgggctgattagccaaaaattgaaacacccaaaggtgtggctgctgaaaatggcattgtgggcgctgtctacatggtacggaacgctcatcctctgcggaacagccagcctttcctcctctttcccgtactttcaaacctttcctaacctctctctccagaaacgcctccagattctggaatcatggtctcgcagttacttttttcttcttcgtcttctcttcaaggtcctcaagattctcactctcctcgtctttttcacccaggtatcttcgtattattattattattattattattattattatgttgacaatatatagatagataattaaattactaaaaagaggatacgtacagattggcataaaatgtattttgagattatataattaataaaactaatataaaattagtgtgttatcatagtgttttcgtgatgatttgattggtagatcatgtagtatataaatgtatccgtgttattaattttgatatttgcttaaagattttgttcaataaactacatataattaaatttatagcaatcttgttagttgggaagtaggtaatatatgatgtagagccacttgtctcacacttattaattaattttaaaaatttaatgaggcctgagtattatatattacatattaaattattgatcatgcattatataaattttgttagtctgattatcatctgtatatgcatacatgcagattaattgaaccagctatagttccaaatattatcaacacaatttgaacttcaaactatcacactaactatgactacaccatacattaaattcaagaatattctttttcatcaatcatattcatttgcaaaccgtagtagtccttaattttaattgttgtataacttatattttcccaccagcatgacatagacacacacatcttctttaaatttccatggcccgtaatcgagtaatgacactaatttaattgtcaccaaacacaagtagctagctgattggcagatcagtaaatgtggcattcattaatcaaatttattattatctatgttttgattattactaaatctaaatgtagtatatatactattaagtttttatgtgcctgatgatactattaatatatgaaattgatcacattaataactttcagttggatgagaaaacaagcgacaacatttcatggaaagcaattggctacactggacccgattctagtacaactactgatcatgaccaaaaacaacaatcggaggaacactcagaagactcagaacaacacttcgggcctctttacagcggaattgtaaatctcaacaatccggaaagcatatctaatctaaggatcttcggatttccatcccaatcacgtccaagacccgccacaacaacctcactcaacaatcctttcctaaccattaaatgcgatgtggtcgtggttggttccggttctggaggaggtgtggtggcgggcgcccttgctat

SEQ ID NO: 14980 - DNA, 15659 bp, Cannabis sativa
  modified_base (222)..(224): a, c, t, g, unknown or other
  modified_base (5722)..(5725): a, c, t, g, unknown or other
  modified_base (9408)..(9408): a, c, t, g, unknown or other
gtctggtttggtttctaatattgaaaaaactgttatactagtttggttcaaaacttataaaaattcggaccaaaccaattcgtgaacacccctaatagaattacttgccaattttcgtaggattaattagaatttttgtcctgcaaatttccacatgtactaaattatgctcttgaattttcaagaccgttaaaaattctctctaaactattgagattgttnnntttaaagacttttgtctaattttactaagaaaaatctaacataaatgaaagttcaagagacatgatttgacacatattaaaagttcgaaagacatgatttaatagatattaaaatttagaaaacatgatttaattcatagacaattaccaaattaataaaattaagtgaaattagataaaacttcttaaatctaataatcttaatagttcagaaaaaaattttaacaattaaaaaagttcaaaatatataatttggtacatatcaaaataagagacagacatcctaattagcattttcttatttacagactttactactcctttttgcccattaatctatagtgtcatacatcaatcaaataaattataagccaacatacgtaagaggctaagagcagatactacaaaattgtgaagaaaaaaaagaaattataacaacaaaagggattgaatgttcctttgtttcttcattggaatttaatgagtaagaagattacaaagagtgcaagtcattttcaagcaaatgaaagataaaagtataagtaatcccgttccattcccctagtgaatggttatcccactccagaaatcaggccaacttcgcaaagcacataaatatgccttggtcataaggaaaggctgtatttggttacccatctctcttcctatcttgcacccttaaatgcatactccatttctagtactataatgtaattttctgtactgcacccactcccccaccccacctaactaaaaaaagctcagaaaatatacacacaatacgcgtcctgtgatggcaaccgagaaatagaaatgtgctgccacccctgcttgcccttggggtatgatctttacgacgagaatcgttttgcactattagataccccccttattactacctcattgtcaaagagttgttcacaatggggagttcttttcgacacaagcaatccggcaaagggtttacatagaaagcttcttctgaacgaaacctgtccatgccctttgttcctgagatggggcctttccttttccgtggggagccttgcctgtgaagccaacagaagtgaaaaatcgtgaaaattggcactatgagatggataatgttctttcacagtataaatagtagtagcaatctgttcttgtatgcggaatacttaataacataccgtcttctatggatttcaatgattcgacttgataagtttttaccttctctcatcgttccctgctcaagcttgtcgaacaggcgaacaagagatttcctgataaacaacaaaaggatatctacttgttaatttataactaaaatacgaaaaccaacttaaatccacgcatccaaatgtgtgtatatataaatatatatcttgcctgtcaggggatattgttttcctgtgtccaagataacgtcgatgaccttcaacagccctagccatgtttcccgagtatgaaggaataaatacatcactttcaactgagactatgtaatcaagagcagccatctgagatgcgtgatttatgaaaggctcaagctcttcaacagatgccaatttttcctacaatatgatcaaaggagatgaatcatcagcacacttattttacgttttggtgtgaaataaagggagcaagtgaagttattgatgtgtctacaaagtaatgggatccaaagctggtcttgaacgttctttctctgaagttagttttgaacattcttcatcttatgttgccttctctccatgtaaaatatgcgtatgcattattacatttacagaaagatttagtagtatgacggttgcaagccagcactctgctgtggttctatctaatcaattagcatatttggtagcataaaataaacaaatttcatataggcttgaagaaatagtaatcatgttaaactcaattcaattcccaaaatgtgataatcccatagcagcttagcaatgtttctagaattaaaaagcaaagacaagcacaaacagatttatatgtctctaccttgctcattatcaagggatagcgagactgcagatcagccatgcgggaatcacctccataaatctctccagctgcaatgtatataggagtggtcgaagggtatccaagagctgtaagaagtatcccaacctcctttggtgttaaggggcagaagcctttggatctctgttctctggaatcaatttccttaactttccaatatggagtgttctctctaaatatataaaagacaaatgtcaggcataatttgtgctgactatttcctgaaatatatccacacatcacacataagcataagatacctgatcaccctaagttcatcagcttcatcttgagacaaatcatgagtacatccactaaaggcaagcatatctttctcatatcgtaagtgaagtgcaatgtaaggaccatatgatcgcatccgatccactaacaactgtaatattgagaaaagaacgaagttttaaatgtactgctctgttaacaagaatgctgaaaatactctaaaattgaataagcagcgagttgaaatatttacttttcccatggcttcaatttgaggtgcgaagcgcagagcttcataacaggcacggcatcgcagcttctgtatatctgagggcagatggttatttgctaagcgggaatcagacttggcagcacggataacctttggaggaaaaaagtattcatcagcataattgaactaaactaaggtgtttaaaggcatgcatcaaccagaagcacttcaaagggcatacttcgtattcttcccacatgctagctatctcctcctcatagtactccattccagaccagcttctaaagtgctttactgctcttgtagcatttgccagatctttgggaagcttttttatgacttttacatcaatagcaagagcttcaataaaatgatcttcatcaaaaacatctgaaaaattgctgcagatcaaatgatcaacggaggagctcaacatcagtttgtgagatagaagagaagtataaacgaggaggaatcatttaaatacaatattacctagaatcttgccaaaatgatcttttatcaagttctggaattacaagagtggcgtttataatccgggctacagcaaccatgtcacatatctgcaatgcaagaatcgcaagcttttcatctcaatacaacaaatgccacgaattgacatattaagaaacatacagcaacatcatactcttaataattgggcatacatgaaaagatgcacttgtataaaattgtcaaattgccgcaatgaaatcactttatgtgactagacctacatatgaatcattcgcaaagctgatctaatcaattctaaggaacaccctatttacataaccccttcctgtggggagaatattttatcaatatattcctcatgcgtcatcatattcattaatgacagtcactagaaaaaaatgcattcaattaataagaaatgaatgaaaaatcacttcagttgactaaaatttccccccatataatgctccagttggttgctttgaaaggggataaaaagtaaataataactcggaattccatgcataacatacaaaagaaaactagtggttttacataccccagcacgcatctgattgagcccaccattggtatgaactagaaggtaacctcgagacccggcaggggctgatacaacatcaaagataattaatacaattcacatatctgaatagaaaaataataccattatgttccttacgtgtataattaagacttgggtttgcacatggcacgaaatctcgattggatggaggtttccatagcttttccatttccaaaattccactcgcttcatccaactgtcacgtctaaaggagtgaaaatgggaaaaaaatgcatgatttgttcgcattattacaaaagaagggtagttataaatacgaatacccttctcttctttttaatcaaaattttcccttcttattatggaagtctctcctactaaagattaccctttattttatttttcaaaaattcacaaaatttaaccttccatattcatttttacaataaattaactcaaacccaaaaagcatagtactgaatagaaaccttgcgagaagggagaggagatttggaatggggaggagccagctcttgagtccagctccgctcggcgctcaacttctggtatttattttcacgtttctatccaattagatagatcagtaaacaaacaaacaaatctcaatagaaaattttaaaattaaaaaacatactattaccaaaaccacaaacaagtaaaaattcccaatttttctaataaagggttgtccaaatacggtgattgatagtcaagtgaataatataaaaagcaaacacacctaatcccataaacatgaaaattgtgaacgtttgaacgcatcaagacaaaccaaaaacatgtattgactcattcttttatcattcatatatagaaatattatattaaaaaagaaatctaacttgaagatttatcaaagaagttgatgggagataaagaaaagccctaataatcatcaggaaacgaaaacccagtaaaaaaaattaaagaaaaaaaaaagttgggggatcagtgatcaccgtggggagcttgaaagggtcagagaacttgggaaccttagaagaagggaaggcgggaacatggactgagaagagagccaccaatgctattgaacatatggcgcacgttagcaccttcctcagcaccaccaatgctctccaccttttcttctgcatctcgttctctctctaaaaacacttgagaatacccatttgcgaatctaaacgctacaaaaatcacagatgcaagctccttcctttctttcttttctctctctatatctatctctatttttctctgtggggagaccgaagcggtcggcagtttgggttttaacaattcttctccttctggtatcttttgccgctttgcgttagaaaaagggtagtagctatacaagaatatatatatatatagagagagagagagagaatggtagataattactaaattaattaagtttttatttttaatttttcttttgtctaagaaaatattaataattgaagttgaagaatttttttggtaaggaaagttcaagaatttgagtttattacataaaacttattataaccgtattaagatcctgaggtgggggccacaacaaactgtatatataatatatgaatttattacgagttattaagcagtggtgccagaaaaccaaattagatgagattcaatatttattttaaccaatagcaatattaacacaaaaaaaacactagatactgttaatggcttttaacaattttcttttattctttattagtaaaaatttaaatagataaaattaagagtactaattacaacctcctattataattttttagtcaattttcacgttcgaaatcacatgtcggaatattttttttcatagcaatattctttataattacaatatcatccctgtaaattttnnnnaaatttcaaatagtttacagtgccgaaaatagagttcctgatatttcaatttaccacgcgtgttcaaaaaacttcaaacatattttcgacgctgtaaactatttgaaaattttcaaaaatttacagggatgttgttgtaaatataatgaacaccaccgtgaaaaagaaattgaaaaaaaatatttcagcatgtgtttttgaatgtagaagttgactaaaagattgtaatatgatgttgacggtagcacctctctaaaattaagagggtttatatatattaaaaataaaaagaaagaatccctttacatacaaaaatttattgttacttaattttgggtgctcaataatgttaatgacagaccctgaagcctttaaagctaccaactaccaagtccccatcaaaagtttttctagatctacattaagctgtgccaattcaacctcaatattatcaataaattgcacttcaaaaaagaaacaaaaaacacaagaagaactgggcgattcgtttcaaattcacatcaggttacttaagatatgaagaagatattcttacaaaatatatatggaattaaattttatatataagataaatgggttattcattctattattaataaaattttatgcatcttaattgcacattaatcttaaattttaacacgatatcaaagttaaattaaactttaatgagtattagatccaaatttaataacaggccaaaaaaatgagttaaaagaggctcttgtaatttgttgtgagcacaaatgtcgatttaaaaatatgaatcaattaatagtgtgtttggtaacacttttttaattaatattttttttttttaattagaagaataaaaatatttttccaaaaacataatttataaaattattttcactttttgatttttaattgagaattgaaatcttaaaaattttgaaaattaaaaaaaaaattacttttacaatttttttcttaattattattttagattctaattgcaatttggattttggcacccagacttcagtctcagtttcagttcagacctgaatccgacttaaataaaattaaaaaatgaaaaataaaaataaaaattatagaataagtttgaaaatataaattttatttttatttttgtaattaaaaaattaaaaaataaaaatattatcaaatgttaccatttttgaaataaaatcctgtacatcttaattacaccttaatcgtaaattctaacaaatattgaaatagaaattgtaaaaattgatgaacaccaaatgtcatgtagatggagttttatttaattaatatatatggtcggatttctgaatttacttaaccaaatctattgggggtatcaatatatatcccaaaaagaaaaatataagatttgactttattataaaagtgcaaaataatacttcattggatgtcagtccctctcccttgatttattacaaagttgcaccaaaacaatgaaagctgcttttattttatttttaatttatacagtgaaagctgttttctttaattaaaaagaaaataaatgttgtatttatatgcgtagggctagagattatagtacttagcagcactaaatatagtgtggatctcaagaaggttaatttatatatattcttgcattcatgggaagagaatggcatgcatgtgcttaagatttgcattttattatgtgataaggacaaatatgaaatgagaaatgctccaagtgcttaataatttcaaagatctgatagggtattaatgtaattaagtattaaattttttttatataatttaataaaataattactattataaaatattattattcaattacaagatatcatttttaggtgatgatactcgcaatacttatatttatatgaaatacattctctttttcactttcttttacttcattgattgttatttattttgtatgtaaatgttagagcactcctaacaacttctatattatatattttggaagaaaaaaaaattgatagcatcatgttttcgtctcaccaataggagtgtctttattttttatatttgaaaaaattaaattcaacttttttacagttttaattcccaccatcttatagaacttattattaccaagatacacattctcttagtttttaggtttgaattcttcaaactaaaatttatttgatgttatgtaaaatgaacacccagaattcaaaatccattcggaatctgaattctcaaaggtaacaagcaaaacaccacttgagtcataaacatcacccatcacagttgcatatccttcagatcttgaatcacccgacttcagcctttccagacacatccttgtgatatgccttgttttattataatgaaaacatttaacggtcttccgaccatcagactgtgatttcaatcttgatttttcttttgttcctttatggttttctctcttctcacttttgtctctcgtatacaatccatcatctttttcagagttctttaattcacatttttgattcagctcttttgaatttaaagttgattgaatatcatcgagtgtaattgactatcttttgtacaatattgtatctttgaaaatgttcaaataacttcagtaaagaactgagtaacaataatgcttgatcttcgtcttcaatagtaaccctaatcaatctgtaaaacatgctcttattctatgattctacttagaaaattagggatagatatgcaaagtcagtacagattctttattagaacagattacgtatatagtgatatggtgtgctaatatgtatgtcaaggaaataattcaactctgtggtgctccaaaattatttgtctcaagttgagatctaaagtttacatccaaatgtcaagggagttgcaataagtaatgagcaccaaaatagattgcagtatagtttttcatcctcagactgatagtcgttctgagagaattactcatatatctgagaatatgctacgagcatgtgttatggagtttgaggattcctggagtaagtatctctcctgattgagtcttcatataataaaaattattattagagtaccattggtatgtttctgtgcaaaatactttgcggaaaggatgtcgttcacccattcattggaatgaagtcggtgaacggaggaaccttggacctgatgcaatctaaggaacgagtgaggctataagaaagattcaggttcatatgtttattttatagagtgtacagactatgttgatccaaagtgtagagatattaaaattccaagttgaaaattttatccttcttcaggtatttttaatgaaggaaacttgaaaattgagaaggaatgtaagttaagtcctagaagggaaggttaggtagcttatcagctagccatgctccctgccttacctggagttcataacttgtattttaatatctcaaaagtttgaggcagttacgattcgtataccgagttatgaaaatatggagtttcaaataaacttgtcatatgagaaacagttgatccaggttttgaacaagaaagagagaaggtactacgaaacaaagaatatatcgttagctaaagtgatgtaggtgaacaacaagattgaaaggtaacttgggaattaaagtcccagtagcggaaacagtatcccgagatgtttaaaaattttgaggacaaaatttctataaggaggngatagttgtaatatcccaaaaaaaatataatgatgatatttgattatatttttttattaaatatgtgattgtattaatgttggggtaagattatgatcttacttaagctaaatatgtgaaaattagtgtaatctaattaatgattaaatatagcgtaatttattaactatggatattttatcggattacgggggtatcgtggataccattttctgaaataaaatatttttgggtgtggtgaccgtgaaaactcgacggaatggtcagaaatgtcacgacgttaagagttgtgttgtattggatttataccggactagtttagaactttaagttaacggtttgacgagaatgagtagaaaagactaaattacccttagattttattttaggtttaagttttaaggaggggcaaaatggtcattttcttaaaatattagaattttgtcctttagtgctttttatgctgaactttaagtttaattaaataatatttatttatttattttattaagttttataaattaaggatagatgggaataccattcaaaaaaaaaaggatagatggaaataaataaataaaaaaaaaagtcaaaaaggaaacctctccttcttctcccttctctcgacagccctaggaaacaagtaaaaactagaaattttaactccatttctagcagaatttgattgaagtaatgaggtgaagaagctgagcaatttggaggtaagtcttctttctagttcatagtgatttaccatggtttggattaggttttgggtatgaactttgtgattttgggactgtagtgtcaaactgagtatggattgtgttattaggattgatttagaatttacttaagcttagattaaatgatttaagtggatgttgtgttaaaattggagaattgagctttgaacacaattttaagattctaacatggtgatttgtataattggatgaattattgtgaaagaatgctttgaacatgttatatttgtaatactatattgatctagagcaattgaataggtttggtttggtttttgtttgagttgggaggtaaaaacccaagaattgtatcctgtcagaaccggtcgaccggttggttctggtgcaacagaattggttgaccggttgtcttgcagggggaattttcggggttttcctcaagatcagttttggcttggggattgtacctagtacctaatttaggttatttgagtattatatggcttattttgaagctaatggaagttaggttggtccggttacgggaattagggttagttcccagagtttcgatttgaggtatttattggattttgttgtcatgacatagggcccgagatcgtcaagctttgtttccactcatgttggcctatacaccttattgttggactgaggtaagaaaagtgttatgcaccatttatcgttaacgattttaattgtgatagtctcgattatgatcgagattccgatatgtgtctgttgtgactcgattatgattgaggtaataatatggaatgattattatcgtttgtgactcgattatgatcgaggtaatgatatggaacaattattattgtttgtgactcgattataatcgagtaaaagatacagtcataaccgttatgagtaattactcgtcgaaactgcggataggtttcttacttatcgttgctttatcgggcaataatagtgacatacatagctcattgacacgagtggtaagggtgctttatgaagcactgagattatgtgattatggtaatgtgtgattaaagtgctttatgaagcactgaaattatgagtttatggtgatgtatgactagagtgctctatgaagcataggattatatggctatggattggatgaatatctatttagtaaaatgataaaattgttagttatgagttgctatgattattcttgtaatgtgtaatgaatgtatttggacagacgttaagttgtatatgcatactaaatatgtaatgacccactagtgtgtacattatgttgtaaatgctagcagtttctatgtttttctgtcttgtcgcttttcttgctgagtcattgtgactcacgggtgcttcatggtgcaggtatgaaaaatagcagttgtgttcggccatgagtcagagctctcccagcaatgtacatatcagttgtggtgtcttggcttccaggaagcaggatcaatcccttttctatgattgaaaatgtaacctacttttgtaataacgattttgtaattagttgtaaaagaattttattagcaagggattcccatattaaaactatattttgaataaaagttttattccaacttaatcaaaaagtttttaaccaaaccacactttttcctaaactaataaattagtagtaataaggttgtaaaagcacacacatggcgtccctgagagtcaggacgttacagatccaatagtttgttttctttaccctcaacatgccccaaaagattggttctcaggcattggagatcaaattgagataattaacgatctcataaaagttactacacctctaacaaatgttcatcagcacaaagtttgacctgccaagatgattctaatattttggcactggagatcgtatatatgtaattggagatcaattaggcgtagttggagatccaacagatgttcatcacatccaacaccaatagattcaagcaaagaacaccaccaaatttagaattgccaacaacaaaatcagaagatccatcattgctgccaatccattgttgtcaagaacaaagattcattggccaaatgccaatatcaataaggttccaagacaaagttcaatcagggtagtaacactaggatcttcttacacctctatgttctgttcttagttgaaaaattgtatctttttatatgccaataagtttctttaataatagtaaagaaatatgtgagtgtaaagatctacgaaaacagaatgaaatcttgttacaacaaaacacagatttgcagaagcaaaacataaatagaaataaatagtgcggaatttataaaaaacttgacacaagagaattatacgtagtatcggtgttctttcaaatactcctagtccacgggaccacacttagagaatagaattaattagtaaagtatcaaatattacaaaagcaattgacttaaacaaatttagacttcctttaataatttgtcgcaaccctttgtaatccacattgctaatctcatatctgaaacacaccaagtagtgaactcccttcagctagtgatgtgtgcttacttcctctcgaagtaaggcttaaacaaatcttctcccaaaaatatatgctcacttcctcccgaaatgagacttggaataatcttctcccgaagacccacacttgttcaaacaagtttttcaaccaattctatgaacaatataagaacaaaaaaaacactaaaacctagctgaacactctaagttttcacaaaagaaactctgtccttacgaagatgaaaatatgaaaaatgaaagtagaagaagtgagaatgtttggctgctctctaggtcctatttatagatcatagaaaccctagagacagccacaaatacattttcacagttgtacaaaagttttctaaattaattcctaatttgtagcaatacgattacatgaaagaaaaataaatgcaagataagaaatactcaaacttttataaaaaatagagaaccaagtgaaaagaattagacaatgcaaaccccaaagattttctacgagagtcaaagcgacttgaatctagggccttagtgaaaatatcagtcaattgtttttcagtaccaacatattttaactgaaatgtttgattgtcaataagttttctaataaaatgatgccttatatcaatgtgttttatacaagggtgttgaacaagatttttaaaaatatttatagcactagtattatcacaaacaaaatgacaagtgagggtataattatcaacagatctaaaaccttataaaatgcattgttgatcactgttaagaacaaaacaataatcattgtcaaattgataatacacccttgatcacaaatctgacttatgggtgaaaatcagtcggttattgtcggtttttacaattttataactgaccagtcggttacgatttttattttacgaaaaccataaccgaccgtttagaatttataaccgtataaaatcgaccgcacggtttttgacagtttttcagtttggcagttttggacagtttttggcggtttggggcagtttattgcggtttttggcggttttttggtttaaccatttttttatttctaaaaccgaaactgaccgccatgtcaaataaaccgaaactgaaatcgaccgccaaattcagtgatgacgtggaaccgaaaattcagttacgatctggtcggtttgatggtcggtttcggtttatcgatttttatgaacacccctaatctgactaatgttaagtaaagtagcttttagtccctcaacaagcatgatatttttcaaccttggtaatccttcaaaattaaaagttcctaaaccaatgatatttcctgctaaaccattgccaaatgtaaatcattgtcacctgtcatatgtctagaacaattactgtcaaaatattgcatttgaaaagcaacacttttatcaaaaaatccagtaagatattttcccttttcaatccatttttgtttcgaagcactatgtttctttggaaattttttcaaactaccaaaataatttgttttgaacgtattttgcatggtgaaaatatttaggcctaatatgccccttaattccaaaaagaaagtgataaattggaacaaacctccttacttgagatcttactctttttgaacttattggagactttgcttctgcagacaatgcatttgcagcagcagaccttgaatttgcaacatcaagtaattcgttggaacattagattttacaaattttatttttccaaaacatttagtgccatttgatccaagactaacgacgtctcttgacttgcattctaaactttctcaaaaattgaagatccagtgttaagcatttgaaccttttttttttaaaaaaaaaatcaagttctttttttaatagaatattttttttatcttttaaacaaaatacacttcatattctttgacaattgtttgtttattttaaatattgatttatttttaaaaataacctgtatccattttttatacataatctcgtaagattcagctaaaaaattttaaaaaatttcagattcatctgaaaaattttctttttcaataataattcaaacataataatctttatttctctagaatattaatccatcatgatcatccacaacaacaacaacacccaaaacgaaaagatattggcatatcaatatgttcattgcattaattgaagtaagcattttcctttgcagtacacgtaagcgtgcattcacaaaaaaaaaaatgaaaatcaaatattaaatttgtactagccagccacctcatcccatcctcataatgtcaatgtcagagatttattaagtcaatgttacaccaaatagagttgcttaaagcataatatactgacaaaatttgaagtcataatctcatcccatttatattatatagtaattaatggagttacataaccttgctgataaatcatggtcgagactcgagtgcactaacacactaactgtgccacccacaaattcgttaaattcgttgatatataataagaataataagataataataataataataaaacttgtttttcattcagaaaacattaatgttggatacacaacaaattgtttgtccaagtataatatcatatgtatttttttacgggtaagactttgtatttcatttattattctttcgacaactactacatcatctcaaataataataatatatcaattagtttaataattctttggtcttgccatttcatatacgagagtttgaagttggttgatgagagttagattaaaggcacgagtacataatggaaagggttagttagacaagttaattattacaaacccaactcaaatcgattagtacttgttccaaactttttattagttttctcctttatcataatttttattattagtagtagtagtcgtagtgctgttattagttttatatgaatggtggaacacacggaattagttcacctaacccttcatatatcatattcaaaagctttatatatatataaatatat

SEQ ID NO: 14981 - DNA, 13507 bp, Cannabis sativa
  modified_base (3039)..(3042): a, c, t, g, unknown or other
ataaattttcattgaaacacacacaggtagcggtagcaagaggccacccaagattagccactgagagttacaagaaaacactaaaatatgcagagtttgatgaagaggaataccgtaaaggtctgcatcttccaaacatagattttgtctatagaactgttgaagaagtccttcaaattttatgtaaagaagttaagagcatacccagaattcataatgacaataaattagaggaaacgggtgatgtacagtcaccagcataattcactgtataaaaatgaatacttgcagtaatctactcagttggaacacaagttttgcctcaagtaatagttgatcatgattcatgagggtcgacattttcttattgcatgtttaagaaatctccattaagtcctacttcgaaaacaattgctaacatgatgctgaagaaagcagcaaataagaaaatgcactctttcttcttggaaaatgttgcatgtgagaaagaaaaacttgtggataaccaagccatcaacgcaaaagaaaattaaaaatcagacaattcccaatttctcaataaatcaggaaaaggtaaaataaaatgcagcaaagttattgaacttcttgacgcaattcaactaaagaaccaaaaaaagtttaaaccttttcccaagttttttttttttttttttagtaccactgtagcacatgaccagaaaaaagggcatagaaagaaccatgagaagcaaatgtagtagtctacttatataacagttaaaacataagtccgaaaaaataacttaatcctcaaccaaatgcactctaactcagtttcctaggaaaaattctgtcatttctcaccaaccaaatgaccctcaacatagtcaaaacatcatagttccaaaacatccttttcttatcaaagccattgacaaaactcttggaccatcaaatcataacaaatcttttggggagcagcattaaaagtcaggagttccagccaaaagaatttgaatcctcacattctcgaaccaagcggctaattccttaaaatctaaaatctaaccaatgcaaggtggccaatctgaatgaaactgaaaccaggttgcgcaagcattgtcacctaccgaggaataactgaatttccatatactctgaaaatggtccttaagccaacccagaaaaccaattaatcgaatgagaccatactttcaaaggtctccatagccacttgagactagtttcttaaaaccatatttacaaagctaaacctccttccaagccagaagatgatcagaattttctccataacacccatttcacaaaaaatctcattagtcactcctacaagcaacaaagtaaagataagtaatacgattgctaggtttaaacaactaattgaattagataaaaagtgtggatgtgcctgtaacgatgaaatgaatgattaaattaagttaaccttgttccctttcatatatgctctctttcatccattacgtctcatgaccacttaaccacccaactccaaaaagtaactgagaggccataagtacttcaaaggccaaagtcatcacaacccaacgaagctgccactccactaatgaagttctcatcaacaatcctacctagcagtcattgacccgttaattcatagtccagaaactacgccaaacaattttaataaattcaactgaataatactctactgccaagaaaaatagtgcattgtcagcaaaactgtggatgtgagaccatgatctagtcttagccaattcaaagcctcgatcaacttacaaagtcggtctctttcaatccatctactcaagacatccaccactaatgcagataaaaacagagaaagaggattgaccttgtcatagtcgcctagaggctagagcacatgagcttccttcttggtctcccatcacagaaagccaaatagaaaagtgaaaacaagtatcagctcaccccctccttcatcaacccccaaaacccttcatttccaaatgattataagctttttcaaaatcaatttcaaagaccaaaacattcctcaagatatttatattcttccacaagctcataaagaaaccagcagccacacctaaaatctgtcagccagtgataaacaccccctgattttctgaaatcttatcatctaaaactacctgtagtcttatgaacaataattttgtatactatagcacaaggaaaatatatcaataatctacaaaaacctactttatagaaataagacatatatataggtctcatttgtcaccctgttgatgaaattattgtaagaaaatttgcacaacacctttatttaatcatttccaacatttactgtagagaagtgagttgaaaaagtctcatatttcaattatcatctacccacattatatctaggataagtccagcttaaaatcattgtttcgtgttgccacatgcagaacaaacgccataaacaaaacaagattgtaattagtaagggccaggcatcaaagaacaagacctgtttttttttgttaagaaaatagagaaatacctgcagtggtgaagacacagctataaatggcattctaagttaaagctgagtggagcactgaaaaactgaaagagatgattctgttaaacatcctgagaaagaaacctgcaaaaccacgaagaaagaacataactctatcaagatgaaagaaatggaaacaaaaaaaaattaaaatattgtacatttttaaaaagaaaaaaaaataaataatagaccaaagaagaatcacgttatatttcaaacacttcttacaccacaactcctagagttaaatacaacagattaagttcttaatgaaaagtaacacaccagatacaattcccactgccaaggcaaagaacatcatagactttgtacctgcatatttcaaaatctcaacagattttaatcagcatataatgtaaacggtcatattgtctgcctaagttagcagagccactatgagtaaaaatctcaatgtccaatagaagtttctctctgataagtgagagagagagagagagagnnnnagagagagagagagagagtaaaacgaatatactgatcatcctaagcacttatgtacaagaagcattcttttgcccaataaaacgagaaatcatcattcaaataaattaaagagtagaattacaaaattattgtaattgggaaatgcaaaagtgatcaaacacaatgagatggtctcaaagattaagttaatattatattagtctgcatatgaatacaaaatttcaaccttccaagtgactgataaaacaacccaacaaagtcagagaaaacaagatggagcagaaaaaagaaattaatttgtaatagaaacaaaatccatagataatgattgatgacacaattgattgagatttctttttaacttttttaggcgagtatactacaaaaagaatgaccataattacaaatgcctattgtcagacgcataacttaatcagcatgttgtcctctgacaatagcactatctatttttatctgaaatgtcaaataatcaagaaaatatacagtatatgttgtcctcatagaatcatattcaactctgacagatcatccataggtatgtcaaggcccattgcatcatgttcttgtaagccatcctcctcaatgttcaaccaagtactcagatcttgatgccccccaagttcattgactacgcctaattctatggggtctaattcatgcaactgtaaattcataaaatcaacaggatccctcttctctataagttgttcatcggcactgttaccatgttgcatcaacccagtttcactttttctgttgccactgttgccaggaatttcaccaaaagcagcagaagggtgcatactgctaattaatccatttcctgaagttgatagctgagctgtcttctgctttggcttcgtttttgttttccgttcagagttacccaatgacagacgaccagctttgggaacagagtttctggcagatgtatctttgtcccgctctctctcacttcttttacctttcactccacctaataaattattaccaaaatttgacttgactttcaaggaagggatgccaccaacatcctcaagcaacacttccttctttttccctctgttaactatagctccagttttggcaaaatccttctcagaggcggtaagacttccaaataaattagaagaattattgtcaactttattgtgaggatcatactgctcagcccaatcagacaaagaacctgtgacaataaaatagatgttgaaaaatcaagataagaactaaaggctttcaacttttccctgcaacaatttattattaaaaattaaaaagtcagtacaaactcaagaccaccttcaccattctcttcccctgttctcacatctacttaaccatgtctaaactaaaaacaaattcaacatcccttataattggcctcaagcactcacacaattgtctaatgttctcaaggagcttttaatacattaacttttcttcccagtgctatggaggaaaactagaagtactgttatcaaagaagagaaagataccaaaaagcaaagaatttatttccagtagattatatgatttactttttgcataaattatctttcctacaaaaaagaattagcaaaaatagttctacaaaaaaggcacctccagttatattctcagaaaccgtaacgtgggtcacgtgtttgattttcataaattgaaattttaatgtaagtagcttgctagaactaaacaatgcaagaataaaaaataataataaataaatatttttaaagaaaaaaaaacattaaagcgctacaaataaattcctcaagaggatggcatgagaaacaatggcaaacctgacaatctgggctccagttgagaattccgagtttcatgtggcagcttcgttgttgaccctaggcgactcaccacctctggatcattttcatgaggaggcacagccaagatgacatcctgaagtgcaggctcgctgaagcaactttttccagtatcttctaatctccgacatctagcaagagttctcttcataaaacccacagctacttgttttggaacctttgcaaccccaagttttgtagcaagacttcctcgagtggcctgccatatttgaaaatgaaggaatttcagtaactgcttggttataatcaagaaattgtaccaataataaataatgattttaacaaatttacatgggcaatgtaccatataaaacatatttcaaaacagtttaatcaggtctagttctttcttactagcatattgggtgtaagaacacacaaatccttctacaattcaacttaaaagaccgaacataaattatcatttaagaattgtcatatgcaaactaaacaaacaaaataaagcatgttccataaacacacaacaagcagaaggataaaaaaatataccagcaattttttgtaagaagattcaacaagtttttccattgcaacctgctcaagtcccctgaagacatttagcgcatattaaagctcagcatagtttaagatgcaggtaattgtatattataaatatttaaaatagcaccaaaatgtatgagaaacttgggattagtgaatcgtatctaccgtttttcttcctccttgcctccctccaatgcttcaatgattgctttcagctgcacctttgttttaccaacctaagaaatcaagtgtacatgtcaaaggcattagaaataattttcaagcaaaaattgtcaaaacattaacttaaacaattcactacaatgaatcaatatacagttcggaaatcagtgtgaaattgaaacctgttcaaaaagatgtttttgcagtccaaggatatcagaagtaattgcttcatcatctccttcagctagatcaggctacaaaaataaaaccataagagttatccaacaatcacaaatgttgaaagcaagaacaaagttcaggcacaaatagaaagagattgttagaatgatcatgcaaaaactggctaagaaaggtaaaataaaacctttcctaactcattgcttatattaaggcttaccactatctctggatatatgccaacactctgcaactccagcaagagcttgtcctcaatacgcattttctcatatgagcaatctaaaggtgaaactccagaagcatttgcatataatgaaggaggtctaccaatcacctcttcagaaaactcagtaaatgacccattatccaaatgtgtaacttcatgatctccagtcaatacattgtttctaagtaattgattatgtacacttgtgcttatgctcttagctacattaccactaccattacaagagagcaagtcaacagcacactgctgtaatgtttgaggagaaaaaatggattgaccttcaaactcaaacccaacaatgccttggttagaaccagcatcaggagaaaattcatccttttgctggaaacatgcaactcttgctccacactcttcttcaaattcttccatctcatcttccattatcaaagctgataatactctttggtacagcggaggcatattcttactttccaaatttaatttctcacctacagtgtccatgcccaggacttgatcgggcgaacttctctcttttccttcagatacatgaacctgagactcaaggttctcttcacgcacatgataattctgtgaatagaaaacaaagtaaacatgagtcacaatctataaattatagacagggaaactatatctggttctcaatatgcattcctgtttcatcaatcatataattaactgaacttattccaacaaggaataaaacaaaatagccaaatttagaaaaaaatctagtaatgagattgttatttttttgacattaagatagaggtgggggggtattacatttgcttttctataatatgaataaaaaagacaaagatcatatgtcttatactaacctcgtcccaaatttattggggtgcctcaccagagaaaaaccatggtaacaaaatgaaacagaacatatagagttacacacgtagataccaatcacaacacaaaaaccataacatgtacccatattacatttgctttttacaaggaacaaaacttataaaagagaaaagcacaattatcagaatagagttgcactgcacgtatacactatagtataatatgtatagcacatgttacccagtagttatactaagcattatatctaaaaccatctaccactaataaaaaagaataccattccagaaagtctcatgacagtttcacaacaaagtgaactaccttctttttgttcaatatctcattgaccaataataaaaactcaatatagagaatctgaagtatcatgcttagaatcacgtaacaggaaaatttactttaaaaaatgcagtacgatcaatcaaaattggcattattataaagaaaaaaaaaagcaatgaagatcatatactgacaatagaaagactatatgtgatgaaaaacgtttactcttgacattaccataacattattgcgaaggtcaaatatctgagacaggcgttcataagtcacctccataaagttcagctgaacattgaaaaaaatattgcagagaacatgtaagacacaatttcgaacctacaaaaaaaacaatcataagatttatgtaccacctgctcctttaggtaggatatctcctctaagttgacaggagcaaatattggttgcatcttcttccagaatggaccagaacaggcaagatctgaaaaaaccaaacaaagctcattgtgaatacatacatgtaggtttatgtaccttgttttttcagaaacaatacaatgttaagtttagaaacatacagctcgcattacaagcaaaacttgcagctgctaagagttcttcacggtcatcatctggttcacctagagttacaagtaacagaatatcattgacccttaatttcccacaatgaaaatgagaattcattatctagcatttagttaatttataacaaaagaacaaactgaatatattatttatataatgcctgaaaaaagcataagggtttataaacagatgcaagaaaaaaaacccaagaaccacaataagagtacgaattcatacttaaattgtaccaagtagtaaatgatgtagatataaataatacctgcacaatcaggagagcaagtggcacttgtatgtccaagacgagcaatggctttccgttctgaaaatttctttagagggggccgtcctgacttgctgaagcaaatacaaaatactgatgttaatgtcaagagtagaagctacttctttatataataaggaaaaagaattcactacctgccactcctttcagaattatgccttgaacttttaattggctttgctgaggctaaattctccaacttttccttcattggtgaaatattaatcctgggaaatgatgatccccgaccacttcttccttgtctgcgcacactatctccagttccttctttaatagttattttacttttctttgtaagcaatgttgaaggaacagtgttttgaaaggcttttacacctccatcctctacctcactgcttactgctcctttctccttaaacctactttcacgattttcacatgctgcaccagaatcttcactttcagataatctggaaggagatgacatattatcgtgctttggtttatattgcagggcagcattacatatgctcctgccaagagacccattggtagcagaaaaggttaatctagtgcccaaatcagaaggagaacaggcttctggtgatgccggtacttcatcatggtttgagacgggagacactaaatttgatcgtctagtgcgggaaattttttggggtctctgaccaacccatgccatgggaggggacgaagatcctgttgggataggtcggttgcgattgttagcgccacttactgaatgagttttgttcacatttcctgcttgttcccaaccctccagtgatccagaggtgcgaggaaaattaggagataaatttcctgaaacaacagggccgcttcgctgtgcccttgaagctttcccttttgtcaatccaagtatttgattatcctcacgaccatttaacctaaacaaattattcaggaaaaataggtataaagatatatgcaccatatcaaacaaattaaataaccttcagaatggctataaaagactcttaacaaggtaaccaactacacaacagcatcaaatctatagcagtaaaaacatacttaatgttccccttgagtcgctccttacttaagccaggaattgaatcccttgaaagagaaaccttgtcaagttcattcttaaaaattgcacggccatttgagctagcacacaaggaagcaccatcaaacttgttgatgccatttaatggtcctggcctgcaagaatggtagaaatctcaaacagctgtatctcagctttcatatcatgcaagaaccaaaataaaagttcatataaattctgtttttaaataataataataaaaaaaattcacctaaaaatttgggcatcacaagatgttgaaccctgatcattgttcagcttatgatgcatagctcgcttgggctctccatcatccaggggtcggccaagaagaggaccaacagaacgtttcctttttatttttctgtcccatgtctcccctccaactggcaatcttcggatcttttcatcaacaatatgagatccttcgccacaatctctaagcatatccctatcttttcctatgatcgaccgctttgcaaggttattagtttggccttcagcctacaagaaaaaaacagaaatagaattataaactgacggcttgcattagtcaaagttaaatcaagatgagtagaacacaaatgagcctttgcaaggcttgtgaaccaaatctataggctcaaacaattacaatattatacaatttcagggtaaagctcctttagaattagaacctacattttaagaaagcaagaacattgaagaatacaatacaatgaaattaagccagaagagttttataaatagtgaaaacggtcactgatctttgctaaattagtatttacttttttacagtattatttgtctcttctttcacagataagaacaaccgcatttccgttaagtagatagaatgtcatatggcgtgcccatagcatttagcaatcaaaccatggtatgcaacttatacaagtgtttttagaataattgatctttcaaagggcactttttgttcccttgtggcataacaactgagctcctgtgtttcacgtagtttcctaccttaaaggtatagctcttcatttgctaaaaaaaaaaaaagttgttcacatccacaagggttttttttttcttattttgaaattatatttgcttaatttattaaataagtagaaaactaaagcaggtcaatttcaatataggcacataaaatatcagagtttttttttttggcaacaattttatattttgtttgaaaagaaaatatgaataataaagcatttcgcacccgtcattccacttttagaggcctaaataattttactggataaaatactaaaaataaaatgtgttcctgtaataatatagaaattgcattgtacaaacccttatttctgcaactgaagagcgaactcgcttattgagaatgacattcttagtcctttcctccaatttttggttcgcaggttcagcagggttccgtgaactcggggagcccatcttcaacaaattcaacccaactgatctttctgtagtaatcatctcattccgttgtttctttgagcttacaatatcacaatacttgttcaatttttgcaaggattcttcaagcatctttttcctaatcctgacaaaatataataaaagagaagcatattagcaaaatctacttttaaatttcaacaagcccaaaattaattccatcccaacccacttctaacaagttcaatactgctagtctcaacactgatcaagaataaaaacgaggagtaaagttagacattacaccttcaagcatccttgaaaactttaacgtcaaaaatatgtgcattaattgtaagaatttccaaactcaaatacaagaatatcagtatcacatataaaatttgttattactttgctttgttagagccatcttgcacatttgctttgaaccgcttcagttcctctgtagccacagaaggggcaggctttgaatgagcagccccaaatgaattgtcttcacctgtgcttccaaatgatataattcccaaagccctcctcaattcacctaacctagtatatctctgattttctatagtaataggatctattgtcaaatactgagctataggaggcaaatctcctatcaatgcagtgctggcccggggtgtactagcaccagaactaaacattcgagtctcaccactctcacggaagcttccagacctatctaagctggcattgaggtaacctcccctctgcacattagaataactcccagtaaaacccaaatcttctggactagccgaagttgactcaaatctcacacttcccgccattactcattaattaaacaaacacatgtccaatttgtccaaactgaatttctttagaacaccttgttttcagggtttaaataaattcttatagacaagtacgcacaaacccacattcataaataaaatccagcgttagaccacacgggatagcatatctgcaacatcgtgaagtgaaccataattagtataacactgataaactgcttatttaattattttcttcatatacagcaaatccccactattttaagtaaaccttagtacactaccatggacaagataactagtttaccccctaaagaaaaagaacatattgcggttccgacattctacccaataagataacactacaactattacacgctacctcacttgtttcggtagccagatggataaagcagttgaaatgagccaaaataacagttgaccaaaagctttcctttgacttgtatccagaacaatcaatgcttaacaagaaaaaaatgtacaaaattaagctttatttccttatccaaaatattttccaggaaaacaagcacagataaaacccaaataactaaaaactctgtaccaagaaaaattaaagaaacaaacccaaaatcaaccactttacataacagaattcaaccaattcaacattcaaaaaactacacaaaaagatgaattcttttaataaaataaacaacataaaatctgccaccagaatccccaattcacgcaaaaaagcaaactagggtttttccgaagtcgcagtaaaaattgaagcagagaacggatcaaaaaccaggaattggaagcagggaaaagcgaaattcaatcgaaagggaagcaagacatagctgcattgatcgatcgagaaagggatcgtagtgtacctgtagagagagaaagtacgaattagaagaagaattttgtggcaggcgctgtcgtcgtagagattctgcgttgagaggagagagagagagagagagagagagagagcgggacccgcatgaaatttagggcggggttattcgagtgacttgggttgtaaagtgtaacactcgcgctaaaatcagagccctacatcatgtatttcacacgtggggcccttttctcttcatctaacacacacactcacctaagacaagtcacctttcttctttgggtttggaatatactcctttcttctttgggtttggaacagattagcttcccctcatgtgtggatagggtttatgtcttctttattattattgtttagaaaaataagatttaaataaatcaatatcaattatgatttttttttggtggagatgtgagatgttaagtaccataaaaattataaattattggtattttaatataatactaagtagctattaagctttaattttatgatgaattttgatcataattgagtaggtttggtgtcattattttttaaaaggaaatgatataaggtactacataaatgtagtattagataggttaagatgtaacatgttaagatatgttatgttttacatatggttggagttttggtttcgcaatgaatgatgacttcaaaataaatttgggaatgaaatttaatgataataaaaaataaaaaatgaaaaaagtaatgtgtgacataaatatttaagtttaatttttagttgtaaataaatatataagttttattttttaccgtaaattatcgtttagtgtcaagttaatgcccacgtgtaatttctgattggtccaaatcattaaattttaaatttttatttaaaaattaatttaaatatactaataaataaatgacacttagataataatttcacatttaacatgcatatacttatgaaagtttcagatatataatttaaatattattaccgtcaaaagttaagtatttatcaacaatcgaaagtcaaacttaaatatttacactataaattactatcataaaaaatataattttgactttattt

SEQ ID NO: 14982 - DNA, 6107 bp, Cannabis sativa
  modified_base (4873)..(4884): a, c, t, g, unknown or other
  modified_base (6065)..(6069): a, c, t, g, unknown or other
tgtcaaatttttaattacaaaaaatttaattacccacaattttggtataattatatagtatctatataagaattttataaatttcacacacgtggcgtccctgttggacagggcgttacacacatcttttgttctagtctcttttgtgcctttctccttgaggcatcctcaaaggcttccggtagtgagccatgttgcaggttactttgtacaaattctctcaagtattaattaggctagtgaactcaaagaattttgactatccgagagtgatactacatcttcttatgccactatatacacagaaaaatgggtttgcataggagcgagcccaaaagcagaaggtcaatagatagccagagagtactagttatgggaagtgagattgtgaaaaccaaaacttgtggggtgaaactttctgtggatgtggaagtagttggagacggagggagtctaaaagctaaacatattttaaattgttgacaccttgtgccttggacatgaactttaatagagtatcaaccttttttctttacactctttgcactataaagagccaactatatgtctggactaatcttggtctttgctgctgtatacatcatcctttgaataaaggtcttcaagctttcatgtgactcatgtttgatgatggtgagcaatctgacttccatatcacagtctcttgtcactgtaaattgtttctaaaaggaataatttaactcctttcatctatttattgatccaagggttaggctctgcaattattctttaataaacttgattagcattaatgaaaagcaaaggcccttggcatcattgctcactcttgctacttgcatcatcttattatattttgacaggtgagtcctaggatccatatggccatcatacaactctatttgtggtatcttgaaattttcttcaagtggggcttttgtgattttcttgacagactgttttggattctcatctttcgaatctgagagggccccacattgattccggacgagctttgtcaaagtagaaattttctcttccaacctttttatgtcactatctagaaggtcacgtcctcgagccttatcatttaagtgattccttaggtaatttcttagtggcctcaccttctatcctttagctttttcatacttggcatcgaaacaccttcaaaggtctacattggactagctatattcagagaattgttcttctatcccaccatcttgattaaaacaatcactagggtggtttttccttcgcttagacttgggtacttttccaccagaccatttttgtgcaaatttgccttttagagcaaaagtttgtccatgcttggaggcatcaatggtattctacgtttgtaagggctggttggctggattcacgccttttcgaggaggtaagggagctattttgttttgaggatcacccatgtttgccttctttctgtccctcacgggaactaaggttccaacgtcagttggatttgatatattatctctgccaatgagttccattgaagcgtcctattttgagtcttcttctaggtttcctaacatttcctggaggcgggaaatcatcttttccatctttcatgaaaactcatcttaacgggctagcttctattagtgtccaacaactcattagatactcgaactaagtctggatcctcctcgtagtagtacatgtatctgtaggtactatctctaatgtatcctttgttgtcttcgtcctcgtcatcagcgtcagggtcttcgtctttgaatttgttgcaacgttgggctgtgttatcccctctattcttagtttcagatgtatccctttccctcacattgtttagttgggcgtgctctagagagggatggtttacatcatccatgacagtgtcggagtttgcttaaggagtcttctttatcatttcatgtagaaaccattattgcagaatcatagtggctcagatctttcctcaactctcaatgaaagtatcaaaatgtttactgacattttcaaaactaatcaagtgaaagatttagtaattaaaatactatttaataaatgagatggagaattttatgtgatttaggcgttaattatccctagttcacgagtcagtatattagccttttaggcatacaaatgtcttaccaatggtgtttagaataaaattcataactctagttctctaggtttctcttgaagaagaatgaagcttagagagtattttagcagagcttcgactatgtaaatttttgtatcccccttttgtgaagaaataaaggggattatataggctaaagtacgggtatggacatacccatgacctgcctacagttttcagtaaaaagccacccactactcaggtaaatacataagaataatctattaggcccctaagaaggttcttcctggtggggcaaaaggtccatacagttgggaccactttttgtgcaggacgcctgttgggcggagattgcacttagtaataaaaacccttagaggagccgttagtcagaaaggtgtgttcagaggttatatgtgcactaccattgtctaacacaggggataagatttgatcttgtgtcaggaaagtatagttgtcacaagagtcattcggctctagcttcatgacaatctccaattttccttctacaattagcatctgccttctactcttaatatggctcacaggttttaccctgtaaacacagttggttttgtctttcctgggtcccagaggaatgaaaaggcttctgaatcttggatggtgattttcctttggatgaaccttcaagcttaaccctaattaggacctctcccgagtttgtttagtttgcccgcgactttctccaattaacgggacataattggttgttacctcactcccaaaaatagctacttttagtgacaactttttaggcacaacataatttttttgtgacaaaatgtgggttttagtcacaacaaaaagtttcttgtgactaaaatatagtatttagctacaagttgtcacttatttagttttagtcacaacaagtattgtgcctaaaaaaacattgattcacgagaaattgtaatttttgtgactaatatttttattcatggactttttagtcacgacatacgagtgatgatttataattagtcacaacttcattaattttagtcacaagttttgttgtgattaaaagtaaatttttttgtagtgcctggatcattaccttccatattttgtcacgtgtccttcatccgaaaatacgaataacaaacgtttatgagagacaatgaatatttatattcattgcatttcatcacaattaattggttaatattctatatatggttagattacgatttaccaaataatttatttccccatttaattttctgaattaattgtcaaaatatttttacaattaatgtggatcaaatactgatcgagtatcacctataaatatagggtctcgatccccgagctcctcactcattttgtgcaaacaacaaattctatctaaagagattagagagagcttggaagcccaattactaaatttgaagctacactgggtatttaagctgaaagatcaattgatggaagtattacaatctctttcatagtttgcatgtatgttagatttgtttatattactcgaattttatatcaattcttgatgttttaggtttatttaataatgtctagcagggattaattttctgctcctttgtgtgtgtgcgaattgtgcaaatcagttggtatttggaagtctcacgttgtggagctccaacagtgacacaacacgttggtcggatggttgcttaggtgtggctacagttgacaacttttgatcctctagattagcttcaaaagagaggaagaacttaaaaatataaaactaaatatgggatttaaaaaaacatttacaataatatggtatacctaaacctataaaaaagcacaaaaacaataaaattccattaaaaattagacaaaattgaatgtgagatatttaattaaaagttttagaaagtaggagtattaagtgtaaatcctacctaattctatgactaaaataacaaagttctcatcaacttgctttttaataaaacaattaaaacgttaagagttttttgcggctaaaccctcccaactctcattttactggcatttaaccctccaatctcaaattttggtggtaacaccttttaaacgactcatcagttaaaaaatttaaggtgtcatccatttagcacagttaagtcccaacatggattggttatgtgtatatttttgtacacgtgtcccatttatattgatccacctaacattattatttaaacattataaaaattattataaaatttattttaaattaataaaacattaaaaattaaattaaattaaattaaaccaaaaattataaaactcataacccaaaacacccccttatcttcctcaaacccaccaccatcgaaacaaccacactactacaaaaaggggttttcgcatcggtcaacgcgtctggtcaaacttattgattgacgcaaaagtcaaccaataatcttttacttcatttatccacacacgtaaataatatttaattagcatcgattatctattcgacgctaaaacaataaacgaagcaaaagatgaaatataaaaatatatgtatacactattagcggcggtctacaaccgatgcaaaaagccattgtatacactattagcgtcggtctacaattgaagcaagaaggcattaaaaaaaaattagttatgggctttggcccatctttaaaaaatcctacttataaatatcacaacttaacctaattccatcagtcgccccatatcattttacacacacacacacacacnnnnnnnnnnnntctctctctctctctctcgattctatctctctctctctctcttggttctatctctctctctctctatgacggaccaccgacgatggaggctagacaacgaaggccgatgctcacacgactggcttggacggagcctgcacagccatcctatcacggtaatatctttctctctttctcccttctcatctctctctctttttatttttctcttttgatctctctctctttcaatctctctttttctaatttgatgttggctaattttttagggttgcagtgttgcagtcgccatgggtggtggtgtggtcgtggcgtgcgatgttggtggtgcagtggtgattgtgtagtggtggtggtggtgggttggttcaaacttgttgatttattcaaatctctgtctatgtggtggtgtgcgatgtgcaataatatggtggtggtggtggtgcgatggttgtaatttgtttttttaaaaaaaatcttttacttcggttcgtaactgaagcagaaaaccaattagcatcagtgcacttgttttttgcttcagttatgaaccgaagtgaaacctttttttttttgcttcggtttataactgaagcaaaaaaacatttagtgtcagttcgaaattgaagcagaaaaatcaaaatttgcgtctacggtaataacgtcggttgctcaaaccgaagcaaattgtttatgtgtcactttaaaacggaagcaaaagatcctttttgtagtagttctatcaccactaactctcaccaccacgaccaacacccactaccaccaccacaacctatttttcatattcaaatcacaaaaaaaaaaaatataataaatttaaacagcaataccatatctgaaacaagaacatagatctaaaatcttccaaatattttagaaaaaatacccaaaataattttaactatagttgtttattgttaaaatccttcacattaattgttcgtttctcactaggaccccgtcgtaaagcccttatcgagaaattttccttgccattgaagctcaccacctctagcgaagaggacatgaacagagaagaagatggcacccttcatcagatttgatcgccgccaatgagcgtgttctctacgagagtttggagtattggtcctctctccgatgatgatgctgttagaaataatagagagattacaatggannnnnaaaataagatgaataaaagactaagacaattacaactc

SEQ ID NO: 14983 - DNA, 6707 bp, Cannabis sativa
taaactctaattggtcaaaaacaatattctgtggcatatagatcatcaaaccatagcacaacaatattggcaactcatttgaaccaattaaacaataatgcacattcagttatcacctacttcattgacagcaatttcatttacgtctctgttatcatataagctggttagtaaaattcatttgtttttcttttcgacgattcaggttgaagaatgcatattatggctgagcattatattcataaccatattatgtacgccacaacccactgtagttaggtggtcatctactcctccagtgtcagacgaaataaggcttcagtggaagggcttttgtgccctcatagcaaatgcatactatgtccgaggaatggcatggtaaggttgttttgtttgatgatggaatttgatgattttaagtgctcattttctgtcattatttatttggactggacggttttcgctttgttcgtttgctgcaggcttcccgtgaagactcttcagctggagcaaatggcagtggtgggtcgagccgaggagccctcagtggttgctagtcgaatgctactagtgtttagcacactagaggttagctttagttcaatgtaaaacatacattcaaatcagatggtaaaatttagaaatactcgaatctaatggtccaatataactcgtgttgctatttgtttgcatatgcaggtggtgagtccacagtggcctagagtataacctcttctgcgtccatagagactttttctactgctgacaccatctctggggtttaggagtaccctacggtagcaatttcgaaacagtatcgtttcaaagtttttatgcgaaaatcatgtactaaaatatgtaaatttagacgttttcatgtaaataaggctttaatgtaaatgatcacaactgctcacgaggcaattttagtgatataaatactgtaacacgttctcgtttggcactgaacacagtgatgatgatgacttactaatatccaactttgagagggaaaagtttacataccaaacaatgttgatatcacccgcaagttacacatctttcccgtttgcagtctaacagtagtaaaaggtcaaaattgaatcaaatgtacacacatttagaaatccgaagtaaagagagcagtcgaatcctttagtatcttccttgcacgccaatggacggcactagcggtttcagatgttcccatctgcaaaaccagataagcttgtgagtggaaacaaatattttcaaactctggattggcatataataactatgtcaaataacccaaatcatcagagactatacaatgtttgtgaaatgtaatcccatacaatttcccttttttttttacaatttcataaagaccatagccattgaaatggtattccacataaaagcaaaaggcactgccccaatctcatcagggttcttaaagtacaagagtaatgaaaagtgcaccttcgtttctagtcgatggtaattttgccataagctcaggttttgcccataagttgaaagtgcagattcaaataacttccgcgcatttacaagcccatctttgtcaccaactgatgctaagttggtttccaaatcaatgcaatttctgtatatagctagccccggatgtggtaatgcaagaaagctgcagtggaagaaaaaataaaagcttataatacttagaacaacagaggaaaatacactaaaggtggcattgcacatgcaaaggtgatcattttatcacacaagaagtagatactagatacatagttcaatatctaacgacataccgtttatacatttctcgcgcactttgaattccatcattttgtaaaacaaaattcacgatagctgaggatagggagaaaccattgtcactgtctccatctttagatattgatacaatagagaggccaaccagcttctcaaaatactctttctgacttgaaaacaacttgagtgcctgcacatgagaaaaatataataataagtattgcagtataaataaaaaaagtttggaacatcatcatggatagaaagcaccacgctaagtctgaccaaaagaatcacaacataccattatccacaaactctcagcttttgagacagaaatttttggcaaaacatccttcagaagtccaaagatagatagaaggtcagctttagttggggacgatagtgaatctcttgtaacatgcctaacttctagagatgcctttaatagccataaccttgttgagtccaaaaaagtttcacggcaaagcttatctgccaagtttcttgcttcatccagtcttcccagttgtaaataaaatgaaacatattggtatgcaagatcttcagtaatacatcctaatgctttagctttctcatatatacctaatagatgtgatatataagttgcatatggaccagacaattctaaaatttctttttctcctttttggagaagtataacatccatcataaaccttgtgtaattatcaaacactttggccgaaggcataactttaagggcctcctcatatacctaatcacgaaagaaagaaaagaaggaaattaaacacagaattctacttgtcagatgattaagcaaacaaatgagaaattggccaaactaacaagtattcttatgtaaaaattgtacctgaatagctttctctgtttgagaaagcacaagttcatcactcatcccctctatggcctccggatcaaattcaagtcttgcaagccagtcccaatactctggttctgttgaaaaatctctcttcatctcacttagtatctgttcgtgcatttcttcagaatgagccaaatctaatgcatccaatatctcgaaaaactttttcctcaggtttaaactagaaggaagagcttcaattgccccactatatatggcttttaaaatactaaatccttgctctcgaaaaacatctactttccctcgtgtctccttgttttccacatttgattcattattttccttttcctcattaagggacataaataagtcttcattgtcatctctccattgtttctcaccggccactttcttatcacggaccagagttccctcatcctctccaagagcaacctttcgggcctttaacttattaaggtaggtaagttccatccgaagatactcgatccaaagttcttctgatgtaggacaaactctcaaaccgctctgcattaaagcacgagcagcagcaacatttaagttgtgatcaaattcccaagcagctgcgtaaatccaaagtccagggacctttggatgaaacctaatagcctgagctaggacctgaaaaaaatataaaatcaaatgagcaagaaatatacaaatcccacttaattaaattagacaattttagcagttggtagcatcttatattattattagtcttatttctcttatatcagcaaaaaattcagctttttacagtttgttaatcagaacaaatttagtataagttgacaaattgattaatatggatcaataacaggattaaccctactagactttaactttggactgtcactactaatcctccattttcttagtaaccaaacataacagagaaaacggaaaaataaataaataacagtacgttcttctgccctgtgaaatcaatttttccaaaaacttcaatgatgggagctgaaagatacaagaagcaacctcgtcctctgcatataaatctaccaaaacaacaatactcaatatagtttaccttcttcatcctgccatgacgtttttctcgacaaaactcaaggtaccgaaaccaaagatcaatatcacccttgtaacgcgtaaccgccagtctgtaaatgtcaacaattctcacaacgcctgcgaagtctgaaactgacttcttcatcttcttcttattctcatcagttccctggttcctcagctgtcgcgccactgacttcttcctgagccgtctgagcgagtcgagttgagtctcgtattcaatgtaagccaggtaatcctgcttcagcggactcggccgctttaggcggtactcgaatttgcgccgctgcttaactatctcattaatctcacggcgtgtgaagatgccgcgacgctcgagatcgtcaagctcattgaccatgcgctccagccggtactgcaccacgtccgccatttttgtttgttttcgttctagggtttagaaatttttccgagaggttttaaggacacaacagacagttatagagtggacttatatatctggaagaaaaagaacatgcatattatgaatttatatagctccccataatcattattgtggcaatgctaccaaaatttaaagcactgtaattttgtcgcaccagagaaattgaaaaacatataaagtattcatattacagaactcacctggcccgcgttgatgagagagaaagaggagtacagaagctagtcggcgttgaaggagaaagagatagaggaggttgtcggcgacggcgtgagcagcggataagtttccggctgattgtgttcgtgggtttaagggagaggcggactggactttttgttaggcaaagtgaatatgatagggtttagtgtatttttaattacaccccacaactaacgtttattttcttttggtgagatattttacataattacttaattgggtcctatttttaagaaattaatttttaaatttcatattttgtgaaaatacaaataatgactctagagcagattaatgtgattgtgttgaactaaaaataaattttaaattaatttaagtattaaaaatatatatttaacaataaaaaactttatagttgataaaaaaaatagaaatttaaccataattttcacaaaattcaaacatacattttcttctacttatttagattttatacatttttttttgttaaacctatttcaacagatagaaatataacaaattccattcttaaacacttggtataggttattcagaataagaatatatgtaaactgtgtttagagtaatatgtaattatattttttaaattatactgttttattaagtacaaaaattttattaaaaaaaattaaaataaaaattattattttattatatctatttaatgtcatacataaaaataaaataattattctttgaaaaaaacatatttattaattagttatattaaatttgtctaaacaatcacatcatcattattaattaaagttataactattttttttaattaattgcacgtatagtggtgatatagaactatttaaacaatcacatcatcattatgtttgtcacgtatggcaaaatctgacagaataattaattgataacactgttaatagttttaagactatttttttaatgggctaaaaaatttagaggcataatactacatagttataactttatctattcattttaatccatccattctctaatccattcaagcaaacaatgcataagtgaattagtcattacccagccttaaatcaattttgacacctaatttcactataaatataactcaaattggtcacgaaatttgtaataataggagcatttattctcttcaaattaattttccaagaaactcgtaaatacaatctcttcaaaagtggatgtaggttgttatagtggccgaagcactacaattattttgtgctctttacttttattgcacccaaatattcttgtaaagttatgcttcaaaagttctctttaatattatatagtagttgactaaattattttaatatatattttgaaaaataaagttgagattatattgtgagtgctttaagtaaataatgagatattataacatgtcgttaattgatttagtttgattgatgtttgccatgcatgacacactttagttgagttactcttttggtgttttggtattattataattattattattattattaagggggaatgttttggtattattgacaggcataataatcattgtaatgacaaataagaatgtaaagagtaaacaatccacttataggtatccaatcatatgatattattttgagaaaacaaaaaacgaaaaaagtaagaaacaaacttaattgtaaatttattacggctaattgtcgttgtcatgaattttatatgttctcttctgctccccaaagtcatgattgtgcatgtaattgatgaacatagtatagtatcaaaatgagaatctaccgaaaatggtagatagtgaaatatataagttggcgcctacgggcggtggtcatcgacttgcttagtattagtattggtggtatcatcagctccacccccacttcccatgctaaagcccattcccatgcccattccaaatcccatactcataccattacctgatttactactacttccaccgtaaccttttccaacgccacttcctacagtaccctctcctttcccacttcccattccaaacccactaccctcaccatgaccttctcccccaccactaccaccaccaccaccaccgccacctccacctccaccgccacctcctccgccacttccaaaaccaaaacctgctccaaagccactaccatgaccagaaccagaaccactaccacctcctcctcctcctccaccaccacctcctccgcctcctgctcctccagtaccaccaccggcaccaaaaccactaccgtgaccagacccaccaccatttgaaccacctccttccccaccacctccaccgccacc

SEQ ID NO: 14984 - DNA, 9047 bp, Cannabis sativa
  modified_base (7441)..(7456): a, c, t, g, unknown or other
gagccgaacctcggactcagaccgggacctcaaatgcggaccaagactcgaagttggacctggaccccaactgggagctgggacccggactcaaacttggacctcaaccccaaccccgaactcggacgtaaacctggaccttgcaccccagacccttaaccgaaccctggacttggacctagattgggaaccccaaaaccccacgccatgtccgggttaggctcaggcctggggtccgatgtttggggctgggtctaggtctggatcttggttcgagtttgagatcagtgttcaagaccgagtctcgtgtcccggttcgagtctggatccagttcctagtctgggtcccaggtcccgagtctgaggttggggtctagggatgggtttgggtctagctcaaagtccaggtcggggttagggttggggtcgagtttattgtaaacatattataattttacgcaacctattaatacaattcaaagaagtgttgaaacatattttctcagcatcgaaatatgaaatgcattatgcacaactgatagtgttggtagtaaggctagccgatacgctacctgtccaaccttctcgagtgtcttgaatggccctatgaacctagggattaacttgaccctcttcccaaagcactttgcacccttcattagtgagactcgtaggataacatgttctcccacctaaaatctatgtctctgcactgagaatcatcatacttttctgtcaacttttcgaagcaagcattcgggtcttaacctttttctatttcctcactagtctgctgaactaacccaggacccaaataattcctttctctggtctcatcccaatgaactagggaacgacatttcctaccatacaacatctaatagggagccatccctattgtaccctgatagatgttattgtaagaaaattctatcgaaggaaaatatttagtccacgaaccctcaaagtccacgacacaagctaatccttttaagggggggataattgtaatgaacgtgtacttagaatatggattagagaggcaattagcattaaataattgcattttatgattatatgtgattatatatattgcgtccctattttcaaggaataggcattaggattctaatttctcaattccaaagattttattaaactctaagtttattatatgtgctaaatgtaaaatttatcattatgatttttgctcggtaataatggaaatgtgatggatggtcgttgagtcacatgagtttgggttagaacctttgttttagcgaggtatatgtatattgatatttagaatatcaagattaagcagagttatagttttggaccattttactcctaagcctaagaatttcataagctttaagtaagtggtaattttggaattacccaagtggttttaggtttatcttttagtgaaggctgtagattttaattctaatttttttttttaactaaggggataaagcttaacttttgttaagttaatcaaactaagaaaggaaaggcaaaacacacctcttgcctttccctctctcccatttcgactcaaaagaaaccagaagaactagaggattcttcatcaatctttaaggaatttcagtaggaatggaagggagattgctagccaagatcaaaggtaaatccatagaacctttttctttaagttttagaagttagtttttagttcaagcatgcaaattttaagattaggttatgtctaaaactagggttatcttgggttggtttattgtattatttgaagttgtttaaagcttatttgaggttatttttttggttgagcaagtttgagttcatgaactaaaagttgggttaaccatggtggttttggttattctgagttatacttgtgtttgatgcttgtgttatgtttattaggctcaaattagatgttctggagagtatcttgagatttggagtaaatttggggttattttgagacttattatttttctgcagcagaaaacgatagattgtttgtcaggaaacgatctaccgtttttactggcaaattatccaaaacaatagtctactatttttataaaacggcctgccgtttttcttggtagtttttctaacgtctcatttttctgtatttcattgatatttagggcatttccatgttatttatcgataggaaaacttctaattttgaggttagttccccgagaaggttttagcaagttgtttacccgatttacgtgattgagacatagggcctctgttcagcgcgtgaattttcattcagattgaccagcactgctgaatcaggaaacgaggtaagattaatgtaaaatgtgtatacgtatatgtgtatgtgtattatatgcatgttgtcttatgtgatttgtatactaccaacactagtacagtagcagtacggagtgcattggtacaatatatgatgtttaagggtacgacacggtgttgccaacactagtacgggacaagtacatagtgcatgtggtacaatacttaatggtactcgaggtgcggttaagccctaccaacactagtacgagatgagtacttagtgcatgtggtacgtgggtcatgctttggttaagggcttgcactattggatcaacttgacctgcctattgaccaacttatgtcacctgtggaatgcatagaacatcatcgagcacatagttatccatattaattggttgagtattaggaggagggttaaagtatttgtcccgacctcctcttctgtgattttgatcatctcttaaactgtttacaggtcctaacatgttgaagactaattcacttggaggcctttttgtttgtccgttatcaaaaattggttggtttggtatatccgtctaaggacagaaattatactggccatcccctccaagataatgggttggcaaaacttgctcgtctactgtgtggcccacagtctggtcctgtggcctcagattggacgacccattatcttgggtatattgagtatagttggtcggatgttcctctggcctgtattactgttcatttgggatacaggcttctctcctgtccatatctcgtatgagtggcgtatcttccactggttttagtctagttaactgttaagcacgcctgatcatctcagttgcttgcttggtgcgattatcaatagctgcttgttgggccccatgatttccatctattgatccatccacttatggaatttgagtttttgttgttcaaatgccaaattcacagcttgggtatcctcgtgatcatggtgaagagtgttggtatgatcttgcatatgccctaaggcatctcaataattttgcaactcagtatcatcaaaaatattcactcagggctctctgatagggggtcttcggtacctgacccagtctctccagcgtagtcagaactggcagttccaatttcctgtgcacccagagtgaaccttgtcagaggggtcgttattcctcgtcttactattggtggagctcgtggaggcagatgcgtgctcggataaggatttgtcactactagatctcctcagttggtaggagtttgcacattagaatccgtagcccttggatcagttggaccagtggattgggtccttgtattaacaaccattcttctgataactagtggagaatcaaaattacagaattgtgttcttttgctctcaatgaaagcatcaaaatgttgacattgcttttagccaatgatgttgagtcaattaaagcaatgagataataaataatgaataatttatttaagcaaataagaacacacaatttatagaggttcgatgtaacaccctgaattgcatgaacgccacgtgtgtgtgtgtgtgcttttataaattaatctataattaaaagtgcgatttatttaaaacatttgaaattaaactaaaacttgtcttattattcaaaatactgctagatttagggaacccctgattaaaagcttttacatcacattacaaaagtgcttttacaatagaaggttacattttcaaaacacagtcaaaagggtggatccagtccactggaagccgagacaccgcaattgatatggacatcgccgggagacctttgactcatggttggtctatatttattttcccttttacctacaccacgaagcacctgtgagtcacaaagactcagcaagaaaagcaaatgaaatataaacaacgcataacacgagaaattacaaaattgcataaccaacaaacttatcatccaatataaacatttattcaatgtgtattcaaacattacataaacaaatattgtctcataagacaaatcgactttgatgcttcatagaacatccttaccactcgttgcccacgagctacatatatcactatcattgcccgagaaaataaataagaaacctatctgcagttttaagcgagtaattactcattcacaataatagtaatgaccgtatctttactcattctcaataatggtaataaccgtatcttttccttgatcgtaatcgagccacacacgatgataattgtttcttacttaacatgcttagcagtgaaaatagattttcttaccgtatgtctaaagtcaggtgtgtgggttgacctgagtggaatgatgctcgacgatctagggtcctatgtcacgataacggtaaatcaataagggtctattccaaaacactgtctaaaacccacataaaataacctagggttttctaccgaatcttatggtgaaaacaccctaaaataaaatacatcttttggctctaatctatgtctcatacggtaaagctcttcataagcttcgaaacgatatatagaatgtctaaaacggacacccgagtgaaaagttatggctaaaatacaaaaatcaacaattcttaaaaactcaccaaacggaatttcagttggtacaaccctgtaccatccgaaattccagttcactacaacagaaactcaaaaacttcagatcttcaaagtctcaaaacttgctccaaacctaaccaattgttcccaaacttcacaaaacagttctatatcatgaatacaatgtatacattcaataaaatctcagaaattcatcaagataattaaaacaccataattgagcaaaatttgagttcttaaactcaatttctcccaattcaattctaaatagccaattaatcaaccaaaacatacacataaaaacttaatttaacttagaaatcatgctcagaacctatctaagcctacaactctgaaatctcaaagaaaactaacaaaacctagcttaaaacctaggaaattcagagaggagaagatggaggattacctcaaggcttgagcagcacctagggctagctaattcagcttagagtggatagattgatgaagaaaaacctcttacttgcggctggttctagggctctcaaagaaggggaagagaaaggggggtttctttgagattttaatttaatcttgaataatttgtttaaaacttaaataaatataaaatccaatttgtaaaccttaacttcagcctacaagattccataaaagacaaattaataaatctcttaataaaatgactactttgcccctccattaagtacttgagttaaataaagcctaagggtattttggtcatttcaaattttcccaaataaactaacaactcaactttctaaactagtcaggtatatttccaatatttctcatcgtaaattgccgtgacatttttcgactaatccgtcgagttttttcggtcgccaaacctgaaaatattttatttcaaaaatgatctatacaatattcacataatttgataaaatctccgtaattaataaattacgcttcattactcatttaatattttattaattaactcaaattaacttaattaagattataatcctattctactgtccatataatcacatatatttttttttaataaaatatgtctaattaaatatcattatatttttctgggatattacattcgaccccgtgattatagtaatagcctactcctcttttacttgtattactttatagaattatcaagatcacaacgagctagccaagtgagtttcttaacaattcttagtaaaaaatcttacaataatttgactgcgtaataactctcaagaacatataatttcagattcatgtaccgtggaatgactccactatttataagaaaaaaaataccataattaagtttcccaaaaccgataaaactaaaaaggaaaactagaacgatttcctattatttcttgttggtgcgtgtcaatcctatagaaatagagatttgatttgaataattaaataaggatatatttatggaaaatatctttaaaaatgttattcatccgctttatcatgctcggaggatataacttcactagataatgaagttctgtgtggactatcacgtacatgttttgtttggatgattcatgttgaagacagaaacttatcagctttaagtatagaattctctggccagtccattgagggaaaattacccgtccagacttctcaacgttctccacgtgtcaccatgctggatgctacatcaccctgtgtaaaatttgggataacatatattttaatgtatttttcatatataaaaagattaatttataggatgcgttttgtaataattttttattaagttttatgttttttttaataaggaaaatgaaagtgttttccaaaaacatgttctatgaaattgtttgtacttttttattttttaattgaatcaaaattttgaaaaaaaaaaagtcactttcaaatatatttttaaatattttttttaattagtattttggactctgaccccaacttaaaccttaaactgaatccgtaaactcggacctagaccatgaatatttttatatttttaaagaccatggtaattccatttaataaaaaagtcatggtagtttatatttaagaagttaattttatttaatttttatattgtaaaatcatttttttagcatacatatcatgtttgggtggcatgggacaagaaaagacgagagttgttccctatatataaattacaaaaaagagtatagagcacaagtaatgattaagtcattcaagccccacaaacatattatattatttgtttgttacaacttacaatattatataagttaatgttaagagacatgtcctaatcaatttctcccctccaatccattgtttcactgtacataatactatctagaagggtttgttgaatagatagatagagatatacataatatatatatatatatatatatatatagattgtcattgtggatataatgagaggcagcttgaaaaatttgaacaacaaaagaagccgcacaaatagcctcccacagcagtcccacaaaccgccccaaaatttcaacttgcttattttgcactatatattattattattattannnnnnnnnnnnnnnntattattattattatttcttgtttgtatatatcaagcaagaaccccaccacaattgccaccggcccccctcgtaattttcagatcatgacacatttttgtaccatcaaaggtgcaccattaattaatatatcctcaatatatattttttaataaatcaaagaattttattaataacaattgattaatataatagtctgcaattcagttagaattttctcgttgtagacatgattagaattagaattagaaaaatgaactaaataattaatcgcctaattctcagatcgtttaacaaaaaaatcaaaataaaatctgataaaaaagattgcaacatcacagttaaccttaagaatacttatattctgtttcatccactgctcaaagacacaacagtaaaaactattgcagcaggttcaacctcgtaatttgagcactcaactattgggtaaggtacgtaattgtactactaacaactcctttagtctcaaaaaacttgttattcccaaccactaacaatgatgtaatggtgagccattgaagagcaaagaagaaccaacaacaatacaaaatcacgtcacataaacaagactaaaacactcaaaattatattacacagacaagattaaaacactcaaaactatatcatagagacaagactaaaacactcaaaagcatgccacagagacaagactaatcacattagcgaaaatcgaatgaaagtagtgaaatacaacccccactaaactgcacctaagcccaaaaaaagtcagagagcctagccgaagaaaaataacaacctttgataactatttaagaacgaaaaactctattttttgcttaaattagaatttttttattattaattttaacaactataaatgtaaaagtaaatgtttgaatttgagaaagtttaactagttacgttttttttttgctaataatatataattgctaattatccataatattcgtcggccttgcaattagaagataagttgactttagtactagctgttagctaagatgctatgttagtctccactaaaagaatttatgtctaattatccataatagacgccgaccttgcaattagaagaaaagttgactctagtactaactgttagctaagatgctatgttagttattggtagttaggattttgttatacttcctttctcttaactgtattcagttagactctttgaatctattctatttatcttgagcttgtataagtgtatataaaaatagtgtttattcaatgagaatagtactttcatcattcttttctctctacttttcaatatccaacatggtatagtagcttttctgctttcgctattttttctttccatttgatcgttttctttcttctttgttcctccttcctctgcatcaatggcgacaccaacgacttcagttttcaatccagttgtatttgcacacaaagtttcaattaagcttgacgacaataattttcttctttgcacacagaagtaattatttaagaaaattgacatttaataaaaactagggtttcgatttcaattgtttctattgattatagtctaatatgattatcttcctatt

SEQ ID NO: 14985 - DNA, 8045 bp, Cannabis sativa
tgcctctttacattgtattttaacaaaaaaaaaagtctttccattgtaaaataaaagtttgctatgatgtaatatacaaccacctccaacaccaaaagttggaaacaatgaaaggaaaaaaatgatagtttctatgataagttattcatctaaaggacaaaatttcccatttgggcatattttaatattccaatggatcactatgccaggtaagaatcacttacgggtgaaaataatatattgtattttctatcaaatggggtcaacatacaaataaaaacctacattgtattaaaaagtagaatgacattttttttgttatgtacaaggaaagctacattcttataaaactaaactaatcctcaagtagtaatttaaatttagactatttcagctgctatttgttcaatatcaactccacatgtttgggccatgtattgagtttccggaccaaaatgtcagtataagcatcatcttgcttcacattcacatacccttttgtgttcagcacctgtaaaattttaagatcaccacatttagatgtctcatgcacattttgaacagttaccctactcgcgaaagccaccgaaaaaggtaagttatcagtttccacaggtaacagatataagagaaattaggaagctctaaactgagaaggaaagagtacaaaactgtaagctttaaacagttttttcgaagagctaataatatccactaccatgtcaaaaacatacaggcatcttcttactgatcaaagcgtttcaatgatatttaaattgtgaaaatcagactaaaatattttaagaacataagaaacataccagtatctcataaaagaatctggcactttctttcttggttcttccattcaaaacgcgtgataagttaatgacctcttccttcccaccattctgttgatttagaaaacttctatgcaagtacttagtcactattctgtaaataaaattaatatgttggatacaattttgacagagataagactaatatgttgaatatatcgaagatggaacttgaataatggctatcggaaataccttgttcgcccggaccatccatctagaataaacaaagaattcctcattaaacaaaatgtgaaatcaaaagtgaccaacttattagctcaaatgaagtaacataacaaatttgaaagggatggtttcttacgcgattcattgttgttgtctgtacatgaatttgtcacctggaaaaagagagaaagaagctatatatgaggtgcatgtaagaaaccaaaaagaaacactgtcatattctaagccaaaaatactaaacacatgccatttacaaatcctgcattttgtcctgaccaggactactcaataagaaaatatgtttaataaatgtctaagactactacctcatcgatcagattgagatcaagctcttcatcccccaaagggcacggtggtagttcttgatcatctaaaggatacggtggtagttcttgatcttctaaagggtgtggcggtagttcttgatcttctaaagggcatcgcggtagctcttgatcctctacggggtatgttagctcttgatccactaaagaacacagcggtagctcttgaccccctaaagggcacggttgctcttgatcacctaaagggcacggttgctcttggtccgctaaagagcacagttctaagtaatcttccaatgcttcagacctttctctatcatatttgggagttccagggctcaatgggctctcaattgattttgtcaatttttcacaactcattctgtagttgggagttacggggctcggtggacactcaaatgaatttgtaaatgtagcacgctgaacaggtgtttctggagcaatgcctatttgctctgggtttgataaacaaaaagttggtatctccgaaatgttcatttcttttcgaggtttgacggatttagcacactctacaatcttcaatttctttgcagaaaagagggatctcagttctgatgaaagacctgtaagaaaaaataatgtttagaccattcacaagtaataatctcagaagcaatggtgaaaataaacttacaaggtagtaacggctcaaagaagttatggtggagaatttgagaggttttagcattcaaaacagaaagggccgaatgagcagcttttattcgtttagaaaccaaatcactcgcatctgctattccatctttaagcaccctgtttagttttagcatagaaaaacagacaaatcagttctttagccaagttcactgaaatggatgaaatacattaaatagaaaaggattgaataaccagagcagctcaaaccttcaatactaaataattttcagcgagtatttaagttttcgaaggaaagacatacaaacaaccgataatgattctgattgtattgatattattgtgtttcactcccatctattacgcagtaagcattattaggataaaccaaaatcacgattataagtattacggtatgaaaatatgcagatttggataacaattacatactcgttagggatcaccatcatatcatcaatgaaacattttcttttactcgtagttcgtgcacgatctttaccggctggtgttggaatgagcgtaaactgtgggatggaagcacctgcattaggagaagactttcagccaaattttctaaagggaaaagtaaaggaaaagtacggttgtctgattatcagtattatgttgagaaattttcacctgactccactgcaatctttacttttggggtcctgctaagttttgtagctgatgaactgccttctcctttgcttcgagattttatattttctagcatctcagtgagtgtttgctcttcatcattatgattctcttcagcaaatggttcatcacattcttgaggtttattagacccagagaacatatcaacatccatgctttctacttgtgtgtaagtactgtttcgaagtttctccatttcagcttctgaagtgattggaccaggtgcttgcccaataatatcgcatgtttcacattccggctggtcactttctggaatgattttctcctgcccatcaatttgcagatcttcaccgtgttgtccaacgtgatcagtagattctcccaaaccattatctccagagtccattagcttttctatgcttccttctccatgcattgcatctttagttgatgatgcaatgttctcaccatgatctccctcaaatccacatgatctcacatggtttgcatcatcttcttctaagtcaagaagattttccgtgcatattccttcacgcaatgcatccttatatgttgatgcaatattcacatcatcatctccctcaatcccataagttctcagaagattcacatcattttctctaaagagaagtttttctgtgcttatttctccatgcactgcaccctgagacgaagatgcaatggtcacatcataatctctctcaatgtcccaaagcttttctgcggttgtttctccaagctctgctgcatcttgagatgatgatgcaatgttcacaacatactgttcaatcccacaagatctcacaaggttcacatcatcttctccaaagtcctcaagcttatctgtgtttgcttttccatgcattgcaaccatcgatgatgatgttaccaggttaatcatctcctccaggttatgttcctcgaataatgtaactgcatttcgagcttcttcttcagctgcataaaacatttcaaagtccatgcattcttcctgagaaaacctgttttcttgaagtttctccatgcttgcagtgaagctatctacaatacgagattttcttaaatgcatattcatctggaaagatgacaaaacactgcagcaagaataaataagaaagttaagcatttaacatataaaaacacaaataaaagaattagtaaaaatgattctttccaagttaacatactcttctaccggagtgtagtcagcaacataagagttatcattgctagcagcttcctcagaatgatgctgcacatacaaatataatgacatttcggcatgtcttccatggaaatttaacaaaagaacaaaaaaaacagacgcacaaatgttctaagatatgtatagcttaagaaaaacaaatgcttgatgacataccatgtctaaagcatattgtctgatgtcgaaattgtccaatatgccatctgtttcataccgaaccaaattaaggaaaataacaaaagtagaagagagagtatttcaactgccaaattttaatacctttaagtgttatcttttcttgggggagcacgttacctctagcaaatacaagaaagacatacataagcaacatcattaaacaaaaacatacaatattcatttttcacataatttataagcctcaaaacttacccaacactagtatcatcaaggatttcaatatcaaaagcatcaagtgcaaaactttctggtagtgtaattgagaaacaaggcgtacgctcctgcacgttctcaggcatacgtgtttttgtacgaaccacgaagtcattgattctgataagcacctcttggcaatcatcaaacaagtattcaactttctttgagtatattctaacaacaccaagaagaaggtaccccaacactctatatgtaacaagttgaaattcgtcttgcaaaatccaatctacatcaggaacaagatgattaaacaaagcaagccagaagaaaacaataacaacatctgaaaggtgtaaagcaaaccgtacaaccaaataagttagtgcaattctctgcaactattatagtcatacacataacaactgggtcaacaacaaaattcagagagcaaaacattctcaacaaatgtactttcacttttcatttcccaaaccctcttagctcaaatgattagacatgtggtttgttcccaaaatgtttgaggttcgaggttcgagtccctcttaggtaacctacatagcaattgctatagtttcatggttcccaaatttcgtagggttaggcgggatcctagtttcaaaaaaaaaaaaaaaacttttcatttcccattgtaaaatattgttttctcaatagcatcaactgtcccactcaacagaaaaacaccttccaaaaaggtattgtcgttctccaacaacacttctcataagtcataacctagttctaactaagataaagaggctaaagagaataacaagttagtggttgttccataaattaacaaaatcagatgtagtttgaaagaaaaagaactaataatagtaaatgaaattgttggcaaccttcgggtataagctagttccaccattatagagaacacccagatagataaacgacctatttaataatttgcatcaagaaaaacccatattgggggtaacaaaatggagagaaaaaaacaggaagaaatttctcaaaccaagtaacaacattcattcaaaatgaatcaataaacaaaaacaaataccaaaacaccaaacccaaaacatttccaataatgggttccaagaattaagggcagaagaaacaaatccatgttagaaattcaaaaaaaaaaaacaaaattgttggaattttcgcgcattctttcaaaaacacaaccaaaagcaataaagtctaatagaactccacaaatgtaagcttagtttagaaaatgagaaatagtgaagagaaaaaggagaccaaccaacagaagaggggatatcagttcgttggattagaggttttttgagccttttgtaacaataagcggcaacccttatggcagctgaaggtcctgactttgagagaagggtttgtgagctgaacatagctggcttcttcttcttcttcttcttctccagattggccaaagtcggttcttttgagtgcagagaactctattaagcattctgcttaagaagaaacggtcggctagtgtacccaataagactcggacccaaaatgggaaacaaaacaaaaaataaatacgaagtaaatcagttaccaataacagcaacaattataaaagaaatgttttttttttttaattactatttattaaaaaaggttcgatttttaaaattatattctagaaaagtttataaaagtaacacctttataatttaaattattaatattaattaatttttagttttgtcaaaattaatatagataaggactattttctcgatatttgaaggtatattttgagagatgcagaacttttgttagcatgactttccattaaaaaaaacaaatgggttttgatttttttttccttaaaacaaagacattattggttgaaaaaattataataaataatttttctttttttgaaatggaatagtaaataaattttatgcaagtaagacatcacactcttttgggtgtttgcttgtgatttatattagtgacctgtccaattttcgtcctttgacttttttctaaaatcgcataaatttactactctcatacaccaacattttattggaaacattgggatattttctcattaaacaaaaattagaagtttttcaaacctgacattgaattatacttattatggttttaaatgctcttgagcatttttattgctacaataacaaatattgcatgactatcatggtgtttagccggaccggttctaaaccaagaggaatcaaacttatatttagaattcactaaacaaaataattttgttctaaaaaaatatataaaaaatttatgtaattttcaaaatactagataaccttacaagaagggcccaattcaaaatattagcgtcttacgaagtgtcatattactattggtgtaatttaattacagatcgtacttatattactttaataataattgtaaaaaaatactaaccattgataatcaccacaacacacgtaatagcaaggctcattttttatataaaaaattactctccactcctaaaatctcatctctcattgatgatatcacttcctaatagtaatgttattttataacaacattattttaaggcatcaaggtatttaacactactataaggtaacattttataattggttagctattttttataatttttaataaaataaaataaataagacataatattaaattgcaccaataataatattacatctcacgaatatgttaaccatgcacgatggtgtcttttagcatttcttattttataatgcaagctctagtcctctcataaccaagtgttgtgtggtgtatcagtggtaggaatgcctttttattggaatattttcttatttgggttaagggatgaccttattaaaggtaaaggaggatgatatataaagtctcaatagttgccacgtggtccccgaaattgtttcagctaccaaatgttagaattttatgtcctaaataaaactcaatttattgtaatcttatttattttcaataaagatcagaaatcatatcttaatcttgtcatatactttgttcacatgtttattacattattataagtttaatatatacttatgatgttaggtgggagggagggagagtaggatggatggagaggttagagagaatgggaagtaaaagggatagagaagattgttaatctgctttgtattgtttggtattaggtgtgaggtaagaagaatggagaaaaaatttatttataaaattacaaaattattcttttaaaaataaatttttattatttttttaagagtagttattgtattttgcaaaatatattttgtctagttctacgttccttctaaatttggaggaactaaattttgaaggtttgaagggaaaatgtctccctccatctctcatctccctcttgccagacaaatgatttagtctctcattctatcactttctctccacccctctccatccacccatctccccctcctaccaaaaatagtgtaagttaattaattgtcaactgtaaattttgttctcggtactcactctcaccatccagtgttcttcttttattaattaataatcaaaagtggtaagaaaaaagtgtagacacacaacacactactttgaccctaataataataatgactcagaaga

SEQ ID NO: 14986 - DNA, 8110 bp, Cannabis sativa
ctcaaagattcaatggctggaggtatttcgatccttaattatagtgcatatatgttttattaattccgcattttatacataatcacatatatttcagtttatacatataaatgtctaacaattttaactattaataaaatgtaaaaagagtataattataattatacttgatcatactttaaaaggttacacatgtaactcatttataaagagagtgtaaaaaaggaacaatatagactgtccttgtattcattcctctatatgtataattccatcacaaatttgacatctcattatagcaatgaagatactcttacaatttaatttacattaatatgcctattcaaaaacatttattgttgtattatccaaaatgccatatcaaacaactacccaaaacaataataataaataaataagacttgaagtcaagccgaagaattaatgaaagcttaagttgcatttcttcggccacatttattttgcctttatttatacccacaagccatgatccacgagggaggtacgcggtggagaatgggtccacctttgtgtgccttaatcatccacacatttaataaccaccacaaatttgtagtgactagtgggctctacctctaagttttgtccagttcccactacaatacaacttcagctcttatagtagtacccaacttacattgttagttatttaataccatcttattttaacttataaaacaatgtctacaatgaattatcctaagtggaatttaccggcaaaatatatgaaacgcacaccatacgtcaatgtctaattacattatacgacataaactcttatcttatcccttgatgatgataatattataataaaattagtgacctatttgagtttatatggatatataacaattaagttacctaatgtagttgttgtttatgaattatgtttatgcttaggccaataaagtctgagtcagtggaatgagaaaaggccactaaccaatcaatctcctttatcttagtcctcctcattagaagtttccgggtgttatggtacaaactacataagcataatcatctctttatatctcgttatctagtgttatctttcctctttggaattgttaattaaagtatgtgtcgttttgctctctcactctctctactacctaattaaggtttatggtctataaatacatttgtcttctcttactctaactacatgtacctctttcctatccttacgagaagagaaaactgtcattaaacaagcagggaaaaaataagaagcaatatgggtggaggcaacggccaaaaggcgaagatggctcgggagaggaacttggagaagcagaaaggagctaaaggtatatataatacaattaatgcttttattatttattattattgtttaagaactttaataatagttttctataaatttcccaatctttatgtatgcttttttgctacccgattagtaggactgtggtaagatctattcttattgtcctttttccaatacccaattgagaaaaagtcagcaaaatccttacttaagactcaaatttggcttcccattaatccagtagaaagtatatagtttgtatatctttcattttcattatgtttatgggtattataatatgaatagacttatcatggttcctctcttttgggtttttaggaagtcagcttgaatcgaacaagaaagccatgtcaattcaggtaagtacagaaagatgcaaaactccttgatctctctctaatttttcatccgaaaagactcttctttttacaaaaatcagtattgaattttgcaattttcaactttcaactaagcttccaatttattgtgaactatggtttcagtgcaaggtatgtatgcaaacattcatttgcaccacaacagaggtcaagtgtagggaacatgctgaagcaaaacaccctaagtctgatgtttacgcatgtttccctcatcttaagaagtgaaatggtcatgtttatatataaggaaagagctcgtagagatgtctttcaactgaaccttcatcattgtatcttattcgccctttaagtttgggagtttatcaaaatgcgtgcgaagtcatgatatgctttaatattaattacctcaactgtattcactataaactacaaacaattttagtcccccattgtgtgttgaattacaagaatatgcttttttgaacaaagaataggcttgttttaatttcacgatatttttcacaacctgaataaactagaataaaattttgtacaataatggcgcctgaggagatgaactgcattttatactcaaaaaacttatccaagtcaatctcaagattaggaagtggtacgcagaagagtgatgcaccagctttgaccatcaaaaaaccaaagggatacattattttacatctgacctacaaatgaccaaaaatatacagattgaaaaaaattccaaaataaaactacctaaaggagaaagcagcaattttttcatcaggaatacttgttatttggataatcatagaatgattaaagttaattaactataatactaaaacataatcattttaatgcgttttgggaaataagtataaactagtagtgacaacaaataaagatgggtggtgtcaaagtgataaacgtttgggtaaggtctactcaaagcactctgtattaatcccttgaagacacgatataagaaataagtttacaatacaaatagctcgcagggggtaaaaatattatgaacatcagaatacaacaaaatccagatggatggccttttcaaggaaatcatgcaatttagtgaccattaatcgaaaaagaatggtctgaaaagaatatatgccacgaccggagttttaggagactataggctttgacccttgttgaaaaatattgcttatgatcctttaaggtaatgaaaggagcaggattttcaataacagcttttgccagaggatgatcaggatatatatgaaatgcatgtttaaattaatggaataattcttataataaataaaaattgattatttttatttttacacttcaaaatattttttttttctttgtaattttatggaaattcacatagcaatacacataacaaccaacagagcaacatctgaagcaactcaaatcgtaaatttgagaaaaaaaattaaaaagtggtatatggagtaatttttctaagaaaaaataattaatttgcgacgtaaatacttaagttatactcttggtggcagataaatacctatgttttttttttagcggtaaacataacctttttttagggttatagaacatccgtaggtacctaaccgttaagtgataggtaagtacctacgtggcactttgtgattcgtttaggtagatttttattttggtattttaaaaaattatttaagaatatatattaaaatttaaaataaaatgtttttttttttggaaatagttttttctaaaatagaatatattcaaaaaaatctaaaaatgaaaaaaaaaaatattaataataaaaatataacttggtggaaaaaaaaacaaaaaataacacaaaaaccttattatgtgccttgttctcaagaaacccaatcttgttcagttgttctgataaaatccaactccaactttgacacagacaaacttttcaaaacataaatttgctacctgtcaaagaacaaactttgaaatctgagaaatatattttttttttcttcttcaaacaactaactttttctccaataaaagatctccgtaaacctaaaaataagaatcgcttcctcaaagtttaaactgaaacaactatatttattttgtcttacattttgaacataagaacaacatttcagatatgagaaaaagaacacttgcaaactatttgtttttttgttttcatttcaattcattgaccaagcaacttgtttcaaaaaaatttcaaaatgtcaaaatattttaatagacgaaactcattatatatcgatgttatctgtatttccgaacaagagacatgtggcatgaaaggagaagtatagcctttcagtagtcactaaccatgtcccctttctaaggctaggacacgaagaagcttcgcggatccgggaatagataaagatcaaaggatacttggacatttatcctgtcttactatgactttagagacatggaaggcttacaacattttgggatccgaaaatgactaagttcaaaatattactaagcgatacctagaaggttactcgaagggtccgtgacagacgcttgaccacccaaaagaagtcagatgtctactgtgaagaaggacccagatcgcctagcgatggttatgctttttctaacacaggatcagatcttgtctcctatgtcagatcatggtaatgtacacaccccatacgcctttttgcctgacggttattcgaggcatttactttgcaaggtgaaactttttggcgaaacatgtcctttacaaattattgtcccctattgtccagctgcttgattgcacaagcacaaaattacattctttggggcccaatagttagctaatttacatatattttaccctattaatgggtttatttcaaaaatcctaagcatgtcatgagcatgtccttacacgtcatttagcctataaatatccttatatttacacaggaagggggataaaaaattagatagtcaaagctctgtcaaatttactctaagctttcttcttctttaagagaaaccaagagggcagagttagggtttcttgcaaacactatcgtgaagacattattcaagacttttaaggtcaatagagttactcgtggaataaggattattagtgcctgaaccacgtaaaaaccattttcttctttattactttattttattatttcttaagctcttactttattagtttcttaaaagtctcgataaaaattttggagctttcattgagagttgaagaaagatttaaatccacggtgctactgcaaccatggtgtatactccaaaatagttactaataagaatcctcaaggcggcctcgatgtcttcatggaagatataagccctctctctctctagaacaagcttagccgagcaatgtgagagaaagggatacatcagaagctgagaaccgagagggtgacccaagcaagaatcgtaaacatgttaacaaaaatcaaaatgctgaagaggaggaagaagatgatgatggagagtatgtcaaaggcgggcactacaaagatgggtattattatgagcaagaccctgaagtggctcgagtgtcgaaggagttgcacaaaatccaatagaaactagcccgtcaagagaagctttcttaagaaatggagagaatgatggcttgcctccaatacatatttggagatctagaagaagaagtttctaacaatgatccttcaatagagtgtgtcggcataaacaacagagaaaaccttgctgatggttgaacctcagctcctgcacatgataaggagaaggaaaaggtgggtgaccctcagaaccctacaactctcgtatctcctaggaaaggcatgaatctagccaatagacttgtataggtgcagaaggccaccgatgctcacaggcttggacgcccttccgctctgaaaggtcctgctatgcaaaaggggactagtgcgaaagtatctaggcccaggggaaggaaaacctaccccagtgattccattaactaggacaattggaccaggggacagtattctgatgacagttggtccactacagatcttcaaaggcgtcttgatgctaagtacaaaaaggctaaaggagagaaggcgaggccacgaaagaatgacctcagaaaccatttgaatgataaggctcgcagacgccacctcctagacaatgacacaaaaaggctagaagagaaaatttcttctttgatcaagctcgtctagaagtagactggggccgtcaccaaatctatggttgtggacatagagtcgtgtgtcataaggatcacggaagccctgcttccaaagaattccaaggtgcctcaaatcaaactttatgatcgacgaacagatccaacgacccacctagctatgtacaaaaaaatgatgtaggtggccatagtaagtgatgatgccaagtgtttgtgtttttccctgacactcaccaagtctagaatactacaagatagtgagttgggaatgagttatcaaagtccgaacttccatcccaaagtttccgaagtcaacttagacgcagggctagggacccctcccaggatgactgctatgactcgggtctactcaactccatgacatcgtctttcttaccacgtgttaaacattgatgtccacatcaccaagaaatttttttagattaacacgtatttataaaacttgttttaaaatcataaatattataatatttaaaaccctttttaattcttttaaaataaaagataatatttatttaatttaaaatttaaaatttaaattcaaaataataccatatatttatttaatcttttaatttaaataaataatcttataatatatttaattcaaataataaaagataattatcaatttttaatttgatttattttataaataaaatgataaaacaaaaactaaatggatccttacatgtcacctacacgtgtaggccatattttaaaatccaaaattattttttcaattttgcgataaataagatttattatttattttaccaataaataataattaattaaatctcattggtctcttatttcattatgaataaaataaatattattttacactaaaataatattttttctatctctctaatattatttaagaataatattatatttaactaattaatatagtttcatcaaataaaactaaatagttaaatattactttaattattcaattcataattgatataaatattcaaaataataatttatacaaaattactattttcccttaagaattatttatcatagaaattaattctttctcaatttattcatcaagtcaaacattcccctttacccagggacggacccagtaacattaatgtactaacaaaaatactgctttttaaaaattaaatgcaaatttttaatttaataattataaacccaaatagtagaaaagctcccacaaaattagataaatttagtaagagtaattataatgtagctataaatatttttttttatgataaataagcccccacaaagtaaaaatcctaagtctgtcactttgtaccatgttgtataaaggtgatctagagaccatggacctatatttcgaaactccaataaacaattgaccattattacgaaaaatataaaactaagcaagtgatagtactcacataggtgaggtcaaacccacaggaattaaaatcgattaagaactaaattagacttatgtttctatttggtagaaaagaataatttagaaagaacaatatatattgacagaaaattaaagaaagtgattaaagttgtttaactgtgagattaaggatacgaattagttgtttcaattacccaattgttaatgctatttaaatattcttcttccttttaatgatgacagattataatataacctaaactcttttcagatcataaaagtcctaaattatatgataactactgcatctctaagatataacaacatataatttatattaaataataatctaaatgttgtgggtttttatggttcatatcaaagttataaaagtggaagtaaaatttgataaaatagtttttatctaaaataaaccataagcccaaggatctcgacatgatgtatatgtatagattaaatgtagactactgaaaagaaaactatacctcttgaagcctatcagggtatccttgattcttttagtacaattaacgatcacttaatctaaaaacttttgttcaagaatccacaccttgattttccaaaccagtctcaacactcagaaataaagtgagctattagattttatttggatgaattaatttaaaatattacaatgtgtactcaactcatgagatattgtaatgagttaggattgttcattctcaccacacctgtaatggtgtatgcacgtgagatgaagagagagagagaga

SEQ ID NO: 14987 - DNA, 3835 bp, Cannabis sativa
gtttgggacgaaatgctgcatgaagttggggaagaggaaaaaaggaaatcactttggtctcatagtgaaaagttggcattggcatttgggatcatcagtggagctttcccaccaggaaaggcaataaggattgtgaagaatttgaggatttgtagggattgtcatgaagcttttaagttcattagtaaagttttggatagggaaattattgtgagggatgtaaacagataccatagattttttaatggtacatgtacttgtggaggtgtatggtaagagatttcattatataataaaccatataatcatattccaagatccataaatatgacataatgaaaagaatttggataattgaatcagcaaggagtttaatttcattattttggagtatacaacttaattaggtcttttgaaaattgccccattttgaattattaagattataagaaactaatttagtttttgttataaaaagattttgtgaaaaacatgtttgtttttgtttataaaatcaaatttcatggccaatatttttatgaagccaaacagataatcaactcaataaaacccttcataaaccctatcattcataatataacaacaaaataattaactcaataaaaccctaatcatggctaccatggagactaaaacccccaaaagaaaaacctttttttcagtacaaaagagaatgaaatattcaaaggcaactctcataaataaatcattaaaattcgctcgtaaaacactaaattctggacccccaaaatgttaaggaagaagaactcatctaaagacgaatatcacaattcaaaaaagagaaaattacacaaaggaactttctcagatttttcccgatacgatcgaataggggtggtggagtttacttggaaggagagcccagtatactagcttgctgcatctctagatcggctaactgttgctcgcggtccatctcgatgatgagaggaacgaccaagatgaggaaggtggttccggcgatccacgccgccctacctgtgctctgcagaagcttcttcgacacgaaacccgcctctgaaacggtgcgtttcgtttgctgaacgatggtagattgagagactcttgttacaaggctcctttcgccgccgccgccgttgttcctctgagacgccattgttggaatgagagaagaatttgaggggctttggttcagagaggaaaagcttgaaatgtttggtttggttggaatttgaggctgtggctaatctctctattttctccttctttgtaagtgggcttttgagagttgggctcaaagcccaaagttatataagacccattattttttttttttgtttgaactcgaaatttcatttaattagactaacttggtctcaataatgactatttagaaggaaagttagactccaaaaacatacaatcagcatataaactagctataaaataatcctttaataaaaattaaagaaaagagaagttgtttacaatcctcaactacattactaaagataggttgtaatgcatttaactttcgaacaacttttcactaacactagacaatcagactcgatggtactggcactcagaaaattatgcttcaaccacgaaagcacttctttaaaggtcatgacttatgcaatttttggcagaactcgtccatgctgcaacctcaaaatcccagccacaacttaactttggtgatcccgaataacccgtcaaagccatgcttttcttactcgttaaaaagaacaacgtcaatattcaccttaaatttatcaaagttatatgagatccattattttagaaatatagttttctaaaattttggattaagtttttaccaatttaaaaaatgataaattaccgatcagattttttattttattaatgagaatttactgtattttgcaaaataaaacatataaatacgctaaattagattttgttcaatatattaattaccctcattcatcgttgataatagttaaaaatattggtcctatactattatttcaatctcttgaatgatctaagaatttaaaagattaaaagagataaaaatatggtaaatgcacttataacaacaatcaattagcagaagaagaaattttaagaaattcacaccacatggtttcttaaaactgtattttttcaacctaaatatatatatttagtaagtttaagatgaagaagatatgaatcaaggtattttatgtaatataggtataaaatgaatccgattcggtaatcttagaaagaaataaagaaatttagaatcaaatcaaaatgatatgtattaacttatttttcttgtaccattattatttatttcttttatcaaattatttttttacttttagtaacaaagtatatgtttaagattttatttatttatttttttcaaaaaaaaaaaaaaacaaacaagagaattgagacttttttctacatatattatttttgaaaagaagaataaattattaggataggattgatttttttttttaccaaattatatttatagtatcatcatgttccctttggaaaaacagccatttgtgagatttaatttaagtgatgtattattattattattattatcattttttggctttaaattacttaagttgaaggatgaaagatttcaaatcttgaataggtctcaagagtgcaaccacttgtagatgcatttaatagttgtgacacagaacaagaaaagtgcataatattaatcaacaagcttaagtcctctctttacatactgcaaacaagagaatggtaagttgataatgtgttccatttctatggatttggatgtaagggtattcaatataacatctctatcataattcccatcaatcattccgaaacctttgcaaacaaccagagttgtattgcatatccaaggaactgacacagtgaatcccaaaccagaatttttctctccattggagcttgtcttttcacccaatacatctttataggctcggccaacttgagaaacatatttccccatgggcaagatttgctcgagaacagatggaacagagccgtcgggatctaagagctcagagtctgagtgaaggttcaccacaacagtcccatgtttgggatgaagctgattactgagagcttttagaaaaggggaatccgggtcccataattggcgagggaagatgtcctcgccgtcataagcatcaatgaaaatcatatcatataagttggtgttcttgagtatgaacttctctgcatctgactcataaaggtacaacctttcgtgagtgcctttccacataacttcatccgtcgaatctggtttggagaaggctcgattccctgatggagtcatgactgagaaagctggaaaccccatagcttgaattgatgctgatataactagaggatcaatttcaactatgtgaacctcagcacctgaaagaaccaaacaagcgttattagtctcaaaatttcttatcgcatgttttgaaaagagacaactggccataaaattagcaagacacagcaaaagcaaccaaatgaaacatcagcatttgctagaaaaatagcttatttactacacattgggtgaacattacttgttcatcaaatttcaaatgaagggtatcactagtgtagaagtttacttaagctctcaatctatgaatgtaacatgttagagtttcagttcacaataacatgataggaacacaaaaactatcattttcttttcttgtaaggccaattcgaatacataaaacatctctcaaacatggcccataagattgttgtaaatctgaaagcaataactgcaaaacacaactagtgaatgcaa

SEQ ID NO: 14988 - DNA, 9103 bp, Cannabis sativa
tttattaataacaaatatatttgtctttggaaaacctgaattctatgtttatattatagttttttcggaaaaatctatcaatatgtgcagaatgtataggaaaaagtaacaattatattcaatttctaaaacggggaaattgcctttccgggattgtggctttcatgctgggaagagtactggtatttagataaccaagttccaaaacaggattagcactatttgcagcatgttaaacatagatgagtgagggaattttttgaattgcccaatgcccaatgtccatttcttaataaaatatactgtttgtgagaaaagtaaaacacatgtaaaagatggttagtgtttatgtaacaatcttatagctgtgtatctgtgattatagaatgatctaaggagctttatctccgtgttaaattgaaagcatatttgtttctttatgaagtagaataaacaaattggttggccttcttcttagttacgtcggatgcttcgggagctggtagcgagagaagacgcagttcgaataggggaatttatgctcattcaaataattcaacccatgaaagagaacctgctggtgttaccgaaaaacttaccatggaaggaatcaacagggtcacgaggaacttctcgccatctttcaagataggacaaggtggttttgggacagtttacaaagcgaagcttgcagatggaacaacggttgcaatcaaacgcgctaaaaaggtttgatataagttcttaataaagtaataaggaggctggttttagaaaatcagataatgtcatcatacaagtgttgacagagctttttgtaattttctttcatttgtgttggaggaagaggatgactgatacttgatattcatctgtgttgtattatctttctctgtagagtgtatatgacaagcatttgggcgttgagtttcagagtgagatccgaacactagcacaggtagaacatttgaatttggttaagttttatggatttttggagcacgaagatgaaagaattgtcgttgtggaatatgttccaaatggaacccttagagaacatttagattgtgagtaccttgtcagccttgagcatttacattgtgtgcccgtctatcattatgtctatgttcatgtgaaattaactatttaacatacaagaaactaatgcaggtgttcatggaaacatccttgacctcgccgcaagacttgatatagcaatagacgtggcccatgcaatcacctatctgcatatgtacacaggtttttgttttctagccgcaaacttaatttagaattagttaataccagtattggttccaaatagagatagtcctaatcatgtcgtgagttctttgcagatcaccctatcattcatagagatataaagtcctcaaatattctccttacggaaaactttcgagccaaagtggcagattttgggtttgctagactagcagctgacactgattcaggtgccacccatgtgtccacccaagtaaagggaactgctggctacttggatccagagtaccttcgaacctatcagcttactgagaaaagtgatgtctactcttttggtgtgttgttagtggagcttgtcacaggcaggcgtcccatagaggcaaaacgggaactcaaggaacggataactgtgaaatgggttcgaacctcatcttctttactgaatttcttgaaaatatgtagattgttttcttatgttctgtaggatcagtaagtgtgtttccatcacatcgtcttcggaaatgtaaatatggcttcatcgacctatgtaaccaagctttcctcaaatgtagaacttgacattccatatttttgcaggccatgaagaagtttgatgatggtgatgctctttcagtattggatccaaagttggaacactacgcaggaaacagcctggctattgaaaagcttcttgaactagccttacaatgcttggcaccgcgcagacagagtaggcctagcatgagaaggtgcgctgagatcctttggagcatccgcaaagattacaaagaactaatgggttcagatttccgttcattttcaactcgttcccaaaggagctagagcaacagtgtgcttccaagataagtaagttgccatgaatcatcaatttttttatttcaacagtgttaatccctaatgaatttgagttatagagtatttgtgtgttaggatgcaacaccgagcagtgtgtgtctgtgtcgatttcaatttgttagggaacccagctatttgtaacgaatggattggtagggctaagaggggggagagtgcaaggaatgcgggtagaattgtcttctctataaaaacttagctagagatgaattcattcagatccatgtactatatttttcgtgaatttcaacatgttattcacattgggttgctatgtatactaatataataatttgtgtattgtatctattgaatatttgtttcttcagccaaatatattacatttataattaatattatttgcttcaaatacctattgcagactttacagtaaataaagtcaatctttggtcccgtcaccgtacacagccctggcaatagtggcacttcatgtttacaaattcacaatacatataaattataatacacacattaaatctctcactcccaaccaagatgataaagaaataataataataaaaaaaatgaaccatccaaacataatagggattccatcatgaagatatcgcttggtgaaagcccacagaatcatatgaagggcttggtttaaatttcttgctttaaggttagaaatttcaacagttcctaaaagttgctcaacttaaaatatgatgcaaaaaaagaaaaaaagaaaaaggaccactcttaccgttgtaaattcccccctcactctaccaaaatgacattcaatattgataagttgcaagtcttttttgtgttttttctttttaatgaatattgaatactcattatgtacagaatgatacttacaaaacaatatccttgtggctgtgactcctgtctctaaaatcatttcataaaaattaggctaacttatgaagataatatacaattggaaatactaattctacgctttaacttatgaaaagaagttctcttgttttaaactctctttcacctcttccacaaaatttttctttttgttttcctatggcatcaatgcaaaattctctctttctctctctttttctctttttatttagtgaatcttttgtctattaagatctagggactgaatcctgccgagtcaactcataattacgatccagcggtctttcatcctcactatctacaggatttgcttttgaacaaaggaagaagaatgatgatatgtagattgtgacatgccaaatgctgcaaagaattaaacgatcaactaagataagtaagagagagaagaacaagagtggatgaatcattatacctatgccaaatccagtagctttcactagtctccagtttccagcttatggctgccatggctaatgtagtaaagcctgcaagtaaatagccccatacatatcgtctaaagatcgtcttcacaacattacgaagccacactctaactgcttgccatctgcacaaagatgagctttaaaataacaagttctatagcaacattttgatctaaatgaggttttgagcaaatggttagttaattcctgttcagccaagatattttaattcaaatcaatctcactttcatattcttattatgtttttatggataaataagagcaaaaaaataaattaattaacaacgtagttctatgcaagataacaatgacaaaatacatatatttgtataagacagcaataaaattcaccaaaataacaagagaaagaagaagaagaaaaagagagggagtaattcacaagagaaacgatatattttgttgttttttggtttttagcaatggtataaagcataataataaagtgaaaagaacaaaatcaagcaacattagagacaaacaaacctattactgtagtttagatatattatattatataactcgaatcactttgcccccttcgagggcaagatcacgggattcaaccacaaaaattagcaggagcagagtaagacaacgtttaaacaccctctatatatgttggactgtgcaaaagataagtaaaattcacaaccagatatgataaatttggcgttaacccacctgtcaatcatatttaagcacattccaatcggcaaggagaacgacctaagcttagttgagtactctacaagccagccaacaattagacccaaagagccaattgctatcaccagaataatgttggaagacctgcaaaggttgacatttttagataccaggcaaagtagcaacatcaagattgagaagggaaaaagataatgaggagagggaaaacatgattgcgattttgaatgcatagaccactacatatgtttttgagttcaaggtacctggtagcctttgtaattgccatgagagcagtgatgatggcgagagctgtgtgtatcgctctcttgaacacttcatcgattgtagtcaggtacacgaaagtgctcaccacagccatgaaagacagccaaaagtcgaggaactgaaacattttccaatacactaagtcctggctagtttaatttggaattcttaagaaagaacaattgtcaaacaacaaaattgttcaaaaaggagaaaacctcacccgaaacctcaacctcaagaagaggagaaaaaaataaaagaaaagaaagaactttacctgtaagacattgaacgataacgcacaccaggatccaacatcacatgcatgatatagtccacttgaaattccactacatgtatatattacccactctgctaatgcctgtatagatcccaataatttgtttagtacagaagttatcagcatcttcattttaattgaaaagaataaatacgagcactaccttttgcctaagggcccaaaaggcaggaaatacagctgctacatttgatgcaataagagaaattgattgtattatgtgccctgagattgataaattcaaacatagtagagtaaatctaactatgaaggatgcaatttagagaaaacaaatcaatgttaacgttttgaatttgaagagctcgttgaaatcatttctgaaagcaacatgtaccttggtgtgacacaatctcaacactacaatcaaagcctccgtggtttcgatcacaagcacagaagctaagggcacagaaaaaaataatcattactcattgactgtaactagcaatgtctcaaagaaaagtcattaagccaaaaaggtgcagggctgataaaaaaaaaatacctgtataatgctaaaccacttgcatccagagcaaatttgcaatctccatgagaggaacatctctttggacatctttcaagggaaatagacatagtggtctgatctttggaagcaatacggctctcatttctatgccttattccaaaactccaggttccttccctaatcgatagaatgtaaaaatctacttttccttcacttgaattatataacttgaaaaacatggagccaccactatttattgtcttgtttgcataatagtagtcccagctatcaagcgacggcaatccaccaaacctagtgtatatttcagaagtaatctttgtgtctgatgtgagttggaagtggatatttcctccagctgcacctctaggaatgtccataataaaataagtccatgacttatctggttctccattaaacgtggagttggtaagaatgggctcaagaggaaaattggctgaatctgatgacacttttccactgactggcaaaaaataagattcaaatggcgcggaacctctcctgacaactgtctgcagataacaattcttatcttgtcaatcaaatactcctgccaataagtttcttgatgcatcaagatgaaaataaaacactacaaaaagaaactaattgtagagatgctttcaaggaagaagctaataaaaatgcagtcatctctttattcgataaagcatcaatgaaatgttacttccaaagcaaaatcataaacgtttgactactatggtctaattttattggcaagtaagatccaactacttaaaacaaaacaaaaaacatgcctttaatatgcttaatatattaatctaatctcatacttgccttttaactagtgcagttgtgaatcctatctgctgctaagcattacgaagtaaatatacatagtcttgtcatcttctcacccccactctctttctattcaattttggcaatttccatctttatcagattagaaattatcaaatccaaaaacaaaaaatctatgatttctggttgcatgctcaaaatctaaaacttgctattgaaaaaccaactacgtagtgaaaattaaacagcagttgaaaatagtagaaaactccttgaagcaaaatacacacaagccacagaaatttcacctgaaggatgtatttttcccaagtacaatttggtccagccttccccagtggacactgaattactttagactccatggagtagcagagcttattatttgttccctgaactccaccaagtactttcgaaagattagaaggcaagaaggaaatataccatcgaccaatctttggtgaacgaatcaccaacggggctttattgatgtcaccggaataatcgtacagaactgttgatggcatagcaccatgtcgaacaatgcacattaaatttatttcactaacattgcctgtcttatttggaggagttacattaagactgacattccttgcagtaatacgtaactcttccgccactcccattatgtccaaagtgtagaattttggttcaccatcaccgtggcaagaagtttcaaaattattttggcaggcaataatatctgtcgtttggttatataacatagcatttgaagaattttctgccagattatagttgctagttagagcacatgaaagtgaatcaatcgtctggttgcagtattggccccacatggttgaggttgtacatccttccacactaatgttggcactgaaagaatatgctgggccacgattaatctgcaatgtaaaggcaaaattattgataaaatacatcaccagtcacaacatattcccatttacaacaagcataactggaagactcatcgtagcaacaaaaccacctctctaggatgccaaacaagtaaataaaattagactgtgatgtggatagtaagcctagtgaaatctgctatttctgtagattttttgcttatagataaaatacacatgtgaaaagttctctttgactttaaatacatgacagtagccgtatggaaataacagacagagaaatgacaatagtacaaaactcatggtaagaaatatagtagaatttaagtaggccaaaacactaccatcttcgactgtgtcctcgtaggtccaacgccattaaaaagaccaaaataccaaactccaggggatatctgaacaagaagtttgacaattagactttctagtaaattaaaataaaataaaatgcactagttaaaaatagaaaataaaagctctgatagcttgcataggttgtctccacccatagaactagaaatgtgatgatattgtcttgaaacaaaggtactatcaaagtcgaaagattctatgagacctgttcatttgtcaagctaagtgtgaaatttttctgcattgggtagcactgctccccattttgaagagcttgtattccttcaaatgaggtattaaagacaggaactaaaactgcaagagaagaaaattcaatcaataccaaacaataatgagacaaagcactatccatgttcatctctatatggtaaatagcattatcattgagaactcaagctgcagaaacttcgtcgggtgaagctagtgcagtatgtgtatgcacgttcataatcagtataatatcatacaaaagtccaccaaaggccacaaaaaccagatgaatgaacaagtaaaattccatgtaggcgttttaaatcaaaatttacatttacctgaatggccagaatccttcagagaaccactactatctgtcagtgggaggctgccatatctgaagcaaattattggaagccgacttctaggaatctttgccagctttacagtcccctaaaaccaacacaaatatatgaaaatatgagatgaaaagggatgagaggatttaatttgaagactttaacttcttctttttcctgccatcaaggaatagccttttgacagtagaaaacaagttaagaacctgaaaaacaacaaagtgatagacaccccagttcatgttgtattctatgaacctgaaaacatacttacaaggtctacatctgagtgcaactccaatgacattgaagagaaccatggtggcaattcaactagtacaaaccaaaacaccaaaaccacaaattaacaaaaatgcataataaaccataatatcaggatatttgacctactgtgatctcttcttcacgcgtttaagatgaaattcacttggtatataagccaatacggaaaagcacaggtaattaaattgaacaacttcttattttaaagagtgccaaccacgaagccaacaaaaatgtgcacaaattcagtgacaaagatactatcttagattaccgtactaacaaaagtatggcactttcccaatatcaacattaaaaacattaacagaaaaatatcaaacaatgctgcgatgttagacttatgagaaaaagtaaaagcaatttgcaacccacgaataataaacagttttgaaaaatcaatataaatgagaagcgactcaaaacaatcaaaaactcaaatttacaatccagtaaggggaaggcagtaaagttaatcaatttgacaattaaccaaaaaaaggacaacagcaaaattcttaaaacaacaaactcgcacaaacagagtgataaaaatatactaaggtttaccaaacgacaatcattttctacaagaacaatatacacgattcctcaaaacaaaaatatgaagagaaaagaatgaattttgacgaatacccatcaaccattatacccttttgaacctctgaaataataataatgga

SEQ ID NO: 14989 - DNA, 7295 bp, Cannabis sativa
ttttagaaaatacagggactatttggtcatttaacaaaataaatagtccaattgataacttttgcaaaacacagagtctaaaatggtatttaccaaaaaaagatggccttttcatgtaatttaggaagaatagaaggagtgaaatgaaaataaaagaaaataaacgtgaaaggaaagagatgaggaaggagtactatatatagagacgatagtaggcttccaaaatcatcaccacacaaaaatctcattccctttttcatgggcgccgacgtttgggaaaacctaaattcaattcattttcttttctccaaaaattctttcattctttgaaaattattttcccaaacattttctttctctttctcctcttcaatctctctctctctcatccgagaaaattccattttcttttttacagagagagaggtaaagtaatcgaaagagaaagaaaaatggggaaattcgtcgagattttggatcagggagttagaatcgtggcgagatcttattctcattgtcctcagacaagtcgtatgtattatcatccaccgattaacgtcgaagaccagcacaataacaacaatggtcatcttttcttctccggcgccggtttgactggattcggcggcgaagtgagcggcgacggtggtgcttcttcttcttcttctgtgcaggttcgccattgtggacctaagactgttgggggagtttcgcctacggagtttattcttttctctgtttgatctatttttctcgaagaaaattaaaaattaaaaaaaatatatataaaaagaaaattattcttttttggtttagattttacttttatgtgacgattatttctaattgttctattggaaacatttttgagtaatgagtttattatcatgacgatgaagattgaagattatgataaagattgattttttatttattttataatcctattttgcaatctaattgtgctctcagaccattcatttgataataaagaactgttatttcttaattcgaagtatttgtttatacatatttattctttgtttggatctaagtacatgcttttgagcaaaagaggattaggtttatgcttgaccctaaaatattagggttaatcttaaattagcaagaggattatggtacttttttaggctttccaactcaaaaccaattagttagggttggggatataaatttcatgtaaacccaattaatatttgctcatagttaataaaatagtatatgaattcttagatcatgcttagcatcatttatagtgtgtctaaatagctgaatatcgaaaactcaaaggagtgaacataaaatttctcttttaactttttttactaatagatccatttatgaatgttgtaatcatcaaaatttgtgatggaaaataattactaataaattaaattcaagcaccacctactgaaattaatttattataagaatcactttgccaattggcaaaataacttgagctgtgagaagatttcaacaaaagtgtcttgcaggtgccaaatgtcttaaagtgggatttgttggagacttgttacattgacagagtcagcaaaagtaccaagttctttgaacaaagcaaaatttgcattaattgatttagaggaacatatccccaccaccatcttaactcattgttcatttcaaggcatgttatttatggtcttttgtgtgtatccaaacagaccctttaaagttaaaaataacaagaagcatgtggatgagttctctaacaagaagaagagcataaatttttcattatttcacaacagtttttcattttttttttccaacaaaagtaaagaaagctaatattgttggtcaaataaattaactacacttgcaaatgaactccatagagactaccaaaatgaagataaaattagaaataatacacacaatcactgagtcatctactagttttcgaaaccgaattctaacacacttgagtcccacaaggaaagttcactgacttaatcttactctggcttacgagccaagaagaaatacattggtgtgaagatctccttcctgaaacacagtaaccgaaattatgattcagtccattgattggttttcgataaataaagaatgaacagtgaagaagatgataacttactttccaccttcaacaagcccttctgcagctttctctagaaaatcttgaactctttgacttccctttggagccaagccaacaaattctagtgcctttacctgcattacattaaagcgaagatcataattatattctgctttccacgtttgattgaatcacaagaaatgatgcaattctctgtgtaacagaataacagcaatatgtaaagctccaaactttcgtggctaacaacataacagaatcttaccatgttcttggtcataaaacggccaacagctgttagacggaaactactgagagagaaatggcttttgtccaaaggcaagtaccaggggactggtgagtctaccgcaagatctttctcccacacaaccttttgtcacaaagaattcaaaacagaaaaagaaaataaatgtcatcaaggcatcttcaaattcgatttcaaatatggggtctagaagagagaattgtaaccaacctcaaacccggcttgctttagagcttcaaggcatttagttgtcaatctgatatctgggaggccatcaccgatctcaatttcggcctgtatcatataatatgtataaaattaccgtctttaatatctgcagtgatgtcagagtgagaagataatttgtttgctgctcggattatccttaccttgatcttttgatgattttggttattgggatcaaatgcatcagtcatgcaccattcatacgcagcaaaatactggcctggcttcaacaccctgtaaatctctttgtagcatccgtactaatcatataaaaaagaagccacttttaaccaacagatacgaaaagaaaataaaatgaagaagttgaatggcataacatacagcatctggggcatgacaggtagcttcaattgcataaacagcatcatatgaattatcaggaaatggcattttcataaaatcagcctgcaataatcgaaattaagaatgacatctgttatcgaaatagaaggatcaaactcaggattgcagaagaaatacgaaatatacataaaatgcctaatgattagaaacaaaaggaaaattaaacgaaccttgacaaagtcgcaggtcttgtccactccagcaatccggttcaattcctatgtaacaatcaatctagtaaataaaacatcttgaaacttaaccattttaccatttacaacatataaagaaaattgtactagacctaaaatcatcgttgaaagatccaaaccatctttatttatttatgcagactaattcatcatggcctttcttaataagtgttttgatcttatgaaaccaactacgattaagataattcatacacgaatcaagggatactatctttgaaggaggtctacttgaaaccataacaagcacctacctttcctcttgatatctgatattcattgttgttcaaccctgtaactgatgtagagctacagcaaacaatcgaaaagttagaaattaagctctctttgaacacatttttatcaaaatctgtgtctgaaaatgaaaagtagcacacaaataaaaatagcatatcatactagataagctatttattgacagcaataacagtatcagatcaaaatgatgttatttttcaatatatcatagcaaccaacgccaacttttaaaattgcatatgccattctcaattatagcattgaaaaaacacttaaatcaaagactcatagcatgcacagataaagtaatccctcaattatagcattgatgaatgcatttaatactaatataaagggcaattacctgaatcgagcaaactctcttagcgggcctccaattccgcaacccacatcaagcacctagacacaggaaatataatagagaatttatatcttagccttatgacaagaggtaaacaccctctcatttttatcatttcgtataaaagaaaacaaaccttctgtcctggttttactccaagttgcaaagcgagaaagtgttcatgcctcttgatgctctctttaagggactcacctttccatctgcatgaataaaaacgtataatcagaatggtggactaatggtaacagttactagagcttttaactatgatgaactgaaaaaaattgaaaaaaagaagagtaacctgtgtgcaaaatggaaggattctccccagccaaattcataaaagctggtaactagatcatagtatttattgacctgaaatccccatgaaagaacaaggttaaatcatcatagtactaaagatactttaatcttccatttctttttgttagcttaaataagtagtcatatttaacacaaaaccaatagtaggaagcacttgtaagaaatatttgctgatcttaaagttagtactctatagcatggttgtgctccaatgcacacagactaaaaagagttatttttaaccacaaaatatctcttttgatcctatatagcataaacaattgaattctaaaagtatcaaatatagtattcatcgagtcatcatgatggtaaacttgtaattttgagtcacgtgttaaattttaacaatatgggttctttgattctgcacttggcacatacaaaatttatatatatgtatatatattttaattttaggattgagagacacatatttagcacaactgtcaaagattggcttaggcataactatatagcatgtgctttaatgcttaaagcaagtaaataacatttcttaccatgtcactatagttagattttctgtcttcctcttcacctccatgacagacatgatacttttcatacctgatgaaaaaatttacaaactcaattattattataaaagcaattctctatagtgtcaattgcagaaaaattacataataaaatgctagtataaatatgtcaagcagtataagtattttaaagggtaaaaattaaactatttgcaattatttatgagaattgtcacacaaaagaaaattagttatgtatcacatccagagataattggctcataatttattacacatgcctgaagaaaaataagtggataccaagtatttggtggtcttgaatagtggttgaaagagattttgacacaccaaaaaaaaacaaaaatataacttgacccgaaaattagctgtagtaatttttaaacaagtttaactccagttaatattataattaagaaaataaaaaaaagttcaaactacagtataattgactagatccacttgagaatcatttgaaatctccaagccatagctatgcagagtccacctggtcagtctgtcccttttttattattattttttttggtagtaagcaaaaaaaaaacaaatcacaaattctggaacataacctcttgctactcagacctgaaccacaagatataaattacatttatatttatatatatatatagattatggtagagatacaaatattatgtgatgtgtcacctcatctgaaatgatcctaaatatcccattgattgaccccactaatgcattattatgtgattttaaccatgatttagtgactaatgatgaaattagcttaacccagattgttattaacataaaaatattataattaaacttaaattaagaaaaaaaaaaaaagagagagtacttgtcaacagcagaaagaacatcgcttttctcaatctttcctccaagacccgatgcgagatccatcgctccagttttcgacatctcgaaaactccgaagacaagctcagggagatctagaatcaccaaaagaagaaaacccagaattaaaaatgaaaaaaaaaaatattgatgatttgaagcgcattgcatgcaacgatgaaggtaattaagcacaatgtaggattgaaaagtgtagtagattacattggaaatgagggatctggaagaaccctaagaaaagatttgaatagagaggaaaagaagggaactttgatggagaaagaaagggttgttatttatagagagagagagacttaacagaaagttttctccttttcaatcggagaaagcgaagctggagagagaaacagaggaaagagtacagtggactgaagtgatttttgtttttctttgcattttatcgtgtactttaatatgtaatagttttgtaggcattaaatttttttttactatttacattgtttaatttaattatttgaattattattgagtattagtgtttaatatttttattttgtaaaagttattttttaatttatatgagacctgatatttaattatactaatagctagtagtatgataccgaagagaatattaggtatcagtgatactttttagtaatttttttctgtccaattctatttaattttattgacatattgattgttcttgtactaaatcgtgtctactaagttttaatatgaactaaatcatactcatgaacttaaacatgtactaaatactaaatagtacctagtgaacttttaactatgtcatgttatattatttgttattttcaacctataatataatattagattaaaatgccatgtgttatatattaatatgaattaagattgtaacatatgaattaaactttaataatatgtatttaaaagattaattacatttaaaagttatgaaagaatgtgaaaaaagtttctagcaaaaagaaacgatcaggataataatttattttacatgagaatattaaattggagaacatctcgaagaagagattagagcctaaaaacttgagctgaaaatacaaaccagatgatatattgcccaaacagtaattgtggaattttgtgatgtgttttaacgtaatacgagggtttgcgtattttgctctaggcgatatgttgcttggagctctttttgcaagaaacgtgatgaaatcgaaagcatcgatgagggaaatttccactttttatttcaacgttcttctgatcttaaaatcttttctacacgtttggtaagagccttgggtgagtcagatttgaattttaaagtttggttcttcctaaacactgtaaatatggacctaagggcaggtcgaccttatgttaatttgggtcttaggtaaaaataaaaattgggacccattgaaaaagtgaggctattggcatttgacctctcaacctcttaattgttaaactaattaaattactactaagctacaacacatatttagcattaaaagtattattattt

SEQ ID NO: 14990 - DNA, 6228 bp, Cannabis sativa
taattgcctttttccattaggctaatctttactcatcagcttaattagattgagaatgtgttgttttttaacttgaacttcaggtgttgcttgcactaaatggaagcatgggaagattgatcatgtcacaatggttgagaaaaaatggagtgttcaacatagaagtatctgattggaatgaactcacacaaattctcaaggaactttttcaaggaagtaactcagttcgaaataaaggtttcgaaacacagttttcgctgaatgataacttgagagctgagttgcttaatgtttatgaaatgagaaatccatattttcttatggttgtggacatagctgttcttgatttgagcactgatatatggaaagaacagcttaactttcttgataagtaccatggtaaggcgaaattcgcttggatgctaaatcatgacacatcaaacccgattaagatggagctaaggagaaaaggtcatgtgttaatggttaacaaacctctttacaaggcgaaaatggttcagattcttgaggctgttataaaggagaaaaatcttgagcagcatcagcatcagaagagaagtagtagcacaagtgttatgagaagtaataacgggaaagaaggcgatttgcacgagtgtcttgagattgattcaactcagtttgagagtgctagtagtgatgaatctgatatctctgatttgggtcaatctacatttcaaatggaagaaaatcaaagggagaaaatgactaaacttcaatcttctaaataccaaggtgttaaaaattgcttagttgaattaactcatgtgtaccaagatgaaaacaacatgagaaagaaagatcatcatcatcaacattatcatcatcaagaacagattggaagcaataacaacacaaaacccgaatcaagaaactcgatatctgcatcacaacaacagctcattcctcctcctaaagaacaaggacattgttttggagctaaagctatgaatgacaataaatctcttgaaggtctaaggatattgatcgctgaagacacaccggttctccaaagagtggcaaccataatgctcgagaaaatgggggcgatggtgaccgcggttggtgatggattacaagcagtagaggctttatattgctcactcaatgcagaagaagatgcctgcacaagctcacaagacgaaaaatcgaatccccctccattcgacttgattctaatggattgtcaggtaaaatcatataaaacaaacaaacaaacaaacaaacgagcaaatcagcttagcacgaaatacctgttaatagggtcatgcctgcggtaattaagacatgctaggcctgcacttagagtccacccagagcctaccctgagtaataatggctccaaaattgaccccttgattttcttttcttttttttaaggtccgtccaatctcagggccgttagtaacatgtttatgtgtgttttttgatttcagatgccaaagatggatggttatgaagcaacaaaagcaataagaaaatcagaagaaggaagtagtttacatattcctattgtggctttaacagctcatgcaatgtcatctgatgaaaccaagtgtttggaggtgggaatggatgcttatctaactaagcctattgactataagttaatggtttcaaccattctttcactcactaaaacaaaatcactctaactatccaaaaacaaagtcaaagacagagttggttagctaataagtttgctttctcatctcattctcatgtaaaatttatataaatatatatatagataaggttactactccctacaattactgaaaatgtacataataatatgtataacacaattttcctaatatttttccacactaaaaaaggctggctatgcttcttagttgatagcacactaaaattatggttgaaactaaaaaacgtttgaagtgcgaaaaaaagaagtaaaatgtgtgtcgattagcatcactattggtctattttattgcttatgctaaggaattaagacccattaggggtgacaatttggattacgataacatgaatcgaaacccacacgaaataagtaagtttgaatttgccttaaataaatttgagtaatgacctatgtaagagtatacacttttaaatttattacatgtaaattatttagttaaattactcacaaatgtatcataacaaaattgtaaacctgttaaaattgtcataaattgataataagttaaccaaaattaagcataattatttgtataaacgagttaagctgcgttcggtttgagtttaatatttacttgtaatattcaactttcaacacatactaaacacacccacaatattttccttttttctcttgcttaacaaataaaataaaacgaaaattaactcttttgcactaatataaaataataaaaaaagtgatgttgaaactaaaaatatttgttctttttaagaatttttttcttcatttattactttattcttttcataattattatagttggaatagatttttaattttaaaagaaatctatttcttttttatttatttttttgaaatgtaatccaattttttatgttcatattttattttatatgtttactgtcaatgaattaatatatacttaaaattaatttatttttacactttaaaacattgtgttttttttttttttttttacatttttatggaattctacatagaaactctattgcaactaatggagcaacttaaagcgtaactaaaatttgtatagtaacccacataaaaaaccactttagaaatccaaaccataaatttgaaaaaaaagtaaaaaaaaaataatatataaagtaattttccttataaaaattataaatatgtttatttgaaattatataaaccacaaattttctattaaaaatatgaaaactaaatttttatgctaaaaaaatatacaaataatattcaaacaaaaatcaaaactaaataaataaataaatcatcatagggtaaggagaaacaatagtactatttctaaagccatggcagtttgtacaaagaaggctttaatggtggaaattttttgccataatcttcaaaatactccgttgataattctaccttttgatctttgtctaatccttgagaagaattattattagatgtttcagttggcaactccacttgttgttcttcgtttgatccttgagaagaattattattagaggattcagttggcaactctacttcttgttcttcgtctgatccttgagaaaaattattattagatgattcagttagcaactccactttttgttcttcgtctgattcttgagaagacgaagaattattagatgattcaactgataattctactttttgtgctggtggtaatactacgtctttttgtagttcgtctgattcacaagaagataaagaatcatcagatgattcagttgataattctactttttgtgcttcatttgaatcttgaaaaaatgaagaattatcagatgattcatctaataatactattttttgtgtttcctctaatttttgagaaaataaagaattattagacgattccattgataattctatattttgtacttcatcgtctgattcttgagaagaaacaggaatctcaagttcaattatatcggcatgacataacatgtacgtgaaatattttgacacaacacaataatagacactttgatccatttcaaatggaaaagtcactttattgttgatgttcttcttgctacctgtcatgaatataagattagtgataatccaataataatactaagaattatatatacaaatatttgcatatagttatgatagtcttaccttcgacttcgaccatggataaattattgttatccattataacaaaactctttcttattcttccttccctttactttattgtctattctttactcttcctctcattattatgatgacattaattagtatgaaacacctatatagaagagtatgaaccgatctctaaattaatataaattaaagtacaatgagatattttttggaatttaaatatgaaatataaaatcttaaaaaattataaatatctcattatttttttttcatttttatttttgaaaatggtaaataaatatcttctttttctctccatttaattgcggaaccggtgtccatgtctactggctttcgcaaaaataaagctacacgtcgttttctggttaataaaagctacgtcgttttgtacttaacaaaaacgacgtgtcgttttcatgagaatgaaaaaacgacatatcgttttatatggagttggcttggcttgtggctcaattaaggttccataaaaaaagcttcaaaaaaagaagacggaaaaatctcagagcaaccgatctgatcgaactttctaaagagaaataacaaaacgaagaagacgaactcgaaaacctagccctaaccctaaccacaaccatggccaggtacgacagggctataaccgtcttttcacctgacggtcatctcttccaggtcgagtacgctctcgaggccgttcgtaagggtaacgccgccgtcggagttcgcggcaccgataccatcgttctcggggtagaaaagaagtctactgctaaacttcaagactccaggtccttttttctcttcttcctaagctcagttttattttacttttttgatttgagtggagtgagattttggaaaattttgaactagggttttgtgtttggatttttatctatgattagcagtgttttcattttaggggggtttggattgatctagtttttgtgaagttatggttttaggggttttatgtaagggaaatgtaggtttttgcttgaaattgattttcattgggtttcgttttattttgcatttgataattgaaatttgactctgcttttgcataatcttacaactgaactttgatacatatatatatatatatatatgttttgttttgagggaaaaaggaactaaagagagatttagctatacccgatgaggcatgagctttgaaatttggataaattgtgttgttttatatatgtaaaaaatggagattgaacttgttagaagagtaaaatctgagagttggcaatggtttcaggggttctatttggagtatgaaagaaaggaaatgtaggttttttctagttttgcttgaaattgaaattcattgggtttgatttttatgttaaaattggctcttttatattgcatttgataattgaaatttgaccctgtttgatactcaattaagcccagcatattggtgaggaagatatatatatatatataaaaagaaaattggagattgaaattgaactagtaagaagattctatgttaagtaaaaactggagttaggaattttaagttgttgagatcatttcatgtgtattattacacttgatgaaaagaagtttatcttctcttattggttgtttatcgtgcagatccgtgaggaagattgtgaacctggatgatcacattgcattggcatgtgctgggcttaaagccgatgctcgtgtgttgataaacaaggcgagaatcgaatgtcaaagccatcgacttactgttgaggatccagcaactgttgagtacataactcgctacattgctggacttcaacagaagtacacacaaagtggtggtgttagaccgttcggtctatcaactttaatcattggctttgatccctacacaggtgcaccagcactatatcagacagatccttctgggacattttcagcctggaaagcaaatgcaactggaagaaactctaactcattacgtgagtttcttgagaaaaactacaaggagacagctgggcaagaaaccatcaagcttgccattcgtgctttgcttgaggtaagtaattgtggacagtgcattttttatctagtttcttaacataaatatatcacaagaaatgatgataacatttgtttttaaattaaatcactaaaactgaaccttaaaactaatccctttatttgacaaaattatatttgtgtaatttatgtagattgtaagctagtcttgacctctaagtctgtattctcactgaaaagcttgatagactttacaatctttctttacaattcatgagaaagaagaaacattatatttcttctctaaaggctgtttatatacatacatccaatcatttgtgcacatgctaagacattattaatcacttttcattttc

SEQ ID NO: 14991 - DNA, 6367 bp, Cannabis sativa
  modified_base (3104)..(3105): a, c, t, g, unknown or other
tgactaatgttcccaatgcccagttttaaacatgggcttagacatagcgtcgctaatcgttgtctatcgcaacacccaaacgcatcctcaagaaaatgttgtgggaaattcaattgtgaagtttttttttttagttcttttcttttaagaaaatgcaatttgtcataattaattcaagcattcaaaatacaaaataataaaaagaatttgagaaaaatcaactggagcattatgctcaagaatgctacgatcaaaggcttctaacaagatattgcgccactcgagttgtagatcacttaacaaaatattattgaacattagaaagctgctgcgaattgcttgaatggtcgccatgctatcggtttcaattattacatgttgccacctcttggtcttaagccaaatccgagcttccttcactcccatagctttaaccacttcaacaagctgctgtccactaagacataaacatttaagtgatcacgtatagcttctaacaacaatcccataaccaaataaactttcattctcaaaaatggcagcatttacattaacttggattgtgttggcaacagttttagtccatatctcagcaccatcatctttagaacaaatgttgaaagaagacacagaagttgcacgctgagctttcttccattgatcaagagttactgaagcagaaaccacaacatcattgatagaagaagatttatgattccaaaaaaagggcatttctagatttccaaagagcctaatagacagtatcctcataactagaagtgaataaagactctaaccaaataccatgtttggcacaccagcaatgattcctgctgtacaccagcaactgaatgcaaaggaacacgttacatcccattacagctctccataataggtttttgacttggtggaatctttaaatgccagagtttttgccaaaatacagagttgttaataaaattgggaagtttattattataaaacttgacaagaagatgaaggaataaactccagctcatacgaatttatagaatagttaataaagataaaagagctaatacgatgatgggaatgggataatgagctcattatacaaatttattttttcttttattgtaatgattaaaaatcaaatataaaacataaatttctaagaagtttcacttaaaatactaatttatgcatttcaaatacatttatgcataatttaatggttttaatctttttttttttagatttgaaactctttaaaatttgcaaatctttgaactcagtaatgctactgcgatgtttaacgataattttatgattaataatggcatgaaaacttattttagtcaaaaagaaaataaacaatgcttcagtattttaacggtaatgtcatgaaaaattcatttttggtcaaaagctatgataatcaaacgatgttcaataataagatttagaatctgttgatcagtttggattgtctgaaaatatacaattttaattatttaagtctcaagctatattatggcctcaaacagacaaatcttgaaatttgttattctatatctcaagtttaaagttttactcattctaaacatgtggatcttgaaacagaaaaagatcacaatgaaagtcaaaattacatgagtgaataattatgtgtcatcaaattagtttaatcaaactttatcctaaatatttcttaccattggttttgctaaaaaacaataaatttttatggtgtcatcgttaagctttgttttatgccactatcgcaaaagtatcgttaagcatcaataagctcaaaattctacgaacttttagatctgaaaaagaaagggaaaatgtgcaaaaataaattatgtatagctatgtttgaaacttttaaactagtgttttaagttaatattcttgatggttaagttttagatttaattttgaatcactagaacaataaaagaaaaaaaaatggtgcttcaatattagtgatgggaggtggcaagattaatattaatggcaatagcagcattaatgtcgtgttatgcaattgtggggagatatagacagagaacaacacgtgaaaaggtaattactttattattgtaaaagtaattatactaagacttaaatactttttcttgatcacaatacacaccaagcactcactctttttatttactagacgctcaaacttaaatgtttacttgcacactatttgatgagacactcttttaaaattttgttgggacttagttgaacacattaagacatacttcacttgtacactcaagttatcactcaactcactatgtaccaccaaaggaccaactcctatattatgctactcaaaggatgatgcattattatactagaatattctagcaaattttcattttactatagcttaaaactttcttgaaatttcttttgactattaactctttatgattttaaatgattctataatattaccaaaataatagaaaattctagatatttgtagaggaggtattgatcttttaaccctccccctcaacactgactcatcatactgagttgttctctgagtttttgaaatgttgtagttttgagtcctttagtgaatatgtttgctacttggtcttcgttctttatttgatgcatccaggcttttctcagagtactttctctctaagaaagtgataatgtacttccacatgctttgttcgtgcatgaaagattgtactttgtttgtgcatgaaagattgaattttcaactagacaaatagcatactaattatcacaataaagtggcactgcataatttgcgcgctggtgtacatccttcatcaactttatcaaccacatactttcttgagttgtcattgttgctgctctatactctgcttctatggttgataaggatactgttggttgccttttattacaccaagatactatttcagatccaagcatgaagacatatccagttattgatcgtcgtgcgtcatgatctccagcataatcagcattgcagtagacaacaatcttaacctcattactttcttataaaagagaccatagttaatggtatatttcacgtacctcagtattcgtcatactacttccaaatgtgnnttctttggttgctgcatatatcgaattactactccaactccatatgagatgtctggtcttgttaatgtaaggtagactacctactagttgtcgatacattgctccatcttacaagtcgtgcccagcatgagcacatagcttaacattagcttccataggtgttgatatgggcttgcactcgagcattccaaatctttgcagcaaatctctagcatacttttgttgaagagaaataaaccttcctcagttcgatcaacttctaatccaaggaagtgttctaattttccaagctccttcatttggaagcgaactgacaagttctcctttgtttgacgaatctctacttcatcatcgcaatgaggtcatcggcatataatagaacaactgcaatattttcttgccttactttgaggaataagcttgaatctgcatgtaccatgacgtaaccactcttcactaagaactcaacaatgttatcgtaccatgctcacggagcctgcttcaaaccatagagtgcctttttcagtttacaaatacagtttggatgagctctatcctcaaatcctcttagttgcaccatgtatatctcttgatctaattctccatgtaaaaaggcgttcttcacatccatttaccatagcctcaagtctttactaactgcaaatgctaacagaacccccactgttgcaatcttagcggctgggctaaatgtctcgtcataatctagtgcatactgttaagagaatccttaagctactaattgagccttgtatctctcaatggaatcgtcagggcgagtttttaccttatagacccatttgcatgaaatgggtttcacttccttcgggtttagcaccagctcccaagtctaattcttttttaacacgcttatctcttctttcatagcttttagccacttagagttctggtatgtctcttcatataactctggctctctgaacttctcttccttggctacaacagcattgaaatatttgggatttggcttttacacttgtgttgatctccgaagttttaattggccatcaacaatttgctcacccattttcttccacaattcgtcttccatttctttagaatctggaatacttccttttgcaataaccaccatgatgacgcgtcattgaacaccacataccttgatgtataacactttccagctgtagggtcacatcatctccaccctttccgttgcctgtcgtatcccacaaagatacatcgtagcgccttttatcaaattttctatgtaggtggcttggcacgaatacgtagcccacacagccaaatactcgaaagtgacttactgcaggtttacaaccccacattttttcaaaaggtaaaacaaaccctaactttgcttgtggaagtctattgatgacatgagctgttgttttcattccttctgcctaaaacctccctggaacgttcttcgcatgtagcatgcttcgacatgtctctacaaggtggcgattcttcctctcaactactccattctattgtggagtatttgcatatgtgaattggtggcgtatttgcacatatgttgaagatactcaaaaaattcatctgaggtatattcaccaccgttttctgtttagaggcatcaaattttcttcctaacttctccttccactatttccttaaactctttaaattttgaaaaagtttcaaatttttctttcattaaaaagatctatacataccttgagaaatcgtcggtgaatgtaaccatgtaccgcatgctgctgattgatgtttatttaactcacccaaacacgtcagaatggaccagctccaatggtgcttttgctttgaactttgaatcttcatatggtaattgatgtgccttaccatattggtagtcagtttctattctgacctcgagttgaggaagacccttcaacatagactacttcatcatcaccttgagtttgtgataactgacatgtcctagccttacattccacaaatttgttttttcgttcttttgagtcttgtctacataagctgattttactgacattacatagacagactctaaacgccatcctctcatcatcgatgttctagagatttcaagatcttggtagatcttgacatcttaaagaccgaatatgacatggtggcctaatgtcgtaagttgcgccactgatagtaaatttttcttcatcccaggtacaaggtagacatcctcgagtgaaacttcttctgggcataatgagttatttgcgacataaatatctaataagtttatcttctggttgcagattaatacctaagttaattttttagtggtaaaaatatcttctgttaatattttgttgcaaataaggtacctgacgttaacttctcagttaaatgccaactagataaatacttggcaacttctaattagtccaagtgatttagttttgatttttgtatttaaaataataaaaataattattttaaaattttaaaaaatattatatagaaaaaaataaaaagtgatcaattaaaataactgaacaatataattagaaaaaagagaagaaaaaaaattctaaaatttcaccttcgcatcctaattcaacaactgaaaaactttttcaaaacctaaatattttctcacccaaaacttaaaaagaaaaattctcaaaatttataatattttctttttacatttttttttttaaaaaaaaatcatcatagtaaacaaagaaaactggtaaaattatatactgtaaaaaaaccatatttaatcaaacaatagatctcgtcgatgccgagatctctgccaagaccaagtgtctcgtcgacgcctcgtccagatctcaatcagacttcgcacagagacaaacagaggaagggatccagatctagaagttttcaagctgcagtaaagtctgtttgggccatagacgccggagttgctccgtccgactctgagcaaagagacgtcgagaaagagggggagagagagagagagagtggagagaaccagcatcgcggttttctgatgcttgcaatcctggtgggtggaaatctcgttcgttgattgtgggtagaacgcttcattggggttgggtggaggtaccgccggagaagaagcctgtgggaagagaaagatgagtcgaccagatttatttttaagtttatttattttttattttttttattcattcagtttttgtttttaatgtttttttttttttttgagataaaatgctattatattaaacaaagagttaaaatacaatag

SEQ ID NO: 14992 - DNA, 10701 bp, Cannabis sativa
aaaaaaataaaatatgcagtctaatttcctcaatttcatttataactgggctgcacgggccatgaagtgtactgggtccagcaacaaacccaatttccaactcccggcccataatgtttattagttcactcttagcaccgactagatagattatcttcaaggtgaaatacataaagccgtacacccaaaagacgtggatttaattatcttgaacaaataaaatacaattagtaaagtaaaatacacaaagtcgtacacaattttaattaattttaagaaaagattattataaataataaataaaaaagaagagaactgcatagcatgagagacgttgatcttggacctgagcaagcgcacgtgacctcccaagcctgccacgtaagaattgtatattcaagtctactctctttcccctacgtggaattgtttcattggctctttcttacccacgatatcgcatcggagagaaatttaccacagcccagccactgtggtaccgatattaccccttgttaataatgaaatcccgaaaatacccctcctccccgtccctccctacccctgaagtaaaaactcccccacagagctttttttgggagccaagttccttcgggagtgttttacctccttttttaattttcttcccaagtcccctgtttggctttattttctcgcgatttttctcactgattttctttttctatctctatattcatcgattcgtcgatcgtgacgaaccctagttttcttcatcaatgactatgatgactcctccgccgttggatgtatgtgcataccgaaaactcagttctttcccattgttgatttcgtttcaacgctcgtttcattttgttgtcttttgtttctctctttgaattttgagctttgttttgttcgttcttttggtgattcatgatcgcttgagggcttttgtccgcttggttttcgaattggctgaaaatttcggaaaattcaggcttttttagactgttgatttctagggttttgatttagtaggatagggttgtgttttactcgatcgcagtttctgatttgcgtatttctttcagcagcaagaagacgaggagatgcttgtgccgcattcggatttggtcgagggacctcagccaatggaaggttttagttaattatttatttctattttagtcatttaaattcgatgaatttgtgaacgaagcttgttttgaagcttgcaatgttgccaaattgatctgggattgagtgttttgatcgctgggtgttagggttttgattttgttgatttctccaaaccttattgtttttaatttgatggtatcagcagctcaggtggagcccgctaatacggtggagaatcaaactgttgagaatcaaccagtagaggatcctccatcaattaaatttacttggacaattgaaaactttacaaggttgaatgtaaaaaagcactattctgacgttttcgtcgtggggggttataaatggtaattatggtcatatacttagcgtcatgttgtgttgtgtgtgtgttatttttcctggtgatgatcggatattgaccttactggttgttggttggtttactcaggcgaatactaatttttcccaaggggaataatgtagactatctatcaatgtatttggatgtggccgattcttcaacattgccttatggatggagtagatatgctcagttcagcctggccgtggttaaccagatgcataacaagtactcaataagaaagggtattctcttttgttgttatttagtcgtttactaatttagttctttagtggataatttgtttgtatgtcttggattgtcttcttgtttttttcaatgttttactgtcataatcttgtttataatacttattattatgttaaaaaacttgtaatggtagttgttttcttttctttccctattctcttactcccactcaactttaaagtatacttgatcagttttttatcttaaataaaattgatttattggttgattcctaatattgtcaagatcatttgttcgtttagtcatatatgatgtttgggatctccatcattctatcaataagaaaatgtatctcctcctcaaattcttttgtactacttaaaggtgtaaattcacagtataattatgttgcaatatcatagagtagatgctatccattaccttaagggatctagtcttccagcctgtattaatttacttctcctggttctactacgaacgctgactgatattccttatttacaataattctcacttgattgggttatatatataattatgtatgtatatacacatatatttcaaaaatcatgatgtgatagagcaattggttttcttgccaattgtcttttcagacaataagtgaactgacttgcagtttctacctattactggatcttgtagacacgcagcaccagtttaacacaagggaaagtgactggggcttcacatcgttcatgcctctgagtgatctttatgaccctagtagaggatatcttatgaatgacacatgtttagttgaagccgaggtagctgtccgcaaggttcttgattactggtcttatgattctaaaaaggaaactggttacgttgggctcaagaatcagggagcaacttgttacatgaattctctgctccagacgttgtaccatattccttatttcagaaaggtcagcaggtgttttcattttcatcttagaggaaattttgattgtttctactgttttacttatgtctaaaaaatgttctaagttgggctgtattcattaggctgtgtaccatatgccaactactgagaatgatatgccatcgggaagcatcccacttgcgctacagagtttattctataagcttcaatacaatgacagcagtgttgccacaaaagaattaaccaagtcttttggatgggatacatatgattcttttatgcaacatgatgtgcaagaactcaacagggtactttgtgaaaagcttgaagacaaaatgaaggtagaaaaggtttgatgttatgggcattagtatatttcttgattgttttcattgtaattatgccgttgctggttcagggaactgttgtggagggtacaatacaacaattatttgagggtcatcacatgaattacatcgagtgcataaatgtagactacaaatctacaaggaaggaatcattttatggtaattcttttctggctaaagtgttcagttataagagttcaaaacctattattgatatcagagcatgattcaaaatttgactttttacttgacagatcttcagcttgatgtgaaaggatgtcgggatgtttatgcctcttttgacaaatatgtggaagttgaacgtcttgagggcgataataaataccatgctgaagaacatggtttgcaggttagttcccatattctattttacagaaagaaaactaaaatgtcaaacctcaaagtacaatgctctttaccatataaagtagggtttttttttttagattcatttattattttatgtatctggttttaattgttttttaatatcaggatgctaagaagggtgtcttatttattgacttcccacctgtccttcaacttcaactaaagcggtttgaatatgattttatgcgggacactatggtcaaggttggttttggatacttgttctattttatcatcaggttgatagcagctgttttatgtgcatgttaccaattattacagttctgtaaacatcttttccttttttaaattagaggatttcttttgttcctttgctttgagtttgagtttgacttttttcagtgcatccgtcttgtactaactgcaattttttccccttgcagatcaatgaccgctatgagtttcctcttcaacttgatcttgacagggaaaatggaaaatatctatcacctgatgctgatagaagtgtccgcaacctttatacacttcataggtatatatgtgaattgcatgctgaggatttcttttgctgcagttgattcagggaccatgtttcattttttgtgatagatttttgtgtaaatccggagctttactgtatctacttagcatctcctcatatgactagatatttcttttgtgacagtgttttggttcatagcggtggggtgcatggtggacactactatgcttttattcggccaaccctcacagatcagtggtatgcaattttggttgaagtatatttatgcagttatacatgtgtatgaaactgcactcagttgtgagcaaggtctttacccagtccatggaactggttgtattttttgggagttcaggtacaaatttgatgatgaacgcgtgacaaaagaagatatgaaaagggctctagaagagcagtatggtggcgaggaagaggtaaatcataaattgtttttagatttttatagtatcattagtttattcttatatccttcaatgttataattatttgtgaattaatcttgatgcctttcgttttgtttcacagttgccacaaaccaatcctggttttaataatactcccttcaagtttacaaaatactctaatgcatacatgcttgtgtatataagggaaagtgacaaggacaaaataatttgtaatgttgacgagaaggacattgctgaacatttaagggtaagtgcgtgtatgtaattatagtttgttttgtttgtatcaactctaggttacttaatatcccaagcatgttatgtagtctaacttgtggttaatttcaggtgagattgaagaaagaacaagaagagaaggaggataagaaaagatataaagcacaagcccacctttttactataataaaggtattgattttgtcttgacctttagtgtggcttcttgtcttgtgaattagtagtttctattctgggatattaatggttgtgataattcattgacgtatttaggtcgcacgagatgaggacctttctgaacagattggaaaagatatatattttgaccttgtagatcatgataaagttcgtagtttccgtattcagaaacaaacaccttttaaccaattcaaggtactgttgacagttagttctggtttcaaaattcgtatcatagtttttattgatatttattatattccctgaataactattttgctaaattcaaatgaataatactgataacttttccaactttttttttttggtcctgtggtatgtaggatgtatttatgaattttagatgcatcaaattcaaacttcttatttgaatgttttggctttggccattatgttaccattatactcatattttcttcattctttcatcttcgttttgtcatttaatccttgaaactaagctattctttccacatatttgtctcagtttttttcccctttccttgtgctattcttgttaagttatatatagcttttacagatatacttcattaaaatttacagataattgtgagtaatgtggatttatatacttcattaaaatttacagataattgtgagtaatgtggatttatattcctaatttgcatattgattttctctgaaccccctttttgctgggttgaaataatatatttttgaccaggcgtttgttgtggtttataggaagaggttgcaaaagagtttggaatacctgtgcaatttcaacgattctggatttgggcaaaacggcaaaatcacacgtaccgccccaatagacctttgacacctcaggaggaaacacaatcagtaattcgttatctcctttaatttttaaaaaatgcttacaagtacttgtaatgcattggttaaaagtttgctaatgtagctgaccacaactgtatgcctttttgtaggttggacagttgagagaggtctcaaataagacacataatgcagagctcaaattgtttttggaagttgagctcggaccggtaatatgttttttttgcttgcgggtttttgagtcttccatgtcttggcaattactatgttagtgatagcagctagatagttactgataaaatttctataatgcttcaggatttacgtcctattcctccacctgacaaaactaaggaggatatactactctttttcaagctttatgatcctgagaaaaaggagctacggtacttagagccttgtcctgtcctatgatatattctctgatttagtctcattgtttgtgactcaataatttcttttgtgttgcagatatgttgggaggctttttgtgaaaagctctggtaagccaatggaaattttaggaaaacttaatcaaatggctggatttgcttctgatgaagaaatagagctttatgaggtttgtttgtcattttagagttcctgtcctgtcatctatctattatttggctgacgtagtcaccttcattctttagaattctacaatgtaaaatgtgtgatctatttttcaggagataaagtttgaaccttgtgtcatgtgtgaacaccttgataagaggacctcttttcggttgagtcaggtactcatgttatcctttgacctatctatgcctcgcaagtagtttgatttgatgtagtactttaccatttttgtccaattttattaccagatcgaagatggggacattatttgctttcagaaatctcctctacctgaaactgaagtagaaagcaaatacccagatgtgccttcatttttggaatatgtacacaatcgacaggtactaaccaatgtggatggttttagtcaggcttacaaaattaagggtcctctagagttaaataagaaaaaaaaagtactcgaaattttgttttgattagaatgaatgaccctttttttgtactattttagtaagaaaataattactgtctaagttattccactccttatctatgctgaccatttatcttcttatcaagaatgaaaatatcagaaatttacggagatcacaaaaattgtctaaaattataaaaattcttgataaaaattagtaatgcaataatattcaataattacatgaatatataatatattaacagatcaaatttattattttttttgagataactgcagtatataataatctcgtaatcataatataaaaatgccatgtttcagaaattataattcaacaaaatacataaaaaaaaatcaaaaaggtctgctaacttgctgctgatgcatattataattaatcttaagcttaggtagaggtatatttgagcagcatgcttatatactatatattttattatcataaatgtaaatcaaacattagtatatactatatataatatattattttcatgattatattatcacttaaatatgataatatttgacattcatacgtagtaagaaagcatcaacacctaactaaactcataaaaagttcaaacttattagcaatacaatcttagtgtacccaatattgatacgagggtattagatatgcaatagtagaagagtgaaatagagtttttttttggtactatgaaagaatggaaagcagaataagtagataaaacttgatctatacatacaaattacaacaccaatgttgctcatgattttaaaagatatttacttattatataaattttaaaacaaacattttttgaataaaaaattcagatatatgatctaccaatatcgacataatattagtgtttgtttttatgacttatctctagataatgttgagttgaattagttcttgcacttgtatatacaatttttgctgtatgtccttttacatgagagtttgctgttatataatttgatattttgtagattgttcactttcgagcattggagagaccaaaggaggatgatttctgtttagaactgtaagtgacttttgtaaagccattttgttattgtataatcatctagattttggtgatgctatatgaatctaccccttattttctaggtcaaagatacacagttatgatgatgtggtggagagagtggctcgccaaataggtttggatgatccatctaaaatcaggctaacagctcataactgttattctcagcaacctaagccccagcctataaaatacagaggagtagaacatttgtcagacatgctagtccattacaatcaagtagtcagatctttgattgaactctttcttagttaattttttgctcctaatagtatatatttgtaatattatttcttgatcattttgacagacctcagatattttgtactatgaagttttggacatccccctgccagaactacaaggtttgaaaaatctgaaagttgcttttcatcacgcaacaaaagatgaggtccgtatgaatcaatcttttaatatgatattgtatacatgtttccaggtccttaatacttgtctaaattgtctctaggttgttattcacaacatcagattacccaaacagagcactgttggagatgtgatcaacgaacttaaaacgaaggtagtttcttcctcttctaatttttgttttttttaaaaaaaattagttagtcgatactcaaaacaatgaaaatataagaattcaccaagcatggctgcttaaaacaggtagagttgtctcgtccagatgcagaactcagactgcttgaggttttctaccacaagatatacaaggtactggcctatttaaaagttaaaaatcttaatgacatttttctattgaccatcttgtttcgtgatgccaatgtacttcataacatgattgtcactgaggatttatgtggctgatacagagattttagaagctctagcataattgttttcatttcattttgtagatatttccacacactgaaaagatagagaatataaatgatcaatactggaccttgcgagcagaggaggcaagttttcctttttctatccaatttctgtgaacttattagaatcttgtttcatgaactttattgtctgattggcgtgtcattggcatgtcctactatttcttattctttcatggagtgtttttatagatgactttcatctccaaactggagtcttatacaactatagactatctttgttctttattcatttggtataccttatgatttgatgctgtttttttttttaactgtgagttacagattccggaagaagagaaaaacctgggtgcccatgatcgcttgattcatgtttaccacttcacaaaggacactgctcaaaaccagatggtactgaattttaagagctcagtcccataaatatatttatatatatatatgtattctttttaatcgtttgcttaaattagtgattaaataagtagtgaaggatattcttaacaagtaagattttgttatgttctttatttgtacattttttttccatttaaacagcaagtccaaaattttggtgaacccttcttcttggtcattcgtgaaggtgagactttagctgaagtcaaggtgcgtattcaaaagaagttgcaggttccagatgatgagttttctaaggtatgttctgtgctgtttcttcagcaatagacatttatttgttgtcaaattttatcagctgctcttttttttttttttttctctttatcatcttgtttttcttttatgcagtggaagtttgctttcttatcccttggccgtccagagtacctgcaggattctgatgtagtttcaagtcgttttcaggtttgtctatagttatgcatacctcaactgtaatatgcacaatttattttactggatatttcagtttgaactcttttattttttttttgttgctctcttcagagaagagatgtatacggtgcttgggaacagtaccttgggttggagcactctgataatgctcctaagagggcttatgcagtaaatcaggtaatactaactcaatgctatataagcacaataaaggggtgaagtatcaaacagatacttattcattcttaatgctctgttatacatgagtgattctcattaatgattttcatccaaaattatgcagaaccgacatgcatacgagaagccagttaaaatttacaactaaagcttttagcagctgctgatccctgcttagctcttgagagtgtatcaagcattcagttgtcaagtcgcggccacaacatttgtgttagggatggaaatggcaagagtgggatcaaaaagagccatttcagttaaaaaaaaaaatagaaagaaaacacagccaaagaatgacgaccatgatgctctcacttttaggggatttggttaggcactcaaattgttggtttttaggtttctattttcatatatatttctctctttttttttttattattgctttgatgcttgtggggggaaagggaatgagatcatcatctcctgaatgtgtagcctatctatttattgttattccctgcttgagttctgggtctgttcttttcctccttttctttttgggtttattttcattttattacttttcttccataggaagacacctccttgcttcaaggggttggtggctttctatatatacagctccattgtaatctagcacagtacataaggagattttgaggggatgtatatccgggtatagtcggccgctttttagtattttttttttagctcctttgtatttctttttcacttttcttttgttggtgttccctttcaagtcgtaacttgtcaaaaatggagggaaaaagaaatctcatcatcagaagtggatcagtgtaaaatggtcgattaaattggcatctgcccctaggattctgtagaaattattat

SEQ ID NO: 14993 - DNA, 3432 bp, Cannabis sativa
aaattaaacaactaaaaccacaaatcatccttttttttcatacgaaaagttaaaaaatgtaataaataatcttaaatcctacagtatggtgtgatgtccaattcatgtcctattttttactcaattttttgagcaaaatccatggccttgttaagggttgccagtaaataagtgaaattcctcacatatattgcactttagaacattcaggaactggctgaatgccaccacatcaattataccgtccaatggtgtaagaagttccaaaactctagcagtaatcttccacataaccctcttgtagatatgtgatgaattgttcatggagggatccattttctgtccctgagaacttgtctaacaccaaatgacgcaaattctcccgtactactagtctacatttgttctgtcaaagagcgacatcttaagtttccgatcttgaagttcacgacgatgttcatggtggttgctggagctcacaacctttgtggtgagcacctgaccttctgccctatgacttaaagccagcttaccaattggtgactatccatttgtgactggagagtcaaatcatgagttcttgttggttcttgagtgttcaaggagttgctccatcatagattgcatctgagcttcaaaggattgtaattgattagaaatactctggtctaccctatcttcttgtgccccaaatcttccatttgaagccttcattgcattcaattgataagataggtacctgtaagaacaacttcaccccagaaatatttgggaatatgagtagaaaacattaagaaaacaaacaacttctaagagacttctatttttccgttcagcgacccctattttattgaggagtattgaataagaacttaagtgtagaataccttgttgtgtgaggtaagaaccaagaatggaattgaagaaatctttggaattgtcggtcttcaggatttgaatttttgtgtgaaattaagcttgaatcacaaaataatttttttttttttgaaaatttcacttctgattttgtttccatacccaagttaatctactatgatcatcgataaaagataaactatttttatccagttgtagtttttgcatgtgaaggatccctcacaatcacatcaccatgaatcaatgaaaaaggtttcaaagttttatatggtattctaaatctaaagtaggtgtttcgcaaattgattgatttcaaagaaaaaaagttcagatttttattaataaataaagagggaaacatctttgacaaatacaaaatatttgaatgatcaagacaatagacattatatcactaattttattcaaaatagactgactattcaaaaaaaagaaactgaatttttgagttgttccaatgaatggagtgtcatcttgtgggatatagagcccatatgacatcttagcattgccaatcatctttcccgaattcaattccagaaaacacgcaaatttgagtaaaactagtcacacaatttaactcacgagtaaatttactaatagacagtaaataacaatctagttcaggcacatacagaacaaaagagagttcttcatagagcttgatggacattcaatctatcccacattaaacaaccatgagaagattcttactttggagggcacatgtaatttccaaagaacatcaaccggcaaaagggacttttcttttcgtagcaagtcataagctgacttagagagtgggaattatttgaatattctgagagatattgaaggttggttaggaagttaaattacattactgtgacttgtccatgtattccatattcagttagtgttgttactcagtttatgttatccccaacagtttattattgggcagcattagaattttttttttgtgtcacttaaaaggagcacttggatgtggattgtctctggagtttatgagcacactcgtattgaatgctttttagatacagattacttatataatgtgtacatttcttttcttttctcttcagcgtacatgtggatggtccctttttcctttctattgtttttcttttctttttgaacaacttttccttttccgttgttggtcacacatatatactatgctttgtattaattctctttctgtagaaatgaaatacgacagggtacccattctttcttcaggacacgacatttttcataaagaccctaaatacataaactatttcatggtatcatgagccaccgcacgctaccaacctctcatcatcttcttccatgttgttggcaacttggcgtcatcttatctgtggttttcagacctcaccaccccaatctcaacaaactccaaccacatattagttgtgtttagctatctagttaccctaattctttcccaattgtatagtttgttaacatggattcctaatttgttatagatgtctgcattacattccaataaaatttaagctgaatatcattttttcatctcatacaacaagtcttccaagtttttcttgttatgtgattttctttcctcctgggtagattacatattcatgcttaaagttgcattccttattaatgaagtctgaaataaagaataaagaattacccaagtgaattatggtttaagcttttactttgtatccccacagctgtgataagaagtctcatagactatgttagttgcattctaaaaatgtgcagaaaattagttgagagaaattttctagcaaaaacctttaccaatcctcacatatagttctcgtccctttaccacggagctcttttcattttttgtttttttttttgtaaaatcaggagagtttggcagaattcccatcatccatatttgtggaattgtaatacttctcttcccataaaaggtttagttggaattcaccatcaaggccaaatgttactgcaataaaaacaaaatagagattaccagtaaggcaaaagagatttttgataagaagaaatatattgtaaagtaagttacaaaatatttagattactatgcacaaatttgggaaattgtgttacaaactaaaacacaaaaagatgggtgaaatttgacaggaaataagattcttctataagtaattttgagctgtaaatcaacagtttcctttcaaagttccaagtaatatgcttaagtgctcaattgcctgtatcaactcaagacccgctcttgaatatgtgctatacctgtttgagttacaacatacaagtatagtgtttctcgtgaattccaaaagtcttgataagtgtttctcggcagggactgttccttgttaattatttatggcgcagccaagtgctaatgcttttccttttcttcttatttgctagaaaacttcatctcctgaggaaacaagagaggcattacagaagtggctgccaaaggaagaatgggttccaataaaccctcttctggtttgtgtagctattatt

SEQ ID NO: 14994 - DNA, 4140 bp, Cannabis sativa
aatgtgaggaattttttttttaaaaataaaatagagtaaattttaaaaattatttaagtttatatttttttttaataatagggtgtatttaccattttatggggtgcaaatagaactcccctttgacatagcaccactcacttgcccaccttcccatgtaactcaaaactaacaccaaagtaaaatcttccaataattagactagagcacctacgtattaggctatttattattacattgaaaaaatgagtacacaaagcaagaaaatcttgtactcgttagggataaaatgcacaccagcagaaacttatagagtttgggagcaggaatttaaaggcacaaaaatgtaccaagttgtttcaaaactaagagctcttaaaccagtccttaaaaatataaatagatctgattttttagacattcagggggcagatattaaagaacaacgggagcttaaagagtgttaagacaaacgcaaagctgatcctgttaacaaggatttacaaaacagagaattagaagcaagggaaaaatatgttgatgtacatgaggatttatactcctttctatatcagaaatctaagctttcttgggctaaagatggagacatcaactcgtttcatttaagtgttagagagagaagatctcaaaataaaatctttactattactaatgctgaaggaattagagtagatgatccatcaaaagatggagacaccaactcggctctttttagaactcaaatgatgcaaaggcagcctgttttgtttacattattgagcgtggccctctcttaactaaataacatgctgacttgctaatggcagattactcaaatggggagattaaaaatgcagtgttcaacattcctggaatcaaggccccagtccagatggctatagcagttactttttttcaagataactgagagctaattagacatgatgtctgtgcaaccattattttttttttacaatcgggtcaattgttgcaggagattaattcaaccatgcttaccctgatttcaaagatgaaatgccccatcactataagtgatttttgacctattgcttgctgcaatgtgctatataaaattgcaacaaaattgatctgttcaaggctaaaaactatcctaccagatctaatagctctaaaccaaggtggttttgtcaaaggcagttttatagctcataatattataatttgccaagacttgatcgtacactgtggaagcaaatctatcagatcaaactgtatgatcaaacttgatttacaaaaggcttatgatactatagaatgtgaatttttagaagagctgctccgagcctttagttttccaaacaaattcatgtccctcataatgaactgtgtttctacaccaaaattctcactcctaattaatggctccatgaagggtttctttgaatccaaaagaggtctttgccaaggagatctaatatcacccttgctctttgtacttgtgatggaatacttaagtagaatcatggagaaaattagtgaaaaggaggaattctattttcatgatagatgtagtgctttgaagcttaatcatctaagctttgcagatgatatcatattattctgcaaaggcaattttaagagcatctatttaatcctacaaggattgaaacgcttttcaaatacatttggtttgaagccaaatgttcagaaattagccctatactgctcgggtatggatgaagccgaaattaaacgagtactagatgtttcaggttttcagcaggcagtatactctagtcagatatttgggcttgccaatttgcactcaaagtatatcttccacagaatgcaatttactggtgcaaaatgatggcagctaggattaaagtgtgggctactaggaccatctcatatgcaggttgaattgtccttatcaattctcttttgctcactttccatgtactggagccagattctagtgcttcccaagaaaattatcactcaaattgaagacaattgcagaagctttttatgaaaaggccaaagcaatatgtgtggctcaggtagtgtggcttgggacaagctttgccaacccaagaaggcaagaggattagggttcttaagcatatcacaatatggaacatgctgcaatatttaaacatgtctggtctttagcaacaaaaaaagacaatctatgggttaattaaatggatacacaatgtgtacgtcaaagatgctaattggtgggaataccggcctcccagtcttagtagttggtgttgaaggaaaattgtggattgtaatgaaaagatcaagcttctcacggatccaagttagttttcaaacactgagtactctatctctattggttacaagatgattactgaaaatcgagaaagagtcttttggagcagagtagtttggtgcaaattgaatatccctaaacatagctttatgttatggatagctactcttaatagactcacgacaagagagagacttttcaagtttagaattatagatgaatcgagttgtcttctttgcaatgctcatgaagagacaactttacatctattttttgattgccctttctctaagaagtgtttgtaaataatcaaaacatggctgaactggagtttacaagcagtaaaacttcaaaccatcttaagatggattgaaagatcaaagaaaagcttgttcaggagaaatatattttcgactgtcattgctggtttggtattatctgatttggaaaataagaaatgaataagtgtgaaataatgtagggatagaaccgattcttgtagggcatcctagacaatgattaaaacaagaatctcttgtgttttgccgaaaaataacaacccaagttgacattgagcggtgtatttaattgtaattatctataactaatacaaaacaaatgatgtatagattttttcaggcctcttttgaagtgctattaggttgtataaaatgtttgtgggcaatacaattttctgattcataaaaaaaaaatttaccatattggaataaactaatgagaaattctcatttattctatcatgttctttttctctttgttttctttcttctcttactttttactctattttatattattttatagcatttgttttttttttttttttttatatatatagagaattatacaacattttaaaaaaggaaactatattctaaaaaaactaacgttaacaaaaaccaaaaggatgttccaaagtctctctcttttgagtggttcgaatgtatgcaaaaagtttgctttgtctgtttgctgttttggattgatcatttgaattagatcttttcactctgttttgtcttgctctgtttccctggttttgtttttgctctgttttcgtcccgaccatcttcctggttcattgttggtgttccatggcgtcaagcagtcacatgaaggagattgaggatcgttgacaaaatattcaaattgaggaagaagaggaagatgaagttttctatggtgacaataccggggaggatgacgacgaacaagccattgatacaaggtggtgtctcgttggccggttgttcatgggaaagatatcagttttttgggtgtttcaaaatgttatggctgatctgtggaagcccgggagaggtatgtacatcaaacaacttgatcaaaactgatttttatttcagttctatcacgaagtggacattgagcgggttatagcaggtagcccttggacatatgatcgaaaacaaatcattttttctctgctgaaagatggtgataatcccaggaccctcaatttaaactccattgatctgtgggttcaaatccacgagctgcaatctgggttttttacgatgaaggtggttcgcgatgctggtaattacatgggaacgttcattgaatctgacccaaacaattttgtcggagtttggcgcgaatatctcagggtgcgggctacgttatcgcttgataaaccattaaagcaaagaatgaaattctgaaaacgtgatggagaaagtttctacgctgtcttcaaatatgaatatattccactcttttgctttatctgtggtcttatgggacactccgaaaggttttgcccccgattgttcgacacaccagcaagctccatcgtcaaaccttacgggatc

SEQ ID NO: 14995 - DNA, 5308 bp, Cannabis sativa
tctctctctctctctcttccttttagctactgcatcgtttacagtctctttccaaaaagcctttcttatatgggtgcagagtgtggccatgcggcctgctggtgtgggttcaacttcttatcttgagctatgtatgcattcaccaagatttaactcgaccctttgttttcaaacgttcaacaaagtttaaagatgcttacacaactcaataattgtacttgacacttttttttggttaaaaaaaacaagaataatgtgaaatatctttcctgttcttttaggttgctctccccctattttggcctaatgattacgattgcacacttcaaagcttaccaacaggagcttggagcaagaatgagacattaagagctctggaaatgaaaagcacaagaattttaattaataaattcatgaacaatggcaccaggcgctgccaacttcttcgaaacagtaaaatttaatttgtcataacaaatagaagcaaaattctgtaacaaggcatcaacaccgtgtataattttctgttattaataataataacaataataataataaatcacatctcttaactattttgaaagccaatagatgataagaaaaagggtacaagccgcaattactgcagacagaataagagtgtctcttgatcgtcgtcttctgattgaacctacaaaagaaatgttaatgaactatttcagtaaaacataaatcattaatcatatcactcaatcgaaatggttggttttgaagttgttgcttcataataagtaccaagtacgccacggataacaggaaacttgtcactcagaagtttcactttcccttgaacatctccaaataaagccctttgagagcccaagactgcccttgttgtttgagcctgactaatcacatcatcaatctgcattgaagagagcccaaaagattagtatatctctgtacgaaccaaaatatagtacaaagtgcgtaccaagtaaaaattagcagataaaattgagcatgttagctaactgagtaggttaaacacttaattactaaccaaaataacgaatgattgcaatgataaagattttgaactactaaaagttgtaatgacgggtataaaatttaatatttctcttgaaaatatctcttatatgtttctgacaaagctgctagtgattttaaaatgtactcagcacttcaccaagccttatcttgctccataaccacttataactctcactacgcatgagattgctccatatcttgtcattttattctacagctcaagctttcataatcattcctcatgctctgttatcttttgtattccgcataattaattcgtcctgcagtatctgccatttctaaagttgaagcatccatgataactacgctcaaaataatattgaaactttactccaaggttgaaaaggtaccctgagaacaactactagttccttccttttctttccaattgatcaactatctgaacttgttcctgatactccagcataaagccaagtgaaatttcttcctaaactttcttaagagttagttgaacttaaaatgactggcttctgattaatctatttggtagagagtcttggatcttaagtatgagatctaccaaataaattaatctttggattaatctatttggtagatctcatacttaagatccaagcctctctctgctaataaaggagagaacttgaaatcattaatcttcttatcctagtcgttacttcaccaagcatgtcttatcttgttccataaccatttatacttttcattatactcacactatcgtttcatatgtttccattcattctattgctaaacccacaattcttcctcaagctctccagcctgttatttatctctattccccagaatgtattcctgcttcagtatctgtaactcgaaccataatcaactaaaataaaatataaggttataaattcaaataatttaaggaaaattttaaggtttaatcccatctaaggcaaaggataacggccataggttcttcaggagaaaaaaattccttcagaggtcttccaaaatgttgctaagaattacttaaataagtatcctcggatcaatctattcagtcaatctgagacttataacttaagatccaagtgtctctggttatgaaggatgtatcttgaaatcaaacaatctgctaagagtttatagaatcttaagtacggcccatcaggtgaaagcggacaactctgtaaaagaatttggccaatcaggtgaaatccaggaagctcttttagtaagcgacacttctggtgaaaacagtaaacccttatttctggtaaaaacctaggatagtcgtcatgacacatgatatttggcccttcagatgaaaacttgaaaaactctttccattgttagttcttcaggtacacccttcagcctagacattacccaccacaccagcaaaaaaaaaatacagaaagagttttgacttttacataagggtgttgggcatgctttaagaagattttcttttaacaaacataattcatgtttaagatgcatagcatatgggaaattgcaagcacagaacaatttattaaggcaacaatatagcattttagcttacatgagatatacttccatggatggcagatctctcccttaataactgcatccttggtgacatactcccagatgcctgtgtgaaggcacatcaaaagagtttgaattagtgaatgacaaaaagacgcgaatgacaactagaatctatgtaactatagagtattcagagatctcccaccttaaactcactgatgtcctccctgactgaggtcagaagctctgcatgttccctcaatgagtttatgttccccttgattcgtctaaattcctaaagaaacatgcatgtaaatgagcatattccacaggtcatatatcttagaagtaaaattgtggcttattatagcaacaatcagataaagatccattgggcaaaaattggaatgtgtccatctcgggcatttcttgttcatttactaataaaaatttcagggaaaacagaaaaatagaaaatggtaactgagaaaatttgagagcatagtccctggaagtacaacaatagcaccaaagtgattactataggaaatcaaataaccactgtgctggctctcttatttcaatagttatcctattttaaatataaattggtttccatttatcaaaagtattactagcaaactcgaagtagtaattcaagcatcaatacctcgttattttataatgaaaggattgagttaaaagacatagggagagtctaatgatttagtaagtaaaactaataacaattgtaacttgttcgaaaagtacagttggactagtagattattttgatcagaacaataaattgagaaatcaatatataccattaggaatttctaaaagtgcaccagtggaaataaactgtgaattataaattctctactttacgtgagatttcacttagacattttttttagcagaataaagtcctcaaatttgtaaatcaaaagaagaattgaaaatcatatctaaaaagagaaaaaagaacctgtgtaaactcatgaagtatgtctctgtgccttgctagtttttgagttacagaagtagctggtgcagcagaaacagcacatcgactcattgaatcatttatatccaacagcttctcaagaagagattgaatctccatttccatagacttccatgacctgctagacccaacagttggtgatccagtatccacataacctgattccaaaacgcctcttataagatcatctatgattcatttgttcccaacagacacagcataattctaaataaacccataaaaagctacgccaataatggaaatagtcatacactgcgttataactatgaaacatacccactcctcgttttaacaattaaaacagaagaaatatctctctactactggagggctggttttcatcattttcaagatatcatttaaacctctctcacacacaaaatgcaaagcagatcactacaattatgtcgttctctgtggaaaactcactactatgacagtatgccaattcaattaagtgtttgtatcttatttatttttttcttcacaatttcgcagctacgtcatttcaattttccaaatccaggaaacataaacaacgaaacaaagccacactggagcattttcgcaatggaaactataaccaatcaattctatccccattgctaacaatttatagattttacagagaaatgcaagtcagggaaacgaaataaataaaaacagagaatgaaaaatgggaacctccttggttgaacctagcaccgagttttccgtacgaagataacttgacgtcgagatccccttcgatcttccgggcctcctttctcagctcctcccagccagattcctgcaactctagaatctgatccgtcatctggacctccgagaattcgactccggatccaatctgtgctccctttatattgtgatccaacggttcttgtttgttcagttatttacagttgacgcttgattcaaactgtgttcattcactggtttgggtcttcttcttcttcttcactctgctttcacttatggtggagttgcttgataccagtggttcaatctggtccgatcatcagccaagactggatttgatcgatggttttgattttgatgatggtgttttcatttatacgacatgtcgtgtgctcgataaaattgtcgtgtcgtttaccgttgttcagaacatatttgcagtagggtccctcctttaaagatttttccatttaagtcctatttcctattttaaatttctagttaagaagggaataaaaaggaaaagaaaaaagataatttttaattttttttgttttgattttaatttttttaaatattttttaattattaatattaagtttgtgtatacaatggcactccactttgacacttaacagattaaagtgtactaaaacaatagaaaaaaaaaacaattttgtagattggagagttcagcccctaaaattacagtctaaggactaattgtgccaagctttaaaatttaagaagtttgaccgtaaattactctcaatttaactatgaatttaaaataaggtttttctaaatttttttaaacaaataaaagtacagtgtgtttttgatttatttatttattttttgaataaatcatgtaattttattaatagcaataggttaaaataatagcttgcaattcaatcaggacattttttctgttggagacataatcagtaccaaaattagaaaaacaagctaaat

SEQ ID NO: 14996 - DNA, 6906 bp, Cannabis sativa
  modified_base (6844)..(6850): a, c, t, g, unknown or other
gtctcgtcatcaatatggattctcctagccagggtattttggaccggcagagcattagagaggatactccaccaaaggattttgtgctctcaagaactttagaatttcaatgtttgttccataaggccggagccaccacacaggtaggggctctatcatacacctgtatcagataagcagacttggtagtgaatttacagcaaccctctttagtccaaatctacttatctctcccctgaccgctaggtctacccccttttaggatgttcgtaatcgtggcaaagtcgaacatagaccttagcaaggagatgtcccagtccccattactcaacaacagctccgaaaccttctctacgctcctaggataggaagagatgggtttcgggtagaaatccgttccatgaaccacccagggatccgaccaaacgttcgtgtcttcccatttgagatgagttttcaagcgccttttctgaggatagctttagtcttgaccacatttttccaaaaccaagaatcagcattattataggtagcatccaaaaaaagtttacttttcaagtatttggctctcaacaccctgcatcaaactgactgatcctcgataagaagggcccatccccatttttccaagaaagcctggtttaattctgaagcctttcagaatcgaagaccacctctcgctttaggaaggcacatgtggtcccacgcctttaggtaaaggccacggttaccctgctcacagccccaccaaaaatacctcaccataccgtcaatttttgaaggaagtttctcagagagcttagtagtttgcatggtgtaaacaggcagagccagacccatagactttataagtgtggcccgacctgctttagagagcaattttaacttccatccatgtaactttgacacaaggctgtctacgatgaagttgaagtccacatccttacggttagatctaaaaagcgggagccccaagtaattgatattcgtggtagttaggttgagtcacaactcctgcatgatatcccttttcattatgtcaccttgtattattgctaaagaatattgaggttttgagcttattaacacgttggcctgacaagttacaaaatttctcaatgcagctccaaacacctttggcttcagcaatcgtcgttctacccacaagaataagatcatcagcaaagaaaatgtgagataaagtaggcccatctctactcagcctgatggctttaatagttccttcctcaattgccttttccaagattcgagaaagaatgtcagcagcccaaataaaaagatacggggatagggggtcaccttgtcgtaacccacactcaggagtaagactgctaacccttcctccattaagatggatattaaaagtagtagtagtaatacactgggaaacccatttccaaaataaatcaggaaccttgaagctattgaggacatgatcaataaaaccccagctaagtttcatatgctttcaccagatcaattttgattgcgaagaggccttctctacccttcttgcgtttgaaagagtgaatgattttctggaccaaaacattattgtcattaatgctacgacccgacacaaaagccacttgagtggggcatatcagtctgggaagcaacgaccggattctgttagccaggattttggagataatcatgaaaatcacattgcagagagagattggtctaaattgagaaaccttcttaaggttatcaacttttggaattaggatcacatttgtgtaataaattttttatatttctcacttttccatttttcaatttatatatataatattcttaagaattaaaattatattacttaaatatcatgatatatttatattagttttgttaaaattattttattttaaagttaggttgattttttaaattttttataagttgttggtttatatatattttggtgtataatatatatttattttttattgtataatgtattaattattatttttagatgatatttaacatttattttgttatgtgtaatattgtatttgttagtatattcatatatatatataaatatgttttaatgtatgtatataattttactgtcatgctacatatatttaattattacttttatatattttaattgtgagatgtaatatttatttaaataatatttagttagtttcttttttattgtatacaaatgtgctatatattttttttttttaccatagtataaatatatatattaatcgtgataaataatttagttagcatagtatatatatatttagtaatatactttttaattattattgttagtataatcttttggtgaatggtatatgtatttattattgtatgtgttatctgtgtgttcgtataagtgtcacgtgtacttttcatcccccaaaagtcaaccaagacaggcccattcacaggcccaaataagtcagtgggtcagcccacaacagtgtccaaccacagctccggatctaaggccgaatcttttttgttccgagggcaactcgttcagagaaggaaagacttattggaacaaatttggatgccctcacagggtaatccagatcgggcatttgaataggcgtctgggtgctaccttacgtggcacccttctcacatcaaatccaacaaaatcagggatttttcctctacgtcagacctgggaaaagcgcacagtacaaaaagttacatactgtttgttaaacgtccactatcctaacatttactgcacaccataggcgacgcatgcccacctttcgccatcaaatggtactatccctatagatgacaactatctctcaaactgggcctcacctaccagacctaatgtcaatataaaaatgtattttaccccatcaaatggcttatttccatgtgtaacaccctaacgggtctagaattacccaaaaatcctgttagcctatattgaaatttgacaaagaaaacttgtataaaatatttcatagctaaagagcttcaataatactgactcgtggactaaggctctcattaacgatccaaccacgtaaaaaaatttatcttccttactttaaagttatcttttcttagcttaaccttttattaatttggtttctaaaaatctcaataaatattttggtgattttattaagagctaagaaaagtattatccactattgtcatctacaacaataattgcaaccagaaataatatgcttaaaccccacgctcattaagatcgcgaagatgatgttgctgatgatataaactgaaccccacttgcaaatgttctagaaaatgtcatgaggaatggtgaaacatcagaggtggttagtggtccgccttgaaagggcaatagctagaaaaacatgttgatgaaaatcccttcgaagaggacaatagggaaggccttaatgaaaataaaaaggagggttatgacaaagattatgacaaacaccagaaagaggattactatgaggatgaacccgaggtggtgaggctaagacatgtggtctttgatcaacaaaggaaaatatcagatcaagaagaagctacccaccagatttaagaaacccttatacagctacaaaacatggtagcaaaggggaacctcaatgctaaaatacccacactagtgggaaagtttaaccatcctgggctagaccctttaatccagtaaacaacaagagaaaagccaaaatggttaagtcctaaaggaagaactatccaccaagggctgtgcaaaatgttccacagaacaataggaatacggtcaacctactcttgcgtaaagataggaccgctcgagtctcagggctagaccgtccactcgatctacgaagtagagctgaccaaaaaaaaattacctcaatgattatgttaacaagagcatttaaataggggacttaaatcaaaaagacaacatgtcaacaatgaacctcacgaaccgcttgaatgctaaaagggaaaaagtaagatgtgagaaagccaagcctcacggaggatacctcataaataatataaatgactgaattcgtggacgtgaatttttggaagacaacaccagaaggctgaaggatcaaatagttgccttaaccaaaataacaaactgattggtctgcaagaaaagtggtactgtgtccgattcagatgatgaagacccagagccatgcattaaaaggatttttgatgccctattgtcagagcactttcacattcctcaaatggaattgtatgaagattcgataaacctcagggatcacctatcccggtataaaagattgaagacgatggtgcatgtcaatgatggcataagatgtttgtctttccctctcactttaactaaatttgttaaagagtggtgcaagagattgcccaccagttctgtacagaacaggagagatttgcattccatgttcagtaagaaatttgtgtttgctaaagattttaacatggaggttagttccctgaccaacatcaagtagcagtgtaatgccctaccaactaaggcacgttatggtattttcttaattatcgtgctaacctttgctaatcaaagagttttaacataaaagtgtatttaataaatttttttataataattaaaacttcactaaacatacaacctatttataaaatatttactattcgggatcccaaaatctatatataaaaaaacataatttacatattaatcaaaagtgtcatctaatgacatattcaaaactaagctagaagtgtgtcgaagattgcaaccctccatgtctagacgtctggatatgtacaatcttcatcaagcccagctctcattgtggttcagcctaggccatacctttacctacacataaaaacatatttgtgagtcaacaggatcagtaagaaaagcatgatacactcaattaccataagtctattaaactgcatccaatgtgtatatgtttgagtctcgaacgttggtaactaattagccataataccaaactgcacttagtactctagtcacactaatgtttgtagcgttaattcatacttttcttcattgccaaccatattagatatcaatatcctgatgcaactctatgtacaccataccattatctcagacatgctagctacaaggaaatataatatacatgtatactaaacatgggcatctgaatactattcttactttaattatgaatctaggtgtgttggtcaaactgagtagaaaatttctcgacgattggaggccctaagtcacattagcgataaactagtaagtgtctattctaataaactctctaatactcatatataaaaccaagagtttttatactgaactacatggtgagagcaccctaaaataaaacaaataatttggctctaaatcatgtaccatgttgtctaactttttacaagctttctaaccatatattaaacatccaaaatagacatatgggtgaaaagttattgccaaaatacaaaattgattttccccaaaactatccaactagacttccggttggtacaatccagtaccatcaaaaattttggttttcaggatgtattatttatgtcatacatgaaattttatgtttttgcatgttttgtgcccgacaacattagaacgcgacgtttggccaatagaatcacattttggtatttagtagtagcagggccatatagttagacattgggcatgttgggagttattcaagattttgaaatgaccaaaatacccctaagtgacttagaagctttttggttttattgggggggggggcaaaatggtctttttaaccatttaggtctttgtcctttagtgagcttcagataagttttattaatttgaatgtagttttaattaaattagaaaaccatttaatttattcatttttatccaaaataagaaaaattaagaaaagctaactctttcctctctaaactctctctctctctctctctctctctctctctttagaaccagctagggttgggaatttttttgctcaattcaaggatttacttttagtgattttaaactcaaggtaatgttctagctcatctattattatttttcttaagtttcaagttaggtgttttatgatttttctatagttgggtgttgtagtgattcatgttatttgagactatactctgaggttaaaattaggttaattgagctgaattggagttagtttgtggcttgatttggttgttagacaaagtttgtgatttagaactcaaactttggtctttaatggtgatttttgattctgagcatgttaagttgttttgttgcatgaaatatgtctattgtggtatattaagcaggtctagaaggtttggtaaggtttggggtcaaattgagggtgtagtgaatttttgagtgtttcgtgactgaaccggtcgaccgtttggtccccacgaaaccccatagaattggaattctggttggggagctggtctacaggttggggaatttttgggaaccctagttttttctgtttttacaatatttagtgtattgccatgctatccatcgataaggaaacttttagttttttttaagtttaagtccccggaatttgatttagcgtgtcactcaccagttttacaaataatgggatttaggggcctataattcatgaagtagttgtttcactcaggttggccggcacacctgaatttgaaaacaaggtaagattagtataataatatgcatacatgtttacatgttcagcgtgcatattagttaagccttttagattacattatagtatcgatatctatatgttggcttaagtgctactcgacaatatcatatcggtatgactggagtatgactagcgtaccgagnnnnnnntgatattatggtcgatagtactatactacctgatagtatcacatcggtacgactag

SEQ ID NO: 14997 - DNA, 3673 bp, Cannabis sativa
tttacaaaacaccctaaaatgaacaaataaactaaatattcaaatttgaaagtccaagagactcttctaagccatctccacttatggaattagtacaaaattcacaagagagatttggaggagtcatatgcaaacagtggttgattttgtgctcagtccaaaccagtcgtttctcgaaactcaacaccccgaaatgcatataccgagtttcaatttggacaactttagcacaagcacgaagcaagatgtagtaatctgcatgaacagaataagtcaacgagccttcgtccctctttctcgcgtaatgtagatacccaaattttttcaattgtttcctcggcggcatgtaatagaacctgttttcctccatgttctgtttcatttctttaatggattcttctttaagagtagaagtagttgaagttgtttcatctttcgggttttggtcattttgtgttgtactcttggaccggtcatggttttcacttcgagtttcactgtcggatgaattactaacaccctcgttttccttgaacttcttctctctatgtgggaatgttctactacgctcttcatcttttcgtaatcttttttgcttatcggctctactataattatcacagtctacttcagttgttttcgaatcctagattgcaagacaaaaataaataagttccagaagttaagagaaaaaacaccaaaagactcgaaatcttaccgttttgttctgataaaaaccccataactcttctatcagtttttgctcctcgtgattctcaaatgacggttctaaccccgcaaaaactacatctttacagtgctggagatatgttggcaagtctttagaatactctgtcaatgtaagttaaatcattactatcattatccttttcgaggaaaaaaaagaaagatctcaagaaataacttttaccatagttttcatgtattccatgatacaatgcttcaagattgctcagaagctcggcagcatccatctcagattcctgaagatgtaatgtgtttataacagggatcttataaggatcatcaacgaaacgaggaaaaccagaatccttgtctttgaaatctttcaaactaggagaatcagaatcttcttctaccccattagatgtggaagaaacattgtgtttagacaaacttctctcccatattccgaagccgttaatattataaagaattcttattgcaacaatcagtatcgacatcacacaaacacgagtaggaagccttagttcactagctgataaccataaatttggaggcattgaccactcgtatatacgacaagcgtgaggaagaatcttatccgaaggaagtgatagcttttgaagatagcgtgaagcgatggcgtagaaattcacaggaggtaaacataagcctatggatttagcaatggaagctgaaagtggttccatcttctgtgctgttacagattcaagaggcctgaacatggaacttgaacttattgggcaagcttttgttggtggtccaatgagtttttcgatttcaacaaaagcggcaaagtagggaagtttcccttctaatgaccactttactatatcggttgtcaagactgcttccctggcgagatgacaaactagaaaagaaatggctaaagtacaagacaacggtatcttccttttcaatgatctgatccatatcgttacagcacgctgaccatacatattttggggttctgaattatatttaggccgcggctcatcattaggcagctctcctgaaagaaacactcattcaaatgctaaaatattcattaagacaactaaaatatgcttagttgttgtaacttgtaaggcaaggcatctaagaggcaaaataagctaaaagttaatatgtatatatatgtttatatgtatatatatactctaatctaattcaacttttatgctaaaatatgcttaatagccttaatgattccaaccaagacttgcgttatctgtatcaaacgcgagctacgagcaaatagaacaactttctgaagtatcaatactgtcacgtgaatcgtaaatttaagacagttaaaaataaaatgatacattaaggtgttttgagtttagtttgagcaaaccttgattctgattctcagactcgttaatggcttcatcaacccaaccatcatcaaacactcgagtggcagccacgaaccgcaaccaaatggtcccagccaacccacaaatcaaagggctcactttaaactccctaaccaaagcctcacactgaaactcaatcatcaactgcaaacccataatgtatcgaatccttatctcattatagtagtcctcgaagctcggaatgagctccccgacagacccaaaatcctctgggccagtgggtccaatgttgtcactaaaaagatcccaactataattgtgatccacttcctgactattgatcttgacttgaatgggagtctcttctttgtcttctaaagttagggaagtccaaaattgagagtgcattgaggcattgaattgggactgtgattgagaaatagtggagacgtgttggcgttggcggcggtgactagcgacatagacagcaccaccaccaccaccaccaccagggcccttatcgacatagtcctcatcaccaacaccggtgtcaatgatgtcctctgcctgagaaccacaccgaagacagtagaagaagccatctgcatcatcagccatcccaacattgccgcaagtttgacatgtcaaggccatggggtctgccattttttaggggtttcgaattcagatgactcgtccttatctgaaaagaaaatgcaccaaaccttcattaagatattatcatatattgagccagaatccaagtaaattgcagattttatacaaatatatttatgttctaagaaagaatattaactaaattattaattcatataaagaaaaaaaagttgaacacttgggtggtgtactgtttggcattgttttctttttttcctttttttttaaaaaaatgtgttctcaacaatgagaacaaaaaacatgtttggatgataaaaactgatctcagaaaacagtaattttttttaaaagaaatacatatattccactcacaatcatgttgcatgtaaacaaagatacaaatgtatttcaaccctaacaaaccaacctatattaatcaagagtacacaattttatgccccaaatttacataaaacctaccaatatcaaaaatggcacattaatatgatctaaaatataaacactaattacatataaaaagagatttcaagtacctgaatttacataaaaataacaaatctcacataaatatgatttaaaatgtagacactaactacatataaaaagagatttcaagtaagaattctgggacaacagaatgtttatttcatgcaataccaaacaaggttatagtaagaagaaaagagaagaacatagtatgacagtgagaggagagaggaacaacactgcagacatcgacacacaacttagaagaaaaataaaagagagcaaagcaacgggtaatagcagaaacaatcttaaagatcaatcatcatagtaaaagattaatcagcattgattttgcttcaatgcacagtcacaccataagtaaaaatacagagaaaattacagtggtaatatatctttgcatgtctcctcta

SEQ ID NO: 14998 - DNA, 4376 bp, Cannabis sativa
tatatatatatatatataggagggactttgaattttagtagatcatagtaaaaaaaaaaaaattgacccttatttagaaatttaaaattagtagaaaatatatattatatacttttaaaagagaaattttttttgagcacctatactaggtgggtccaaacacaaatttagccaggcccctgtatatataataccaaataaaagtgtttgaaaaaattctcaatgaagccaagaaaagtattctcacaacaaccagggctttaagttcttaaagttatttatgctaactgtctaaataaagataatacatatatatatatatataatcattaactaaagcaatgataatctcttgttccttaagtaactttccaatattgaaattttacattactagctaattacattcatcacaactggtcttaattagaaaaatctattatttcatctttacttgtacaacaaaatataagacatgtatgattatgattcaagatggtctaacaactcttgaaatgttagtatatacctaaccaaattatatatggtatatataattaattcattttcagatataacatcatgcattacactatgcacgatctacttcttaagcttatcaaacatgcatttatttaaaaaataaaaaattaaaataaaactttacagcataactatttaatatttgtaatcggtaaagatctattgatttttttagcgtattaataggcataaatcaattgatctttacaggttattagcctaaaatattaagtagttatgccgcaaacaactcaaaataaaaatactaaagaaaaaattgcattattacctgaggggtagggaagcttattagggctccatggttgcaaaccaaactcacaatatgtttcaatttgtgtcctcaaaccaataacatcccaccatttcttccaccttaaagtagccatagcttcttccatggtgtgaatataaaaggggtgtttcgaaatagccatatctacattctttgacacaacaagtccatgaatcaaaagcaaaggatcaaccatcaattgcaacttggcatcaacccaaatactaaatttcacatttgggaaaagcctatgaattaaatacttagctatgactccattcatagctggattctcatacaaatctttgctcaaaactttgacaattctccatgctcctattctattgttgttttctgaaactaatttgtggtactttagtcctttgtgtgttacatcatcaataaacatgtaaaaacatacattgtcaagtgtttttgatccaagtccttttggttgtctaattttgtcatgatcattaaaaattgctgagaccacaacaactcctctacaattttccatttcatttcgatctgtcacacattttaaaaaaaaaataaagattataaaaataataacgttaaacaacctagaagataataaatccccgtgaaaagaagggatcttatctaactacgcaagttctttatctatctgaactgcataccgaactaatccatgaacttaagatcattgcagaaagaagattgcttagaaaaagttttaacaagcgctaaatatcgaaataattgttacaaagaaagaaactaaccataatcactaattggaaaatccttaaagaatccgcaaggaatttctgtgacattgctttgatcaaaaaatgaaaacctcttttgtgcactaaaattcccaccaaaactctcagcctttgtttgcatatatttcaaagatgagataggtgaataatcttgtgtagacaaatcttgaatctccttcaatacatttaaataatctgaacaaaacccattaatcaaaatccataattaagatgacccaaataaagaatttttggatatagaaattatatatgtacctgaaaaaaacacaggtgatgaacaagtggaacgaagggttgagattgcatacttgtgttgtccataggaagaagggtaggtaaaaagtggtgtgtgaagaggttcaaaaggtgaagatctaaagagacatttggtattggagagagaagtgtagagagctaagaagagagatgttaaaagatagagcagagaaaaacagagcaattttgattcgaaaaacaaacctcttctacatgttgttgattttcccattatcatcaatcaacctcattttttgtttgtttgttttcattatatatcattctcaacaacaacaacaacaatataaataaataaatatttgttattgtaaagttaggatcttttccaacaaactacaaaaacagttactaagttttattaaaacatttttattttaaaaagagaaattatttcatattttattttttacttttttttttttaaaaaatttaccgattgctctgatagtttctatatgactttctatatggatttcttaaaaataataataataaaaaattattttaagttgtaaaaataaaaaaatctccaaatatatattagataagaaataacatattttgataactttcaaaataatacctttttttttaatagatttcatcatcacactaatgtaatatttatttaattatgaaaaatctataattggattatgacttagtttcaaaataatatgttgatcatgtataaaaagaaaaacttgcactcgtctaatattttttgaattatattttcaacacagaatttttaaaaaatgagtatgatgtttaatatataactctggaatgtaatatttcacacttaaaaaaattaaatcccattttttttaataataatgacgtcaaatctaaattttcacgtttatataacaatattcaaaataaggtaaagatttttatttatttatttttgattgaaataaggtaaagttttattaaatatataggggcacgattttgtcccgtgatgtactttcacagaatgtatttcgtgatgtacgacaaccgttaaatgagagagttatttaatctgaaaggtggagttgatctaagggtaattaaggttataaaataggaacataccctgagactatccagagatccattatctaatgtaccacggaatacattccgtaaaagtacattacgagacaaaatggtgtgccttaaatatatatggccggctttagttttatttttcttaatgaaataaatacatatattggttttggtgggtgataatatgttagccggtggtgttgtgtagctaaatccgtgaatatagttaacaaatcaaactccccaactaagtactaaccttttctttttattgatactatttattaaggtcacatcaattaacactatttgaaatagtcattcaaatctaaaaaaaagaaaaagaaataataataataataataataataataataatgttgggaagaagaagatatatttatttatcaattatcaaatcaaataacatgatagtaaatatttaaatttttataattatagtttttgttgtgtgtaattattgttgaaaaattatataagaataattaaaattataaaaatacatataatttagtaattagctcattaatcataataaaaatataaaaaacgaattcaaattcatataaaaaaaataaattagtttgcatcaagagtaaaacacagttctaaaataccagcctaccttataaatttataggcaccatataatactactcgtattttcataaactttttaaaatatgggctaagtcggcacctcatgcacatatttacttacaatttttatttggttggtagattttgttgggaaagcttattggaattaattataatattttttctctttgtatgtcaaaaaagagatacttatcccatattaaaaataagtaatatcaaatatcaactaaagcacggcaagtaatataaaatacacaaatcaagcataaaagtgagacactaaattttttacgtaaaaatccaatgcgggaaaaactgggagaccgtagtccgttcaaatcattcactatcaccaaaattcaatagtgagattacaaagttcttctctagtaaactaggctattctgaaggtactaaaagttacagactatgggtaattaagaaaaaagcgtggacttaaaactataaacattaagaatgtaatttttaataaaactatttttccatatatttttattaatcctacaatttcaagaaacaatcctagtactaatcctgcaggaaacacagccagttttgatctaaggccagtgatttcataaactaagcagagcccaaaacaagctgagcataatagatctaaccatgatactgatcaaatggaagaaggagatggtacaagtcaggtgaaacaataggaaaacccaaaagagatacaactt

SEQ ID NO: 14999 - DNA, 14489 bp, Cannabis sativa
  modified_base (1212)..(1213): a, c, t, g, unknown or other
aggttaattataacctaacaattaataaatatatttacattttattttatttgataattatttataattactaaaataaaattggtatttaaataattagatgagaaaagtgttaaaattagaaaagacgcttttgtttcattagttgaaataaagtggcaaaaatctaactctaaagcccatcatgtgatttcgcccctaagagttgatttcagcccaaaatcttttatttcaattcattttatctaacctaaccctaactgaaagtctatagaaagtgatgagaagagagaattaacctaacctaaacacaaattcatttttcatttttttcagtaatatatttataatattttataataggagtttattccaatttaaaactagtcccaagttaagttgaatcttttgtaactatatgaaaattatttcaagatatgttattcgaaaattaaataaactggaacgaattactcaatgatgtttttggttgagcttcggactatatcgctctttttaagatgtattacgattctgctcgaagtgtgcacgacagtctatcaaccacatcgtcctcaagataaaacgagctctgtatacgaatcgttttgcaccgaatgatagcgctcaattacattcaaaaaaattactctgagaaaaatcgtaaggtagaagagagatctttttgtgtttgtccatcacaataaaatggtaaatatgatcgtgggaggaacgatagtttatggaagtaaaaagcagattattgactgaattgacaataaaaactatttattttattaaataatttttcggtaaaaaataaagtgacatcacaaccacccgcctgctagcccagcacagtcagacatacaatggtgcgcgcgtgtaatagtatggtgtgtcatgcgcacaaaagtactaggtgacccttagagcccaaactcaaatctcatagttacaccttatgtatatacttccaaagaagtattcccgtatgtgagatttaataaactaatacaattcacttctcatatatttaactaaagttccaaccatatattattataatcataacattactatatataaaaaccaaatatattattatggtcaaaatattcgaattgatatgcataccctaaaccattgacaatatatttagaatttacaacaaacatacatctctttataagaagatatatatatatatanntaatatatatttatatatatttaccaaaaaaaaaattaatctttaaataaattgtataaatcataagacagtggaacaaagacaattatataacaccaatctagaaatcaaacattaaaccagattgttcaaacttttcttgaataagcttcttcccacgctcagccatttgaggtgttaaataattcacccaatctcctatctcacctttcctataaaatgaactatttggaataccaacataatgtctcccacttttatttacctccaaatttttcatattttcaaggctacacaattgttctattttttttggaacgccttgattttcttcctcaaccgaaaatggaaaccccgaaaaatctgcgatctttctaataaaaaacacattgttttttttaagttcttcatatttcaaaaacaatatcttgtgaggcatctttaaacttgctttccagaatcccaaaatatggtcccaaaatggtccatatatgtggattcccttacaaaacacatcaaagcactcttctaaatgacttggttcaatattatccccagaaattttatgaacaaagtgccaatgggaaacaaacaaatccaatggatttctacaaatatatattattttagaattggagtacttgatggagggtggcaaggaagggtaaggagtatgtgtactcataattcttggctttgtttcattaggtaataatgataattcaagttcaccaataagactatgtggactagtactaaccaaagggtgattattataattactagtacgtttgacaatagaaaaaacaagagattttaaccaagtagtacctgattttgggcaagaagctaacaaaatatcatcatcccttgctacaaattgagtttggaatgatattatacctttcaagacgaatttatggacccaaaatccttggtaacaataataaggattttgatcacttattggatcttcagccttttcaagctttgctagaatttcatgaatggtttcttctccctccattaattcttcctctcttttcttgttcttagttacatttgatatttccattattaattataattatgagacacaatatactagctcaattatatagatagtagtggtgagtgactctatataataataacattaataatgaaagattgtattgattttctctctgttttggttttatgtttttggaagggttgaatattattttttcctaatacaacatgtattatatattgttaaaggacatatagttgttgtacagtagctagctaagcttcggtcgccaataataaaataattttcacatttcacatgttaattattttaaattttttaacttattgattgaagttatgaataataattcagtcgaagaagatgaagaagcaagatcccaaaagtggttgtaatttttcggtaaatggtaattaagtatataaattacaaattgttcttgttatgataaatgatatttattaattattgtacttaaatcttttatcaatcatatgtcattatttgaccaacataattagcattatttgtgtcattatttgaacaacatattattagtttgatatgattagtgttgttggaggaatttagacaatatcaaaaactgttagtattaaaactaaatgagaacacccacttatagatttacaagtattcgcctagattggcaaatactcagaataattaatcaaatataaaagcacataaacaaatgaacattaaagaattatagtggtttagtcagagcccgatttgcttaatccactttaaaaggagatttgtaattagtttcattcagatttgatcactcctttatatagaaagaaagtgatccttcagtttacataaccggtcagatagaatgcatgtgactaatgtcggtcacgttttggacattcatgtaccgacaacatataacttgtgggttctaaatgagttctcgtgcacattattcatttggagctgacacttgtaaaggcgcagtctttacattgggcacaggggagaaacattgggttgtagcatataatcgatatatgcgcaactctggcgacttctctctatgttatgcttctattctactatgctaggcatagtgtgcgattggatcttgtcgcggtcgcaccttcttgcaagtttcaatcatgcgaggatagccctgtaggggctgttattaacacatcatccttttctactgtgtccacgagtcagtcgtatacgagactgtacttgtatttctaggtaaaaaattcatcttataacacatgtccttagttttgcgatgatacttgtctgtcacgtgacgaaactatctcgagggatagtcgagtagtcacattgcgggtgacgtctaaattaccttcttgaggtgtatgaatggaggtttgtaatttacctttacgtttccaaggtgccacatcattgaaaccattcggggttcgtgtccattgaatggacgtgcaagcgagtctcggggatagccattcaatgaggcatccttggtttttactcgccacatgtcatgatctcaataggacatctatataaccccaaatacaaaaatgaggcttctatttttcctcttattttcatttgctcaagctttcgtaaaaataacatccagtccgatttgattggatattaaaaaataacatctaatctgatccgatcctaattagatatccaatgtttgacggtcggttgtaattggatcgattggttgttattggattagattaatttatgcacacccatacctaaggaaaaaaaaaaaaaagtattataaaatataatattattttaattgaaataatacattttcttaaaggaattgaaatagtatatgaaaatataaaatgaggcaggttgcaagtttccaaactttagttactcctactttttggtggacaaataccagacctaaaataccaaaaacatgactcttaatttaatttaatagatataattatgatggagcaaacacctcaaaaaaaaatgatgaggtattgtaaaatttgccatgtaaaaataccaaaatattactttatgttttattctataggtatcaactgctaattaataattttatattttatctgaatatttgtagaaaaaatacttaaattttaaatttacttaaaataaagctaaattaggacgaaaaataagaaaaataaacagagagaaaaaccgggcaaaatttctggtgtatattgtattaattgtattaaatcctcaatgaatgtacatgaccgttaatggaaaatatatagtacatggaagattatctttttctaacaataaaatattcatttttccaatgattggctgaataaaaggaatcccaagattttaggaaattctagaaatctctaattgacagctcatggtatatcaaatgatgaggtgtccaagctgaggtaaacatctaaatggaaaatatctaatcttttcaacacgctccctcaagcttggcttggttgatcaacaatggcaagcttgtctttcaagtatgagaactgacttattgacagtggcttagtaaaaatgtctgcagtctgttctgaggtgggaatgtgcctaacttcaacaataccttgtttgatgagatctctaacgtaatggacatccacctctatgtgtttggtgcgactgtgaaacatgggatttgaggagagttgatttgcaccagcattatcacaccaaatgacagcatgcaatttatgtttgatctcgagttctgtgtagagtgaatgaagccaagcgatttctgtggcagtttgtgagagggccctgtactctgcctctgttgaggattttgccacaactttttgtttcttagaaccccaggttatgaggtttcccccaatataaacgcagtagccaatagccgactttcgatcatcaatggatccggcccaatctgcatcactaaagcattcgacattccactcatttgacggcttgaagagaatgccttgtccaattgtgccttttaaatatttgaggagacgtttgcaaacattacagtgatgttgggttggactgtggatgaattgacttaacttattcactgtgaaggcaatgtcgggacgacttagagttaaatactgaaggccttccatgacacttcaaaaaaaccttggttgatcgaaagccttgctgtcatttatattgagtttgtcactctgagagataggagtaggacttggcttagagtgtaacatgtgagttttgttgagaaaatttattgtgtacttgctctgtgagagatggagaccataggccccccgagtgatttcgaaaccaagaaagtaatttactgagccaagtgttttgagtgagaagcattgctaaagttttgcaataatactgcgaacagtgagattattattgcctgtgaggaggatgtagtcaacataaacaaggagatataattcaacatcaccttgtttgtaaaagaagagagaaggatcggatacagagctgtaaaagccaatggaggataatacttgctgtagacgatcaaaccaggctcgtggtgcttgtcgaagaccatataaagctttctgcaacttacaaacatgatgaggatgtgaggtgctaacataaccagcaggttgctccatgtaaactgtttcggagagtgtgccatttaggaaagcattatcaatatcaacctactgtatatcccattgattagaggcagcaagatgaagaataactcgaatggtggaactcttgacaaccggactaaaagtctcataaaaatcaactccaggttgttgctgaaaacctttagcgacaagtcgagctttgagaagttgaaccgtcccatctttattgagcttgacaggatacacccatctattatcaatgacactcatacctaggcatcgaggcacaaggatccaagtcttatttttcaaaagagcataaaattatgtatccatggccgacttccacttaggattttttaaagcgtggtgcacattctcaggttccaattcagtcattaaagccaaaggtaagggcgaaaaggcattaaagacatggggtttgtgaatgcctaccttggctctagtgatcatagggtgggtgggctggggtggacgtggtggagggcaagaaattggattagtttgttgctgaattggggaatgcttaagtggctgtctggtgtgagaaataggtgagagtggcaggttaatgtgaagagggatagtcgggtatgatttgatagaggttgggctggtttgttgtgatggagttgatgatggagtaatgggattgtgcagatgagaaacaggtgaactcgaggagtgttcatcttgttgagaagcttgctaatgagtatcaccaacaacaactacagcacgagcatgttctaaagttacagtggacagatatggtaaccattggggatattgactaggtgagagtgaggaatctgtgtgtgcagtgggatatgtgaagccattagcaaatggaaaatcagattcattaaaggttacactactagcaatgtagactctacctgaggtgtgaagacacatatatcctttgtgtctcggactatagcctatgaaaacacatttggctgaacgaaattgtaatttgtttgtgttgtaaggccgaacatatgggtaacatgcacaaccgaaaacctttaggaatttataatttgggacaagaccaaacagtttttgaattggacatttataatttaaaacacgtgtggcaaggtaattgataaggaaggttgctgtttggaaagcctcccaccaaaatctttgaggcatacttgaatgagcaaggagagtaagaccggtctcaactatgtgacggtgttttcgttcagcttttccattttgttgatgagtgtgagggcaaggatgtccaaatttcacatctatggattagagatatggctcaaattttctatactctcctccccaatcggtttgaacagtttttatggtggtatttagttgtttctcaacctacattcaaaaggctttgaaggtagataagacctcatctttggtgcaggaccccatatgtttctcaaaaaatggatgtaataacgatagccatgcctagacatagtgggtgcaggacctcatatgtccgaatgcaccaattcaagggcctgttttcactcttttaaagtagcaggataagatttgtgatgagatttaccaagttgacagctagaacaaaattgtaaattaaaaggtaaagacttcttttcattgattaaaacatgtttaagtacattaaaggaaggatagcctagcctatgatgccacaaacttgattcactagtggaaacttgaaaacaagactcgatagactctaaattaggactaacactaggactgttaacactagacttttgagtagacaaacagattggtgagtaactagcagaacatgttgctggtgtggtaagttgatagagtccattgctaagcttcccttgaagaagaaccctcttcgaatccatgtccttcaaaacacaatcattagcataaaacttggcataagccttattgtcttttgttagttgtgaaacactcaacagatttttagaaatttcagttacacacaatattgtattcaacttaacaggtttagatataccagaggatttaatgactgaactaccaatatgagaaatagcaagcgactgtccattaccaacgattaatcgactcttaccactgtattcagcaggagtttggatgttgttggcgttgtcagtgatgtggtttctggctccgctatccacataccaatttgtgtcatcgggatgaggatgctgagacgagttggctaagaacgcctgctgattagcattgttgttgtgttggtggtttgcattgttgttttgagagggattctgagaactagcagctggagtaaaacttacatcaaaacgatagtaacatttgacaacagaatgtctaggcttgttgcatagttgacacaccacacggttttgatttccacgacctcgtccgcgactacggccacgaaaaccagaggatcttcctgagttagatgggatgaagggcctcttgcctctagcagcaaagttggcaaaaggagcatttagttctgaagcggaggttgagttgagttggtcaatacgcatctcttggctttgataaagaaattgcacttcaaagagagttagttggtctcctcgagacgtaagattaatgaccacagggtcatattctgggccaaggcctcccaatatataaagtataagatcatcatcagtaacagcttgtcctgcagagttaagactgtcagccaaagttttcattttaagaatgtaatcatgaatggtcatggaccccttctttagggactaaagttgaaacctcacttgtagtatacgggcaaaggattgagtggtgaagagagtttcaagaagggaccataactcattagagatgcgacaacgaagaacatggccaagcatggcttctcaaatcaagttcaagagctagcttaatatggcctgatttgtacgaacccaaaccgtgaacagaggatttacctgctgctgcatgttgggattttgttcgacaggagcatcgagaaattggggcgcacatggtctggttcataagagaaagtcgtcgagatcgtgagcacgcacagctgggacaacttaggaacgccaataagggtagttgtctctgtccaagcgaatggtgatgggggccaaaggttgtagtagaggtgcaggaagcgttggagcagctggtgccggagctggagctggaggaggagcgtcaacagcttgtgatctggtgttgttgactgaggaatcacaaggagaagccattacctctgataccaagctaaataaggacaaaaaataagaaaaataaacagagagaaaacagggcaaaacttctggtgtatattgtattaattgtattaaatcctcaatgaatgtacaggaacgttaatggaaaatatatagtacatggaagagtatcttttcctaacagtaaaatattcctttgccaatgattggctgaataaaaggaatcccaagattttagggaattctagaaatctctaattgacaactcatggtatatcaaatgatgaggtgtccaagctgaggtaaatatctaaatggaaaatatctaatcttttcaacaaataataaaataacttttttttaatttgtggctaagacaatgtattttatattgaagtgttagctgaattttttgaatttccatttttaactgagaaataatatgatgaagttctattataatgtaaaattaaatatttaataaatacattttaggccatgtttggttattagatatcataatgtaaaattggatatcgtgaagttctattatagactctattagtacattttaggccatgtttggttagaaggatggagagtgtgatagaaggaaaggatcgaaggatagagagtgaaagatggagagaagtagctcttctttatgttgtttggtttggtattagaaatagaactagaaaaataaaatgtatgttaattattaaaattacaattctatccttcctaacataattatttattattttttttaagaataaatataatctttatatatattgttttttttttctcaaatctctccattttaaaagtgattgtaaattttaagtttggaggaagaaagtcttcgaccacttttcctttcccttcatctttcctttttaccaaacaaaaggtttaacctattcctccatttcttttcatccacccctctccatctactcttttttctctctaccaaactatagttttttttcttgaataatgcttttacatttaaattagagcattgctattgttgagaattatgggtgttctatctcaaaaccaattggtgatgagtagagtagcccatgttcttatatatggctatttgtgctcgccaatcttgaatcaccttatcacaatgcaccatctagatctcatgcggctggctaaccatctggataggtgtagatcaaaagatcggatatggctctgatactatgttgagaatcatagggttcgatcaaaatcaattggtgatgagtagagtagtccatgttcttatatatggctcaatacttttacatttagtccatgtgggacaatgttctccaatagctattaggcaccaatagtgtctagcatctctagacatatcatatttgcgatttgctagcgatactccctaaaattactatattaaactatataggacttgatattaaattagactaaaagcgatattaacacataaaaaaatgttacacatcactagtaccctttaacacttctcttcacattattatcatagggagaaatcatcacacatcaccacattccattacttttcacatctgctcttacatttcaatgttcttatatattcaattattatgacaagatatatttgtcggtataatgaattaattgtgaagaaaattcaatcaccactcttttttgaatttaaattgagatttttatttattgcatatatcgtgaaagacattcaggaaggttaaaaaaaaaaaaaatagaaaatttgtatttaaaggtattgaaattgatacacaattctagaagtctctaaaattttatattcgtatacttaaataagaattatgaaaaaaaaaaaaaattagtatttttactccttaaatttttaatactacctgattttattttctaaaatatacacttattcaaattctttataaaatataacagttacattattatgccccttctattagattttattttcttttaccgttaaaaattaatatttgtacttcttgaactttgaccaatacaaagttttgcccccttttattaaaaaaataattttataattatatttttttttactttttttaagtaattataatattctattaattctgaaaaaaaaaataatacatattactaaaaaatctgataaaaaaattaaattaataaaaaaaatattaattttacttaaaaaaaacatatattattcctaaaaaaatattttcaaactttatcttatttataaacatatattataaaaaatcaaactaaaattattgagaatctaataaataatttaaagaaactaaaaaatttcgaagaaaaagtcaaacttatttatatttataaactcatatatgaacaaacaaagaaaataattagaaattcaataaaaatataaattattttgaaaaaaaaaagttataaattaaactaaaaaaaaattatgtttacttaaataaatctacattttttaagaaaaaaaaaaatatactcaaatttgttcctgtaaaatttaatttttataaaaattcaattttaatatatattttttaatatctaaatggattttttaataaaagataaatattttttttaaaatcacttcattagttttaaaattttaatttattgtttaattttcttaatcattatgatttttttttaatctaaaattttttttaagatttacttaaaaaaaatgttgaatctttctcatttttaattttgagggggtacaatttgatagttaaggtgtaaagttgttaatttacgaagacatgtcagcatttaaagggaataatgggacggaacctaatagaatgactaaatttctgtaaatgtaagagttcaagaaaattcttaacaagtcgtatatcttaagagtaaaatcaatattgtcgaaagttcacagaataaaattactaattattcaaaatatatatagagagatgactatgataatactagcatttctaaaaatttgtaaagcatataaactagattaatttagaaacaaaatatgtataataaattgctatagtcggttatgtatcaccaattaatttagagcaatcccaatagatgataatacatcattcttcaaatttttaaagaatatctacaaaaggatgctcctttagctcgtgtataatatgttatattatttatataatataatatttaaattaaataattaattatgataaattattaatttatcaaattgtaacatgtattatagagttacaaatgtgttgataatgatcataaaaaaggaattacaaattcttaagaaataatgataatacattgtgtaactctctcttctttacattatcacttttaaattagtaaaagatattagaaaaaatctcacattgctaatgtgtaaaaataaattatcatatataagataaatgtgctactcctatcattactaattagttttgagatcataaaatctcatgcacagcttaaccactttcattctaaattctaacatggtatcagagtcaatccgttgtgagctagcccaaagtgctgccgttccaaaaaatgagccaaccctaaaaactttcattgtgtcccctttaacctccatttgggacatttcagtcaatgtgtgccagatccagtgttggggtctttgacctatttcaaaatctacaaatttcacgacatgtacacccacaaattttgcgatttggccttgcaggattctttcaaatgtcacattttgaccttgtcgtctcttaaaggtcatcgttatacccacacttttcagacccaaacgtgaggatagtgtattagaaaaagtctcacattgctaatgtatgaaaataaattatcatgtatagtatgaatgtgctactcctctcattgccaattagttttgagatagaacccatgcaccttagccactttcattccaaattctaacaaaagatgctactaattgtttataaaagtaaatgaatgatagctattgaaaatatagtttgggaacttgatgtattcatttataaatggttgaaaatcttactagttactatttttcagcatactattgcatgcattttgaacgcttaggagcctttctaatagctcatattaagtaaatctccgtacaaactgtctcataagaaaataatttcaataagttacaaggaatataaaaagcaaggttcacacaagcctaaaagtttaataagagaatactgtgtcattggcaagaatcactactctcaacaaaaactttttacaacacagaacttaaataataacatttcaacactccaacaacttgtcacaactcaaaccaaaagcaactaacagtttataactattttacaaccaactctcttaacacaaaacaagttcataacagaaaaaacaacacaggggcaaggcctgtttaatttcaacatcaaacaagtatataaacccaggatagaccaagaatcaacctgtccattttgaagtgctttggtctagccttagagagagaaagagcaggtcattttgtagagtgataaaccagctgtaggaattttcttgattttcaaagaatgcccctacaccaactcaagagtagattaaaacgacagggacaaaattgtccttgaaaaatcaatacacggatttaactaaacgactaagaaccctgtcgtttatccctgcacgacaaatcgtttaagtcaaaatgatctgtcgttttccctggaacaaaaccaaggcaagtgagttaaccctagctcagaacttgccaaacgaaccttcgagagtttgaatcaaactctctctctctctccctggttcacaaaccctaaaaaccagatctacttctcgatctgaaccagatcgattttacccagccttccccagaaaattaccacaaacacatacacacacatgatcaaacataagtagtgaaagaaagataagaaaacaaacacaagagtttatagaggttcgccctaaatctaggggtacgtcctctttcgagctcgccttgaagaacgatctcagatctgcactatcaatggtgaatattacatcaggtgagaaatccaagtcataactcgactagtatttctgatatttctctcgtttctttctttaagtgtttttttttctttgattctcactaactctctctttttttctttgcatgtacacactgtaaaatatcctcgagaggctctctcactaaagctgggtcttcacacttctggtatctctccactgagagattggtaagcatctgctccccttttatagctttaggtttagtgtaaagtgtgtaacagaatttctattgcaaaacaaaaattcggttacactaggttgttaatgttgttgttgttgggttttat

SEQ ID NO: 15000 - DNA, 3399 bp, Cannabis sativa
ggtggaaatctttctctatctttttcacatctaggccccacctgatgtattcacattatgttaaataatacttaagaaataatattacacacattatgtttaatttttatatttatatcattctaacatagacttataatagtactccttaatctttgcacactacccgtcttaatttcactgaaaaaagattactacacttacattctcaattatgtatgggacattgctatttattatatatacatttaagacgatttattttcaaaaaatatatatatacatttagagaaatattagaggcaccagtagcaccatcttatgtgttaatatcggtattgttctaattaagtatcgaatcccatataatttaatgtaatagcttttaagaatcgctagccaatcgcaacacaacatgtcgcaaaagtatacatcactggtgtctaatagcaatgctcatacatttaagtgtagtagtaaaagttttttttattatatcattaattaattaaattaaatgtaaacttgttatgaaattgtaatgactatagttataatataactacctacatatatgtgtttgtaacagcttaaaatgtatgtccttacatatctctatattagtttagataataaaatatatatacatgaatattataatataaaactttttcgtttcaaaaaaaaaaaatatataaaacttttttttttaaagggatcaatataaatcttaaatatgccaccttatatagtgtaagacacttacaacttttctatttaaatattttaaagaatgtgacaaatatcgattgaacatttatatattaatgactactcaaactgaaactatgtataacatcattacttaattaagatatttttgtataggttacgacaaatggatatgatcattacatataagcatcaaaaccttataaaccgttcagtagtaagattactctaattttattaactaaataatgaaatgctgcaataccatttacacaaaaaatcatatgaaatttttgtgtaattttttgtgtgcatcaaacactttttttatactatcaagagcttgcattaatattccacatctaaaaataaaacatgctgttagagagtaccagcaagttagaagataaataatgccttttaaaatccaaacacaaacatgtgggactagaggaatcaaacagggcaaggagcaagggtacctttcataattaaattaatagaatatactagcttagattaagaatttaaatacccacaacatcattaacgattttcatttgttaactcatatttgaataataactaattacatgatgtataaaagatatatagctgtggttacgtacccaaaatgcagcagtgaaaccagccacaccagcagagaggtgaacaacaaagccaccagcgtaatcaataaccccaagcttggctagccacccatcagggcaccatatactaaaagcaacaacagtataagaaaacgtaacccaaagaggcacaaacaacatccatgcaacaaaattcatcctcccaagcagggcaccagcaaccaaaatcaacgttaaccctgcaaacatcccatggtaaaacaccatcgtggccgttggaaacaaccctagaaacgcctgccctagtagaaacttctcgtccaaggcaacagctggcttccctaagaaaacaaccagcttttctccaaacgacatgcggaaaccccacccgacccagcacactaaaacagcggcaaatgcataaaaggccatgaaagccgagtttacagcccatttcttcttcaccatgcttccatagagaatgacaaggcccggaatgctttggaggccgacgagcgtggcagctgtcagctgccaggcattgtcggccttgttcatccactcagggcttgcctcatctggaatgagatttgctggaatctccattaccatatgttgtaaagtaataattcaaaatatataattttgagttgtcgaattaatttattatttacttaaagattaattaacagacaatgatcttgtaatatctgtacaatttaatttattttttgaaaaaaaagctgagtgatagtatttataaggacgtgagtatatgtaattaatacgagagtttgttgtaatatagattttctttttcatggtctgttttgagttattaatgagaaattggaatgtttgggccggccgggctttggcttcaacttttgaactcttttatttgactgcttatattgtataatataatagtaaagcaatatttgaggaactccactcggcgcttcaatatagtgctcgacaaacgaataatcaaattcgtactaaggtatttactgtgttgcaatcatctctttagtttgtatattatatatatagacattttattaaattcataataaatgtaactcatcagaaattaattaatgtgaggtttgattaataaaaatataagaatagtaatatgaatgagaataagaataagaatagaatgaaatataatttaaattaatgtataaaaaatttattaaatttttttaaaattttaattggaatgattttttattttttttttttattttaaggaatagttatttcaccaaaataatgaaaaaaatcatttcattaaaatgatattctaatattttaaaatgtaactaaacaaaatagaatgaaaattatttcatttccattttattttattacctatctaactaaatgtgatttttaatagttattcggtgtagagtattgttgtattgttgtattgttgttttttattgttttatttactttttcttataaatgactcaaatagtgtgttcttttttttctaaacaactttcatcttttttcatatatcaaaaataaattaaaagtgacaaactttgtcctttatgttctttaataatttgacgagattcttcgccgtacattgatattgtttgtcatctgcattatatagttatgctctttattatattggctatattgaaaaactaattaagagtagtatatgtattggaattcttacaatgattgtagcggaatattatgattcattttgctcggatttttaactcttgtttctttctgttacagagtattatcaagatctgagcctgaatctctttctctccttcgggttggttaccaccgtcttacccactgtgattgagtacttgacttgctatgtgtgggaatgacactctatcactaaaggctcgaataggtgaagaaaaatgaaggaggatcatactccttttatagtgtttcaactagggtttaggtttggttgaagatcagttggatgagatgagagcatcatattccttttatagtgttacaactagggcttagggttgaattatatggatta

SEQ ID NO: 15001 - DNA, 6740 bp, Cannabis sativa
gggttggggcaaactcggaatttgtgcctaaataccaacgtttacattggaaaccaaaaacggtaaaaatcaacctacacgcaagcagtgtcaccggctgtaaccggttacctaaccccattggcccattttttaaatcttcataaacccgttagttctttcgtcgttttgtgtcccctgttttttcttctcttcaatataaactccacactcactctcctctgttctctgcttcaaaactcaccactaagcttctcttttacccttttacccctatttctcctacaccattggatatcaaaaggttatttaggaaatctcagtactaagttcaagaaccagagaagttaggccgaagtgtttgtcgattgagagaacttttaagtttcgagaaatttagagatttttcatggcaatgtctgtggcaactaagcttcagtcgcccatttgtgagcctcgagcgattttgggacccggcggtaacagagttagggtttctgaggacccgaaacgcaaaggagaggccttgagaaaaccacagaaaacgacgacaacgacagtgaccagaaagccggtcacggaagtgccgcaaacggttgtacggaacaatgcttcggtggacagttcgtgctcttcggattcttcgtcgagtggatctttggtcaaaacagtgagttccaagaagaccctgaggcgtaaagggatgaggccggcgaaaattgtaccggacagcgttgaagtcgccgggactacgtcaccgaagattttaggtccgcctaagcggtgtgactggatcacacctaattctggtaagtcagttttacttaattgtttagttattttatagaagagattttttttttcttaatcttgtttttgttttccaattattctatattagtcttaaatgtaagctaataataaaaattggtggaaaatgatgttagctgattattcaaattatggagtataattaaaaatagtaaaattccgaactgtcccattaatgtggatatacagggattttccattgtcggtgagttagactaatgctgcaacagaactgtttaatgtgttttattagaaaagctaagcatttgtcagtgggaatatttcctcaaactaacacaattaacttcatcaaaatttgggtttaaatttgatgaactccccattcttgacaataaactctttctctttgcctagatgtcagtctgttccacctttaaaaggttgagtctttgaaatttagataccctgcttcccactttttcaaatctttgataagattcgagttttataagtttttttaagttagaaaaaatgtaacttgttgaatagataattgtaatgagatattcgtggctcatgtcttatgtttgtccaaaaatggcacgtttgaccttgtcggggtggttcaattataatttataatgcttacacgatcgatcttttttttccttttctttttgtaatgaatcacagacccaatttatactttattccacgatgaagaatggggagctccagtccacgaggataacaagttgtttgaattgcttgtcttttcacaagctttagcagaactcacttggccagcaattttaaaaaagagagacttgttcaggtatctatttactcatttgttttggtaaagatacaaaattaaacatagtttttctcttttcaaacattttttcatttatggcaggaaactgtttgaagatttcgatccatcatcagtagcacagtttagtgagaagaagttgttgtctttaaaagttaacggctacttagtcttatctgaaccgaagcttcgcgccgtcgtggagaatgctaagcaagtgctcaaggtaaaagccgtaatgaccaaaaggaaagaaagaaaatgcaaaccttcaataacactcgaacaaaggaattcattggattttacatgaaacatagattatcttttccaaaatccacaacacattaaaagaaagttattgaaaaagtatgagcttaagctgcggtgatgaatcaagatacatgtgattgtatattaacatgtcaactagtgattgatacacataattgttgttgttcataattataaggcttccttactgatctatgttatgtaatggaagctgctgaaaaaggaaagtttcctctcttcgaggacatttgaattatttctcgaaataaatgtttgcatgtgattcattctggtatgcaggttcagaaggagttgggttcattcagcagttattgctggggcttcgtgaaccacaagccaataaggaatggatttcgctatgctcgtcaagtaccagtcaagtcacctaaagcagatctcataagcaaggacatgatgcagagagggttccgttgtgtggggccaacagtgatttactcattcatgcaagtagctgggatagttaacgatcacctcttaaattgtttcagacacgaggaatgcaacttaaacgtgaaaaaggatttgaaacctaaaactgaggaggagccacagagaccaagtgatcaagttctggagaagaagacatgtttatctgatgactgaatctcgactgagtattactttagtttcttactactaatcacacatttcccacacgactacaaaacgatgaaaagagacgttagatttgtgcagctgtagctttagttgtgtattatttacttttccatattttattaatttgaaaacaaatatccataattgtgtttgagtacagcttgtagaggtttgtttaagcagtactgttaaactttgctaattgttatgttcctcatttggtgttgtataataaaattttagtgtcatgaatttttcttaattttactggtcagcatgattgtctcgagtgtctttagatgatgggttaatacttatatgtgggaatgttggtgcttttgctatatataaatataaaacatacaagtactactgtcgaaccaacagttctacctgaccccatatgacaacaaagttggctaggtcgggtggctctgcccataataagctcctgtcatttaaaactaaatatattttttcttcacctcttaattaagtgtcaaaacgcgtaaatgcacgaagaagaacatggggtatgtcggcccttgtcattataataacagccaccgtttatgggtctgggggcaaaattcacagtccaaccagacaacaacgaagaaaggaattggcaagataatccaaagagtgattttttttataaatatatatttgatattgtgaagtcttctgagtctactgatattaatgacaaaaattaaatataataataataataataaaaagggggaatggcgacaagaaaaggtgcacaatatctacaatgtaatgtagtactttgtaaaacaattcaaactgagttttaaggaatgaaccaacttaaaaggatgataaataaaaaaatgaacaagaattctccatggaaatcaattactaaaagaacccaataaggttcaagatttgtagatttctgctgaatgggattgatttaaatagagaactagaatgctcttaaagtctttcaacaataagctgaaactagaatgaaatcagcaaaaccagtccttttctctatattctttgtataacacactttgcaaccagattagactttctttaacttcgagctttcccgctacccagtgtgagttccaaatcatccatttccattccaacttcatgaatcttctctccaacccaaggcattacctgtccacctccgaaatcaaattctcctcctctcacagcatcgggaccaacattgatgtgagaaatattctgagcagcaggtttcacaagattaaaggtaggagaagttggcatcgtagaagcagaaggagcaaacttatggaagctcacccattggccagaatcaacagtagacgtatccgactcgtcacattcaggtattgttggccctgggatgtgaatttggtggcgtgttgggctagctggggctgaaacagcataaaaagggtaattgaaagaggccatggattgcttggcaatggcttcccaattagggattggctttggattttttgaggttggagaagacagaggtggggttacaggggcactgtttgaaattcgaaggggaggaagagatgaaggaatggcattccgtagataaggaatcagattagagggattgtagccaccagcatccagacgagaagggctcggaaacgaagaagatgaaggactcacttggtatgaagggattggacttggaaaggaagaagacattgggctcggattttgggaagcgtaaggggtgattcttgtggaagtacctgccacatccattgggaccggcttgcatccctatgatcaatcaaaagattatatatcagtactcaaattagacaaaatttctaagctcaattttcggaaaagaaaaagctgacaataatagaaaaataatactttgaccatttcatgtttttttctttgagactttggacgtgttaagtagtctacccagaaaccaagaacagatcttaacacactaacttctcatattctcactatgtttcttaagattcagctgttgagaggttagaccaaacagtaaattttaacattcaacaaagtaatatcccaatataagtagtcaactttagaacagtaataacaggatccaactataccatacccacccatttccaaagataaatcaagaactaaacaatgaaactaaaatcaaaacaaaatgtataacagatctaccctaacttaaaaaatctaaaaaagaaaaataccccaataaagctcacagtattaagctaagaaaaaaagtacctttcgataagtagtaccatcttcttcgacggtccaaccagcttcgatgcaaagagctttaagaacctcgttattatcacagtgcttaggtagattatagtttccctgagctctgagaccagagtatatcttcgcagctatggctcttcgcctcctctctctcctccggttgttttctctctccctccacgacggctttctgcgcgtcgccgtagacgctgacgtggcaccatccgacgtcatttcagctccggttaatccctccacggtcttactctctattgaaagcaggtgattttaataacccaaataggagagagggagagagagagagagagagagagagaaagaatagagggaaatgagttttaggctctcacgaggtatgcgtttgcttcttcgctgtatctgtagaagaagaagaatctctctctctagggggttgtgttgtgtgtgtgtgtgtgagagagagaaaagataaagcttactaaaaatttcagaaataaataaaatacgggagggtgcatggaaacagtaagtggagtactactagtcgatgatttaggaccgttgattataattataagaggaagttgattggtcaaagaatgttaggggtacacgataataacgaggtaacgtagaatagaataggaagctttccgccgcgtggagggtttggcttggcttttcttgtgtctaaaaaattaaaaaaccgtttcttttttttttcttttcttttcttttctgatgagctaataattgtagggaaggtgggacccacattggttagcttttcttatatatggtatgctgtgaagcccacagtggttggagtatatagaattataggccctcttcaaaacccaaactacttgtttcttcttctatccagttcatgttgtcctataaattaacaactgttaatgtcttcgtacaatgaatgtatgctctcaactccttactattcagtcgagagtaccctccaaaaagaaagaattgtatatgatttttcatactttatatatatgtaataccacttcagtataaactcaaaatgtacatatctactttccttaaaagaaaatgaaaaataaaataaaataaaatgtacatacccacaaaaagtcattagtcataagaagtggaaattttatagatttaaactgtttctttttttcttttttctttttctacaaatttaagaatattataaatgttattatctcaaactatatttacattctaacattagagtttttccaaatattttatatcttttgttagggtttctcgttccttaatccttatatgccaaaagttgctttttttctcgagtcaagcccgctgagcctccctaggcattacttggttggggtttctagtttcacttctgcgattgtcgatcgggttttgctactacgattagatttttgttactgtgattagtcttatctctgtgacatgattttttttttcattgttagttcgtattatttgttcttcgatggctcatcatcaaatcgttgttggcggttgaaaataacaagttttcagcagctgaaggggctgttagtggtgcaattacataccttgcacaaaagttgagttgaatgaatctcctacaacagttttcactgttgtgtcttttgagtcgtagaagcaactgaatatagatgtttttaaaattaattgcgatgctgctctctttttagtcagatttaattttattttattttgtcaaacgatccaagaataaggcggccgattgatttacttatttttctaattctaatcatactcgtctttccgacaggagaagatgtcccgaatgagttgcaagctattattttagctaattcatattaataaaattgtattatttctttaaaaaaaa

SEQ ID NO: 15002 - DNA, 4810 bp, Cannabis sativa
atctttggaataagagtgatgagagttatgttaaaatgggtaatgtcaactcaatgatttaggaaaataagcactgcatcagtgacataattaccaacaacattccaattcttttgataaaattggtttgttgaaaccgtcaattccaggggctttgtcagggttcatttggaacagaacttgtttcacttcatctggggaaaaggattgttctaagaacttgtactggtcaggattgaggtgggtagtaatacaatggattgctgcttcattagcattgtcgtgacggttttaagatgtagagagatcagtgtagtacctctcaatttccttgagaatgtcatcaacattatccacttttgaaccatcatcaaggagaggatggttaattctataagtggttttcctatatgaagaaaacctattgaagaagcgggttttttttgttcctagcatgacgccaattaattctagaatgttgattccaataagattcttccttagaaagaagactacctaaatgtgtctgcaacttttaaatctttagttaggaagcctctgagttttcaagagagttcttagcattttcgaggctcttttgggcattgggaattttctttaagaacccaaataaagatttatgcttctagtttggcaggtggtcagcacaagcttcctagatggaagcaaggttttggatgggaaaactatagctaaaactaggagaccaagccttaaggataacctcatccaagtttggttcaatcaacaagacattcttgaaggggaatagcctatcctcttgagccttgctaaggtgtgggggaggattatcaaacttcaaattaatagctctatggtcagagccaaagaaatcgagatgatttaggaaggctttaggataagaatccaacaaaggtttgttggcgaatagccaatctaatctttcctgcacattcctatgaccaggacggttattgttataggtcatcctaggcccttgaaaatcaagagcttcaacatggaatttgtcgataaagttcctaaaggaatctgatgctccatttctattattacctttgcttttatcatctgaagtcaaaaaactattgaaatcacctataaagagcttgggaaaagaaatacaagattaaccaattctattaagaaatttccaagtatcgtgataatttgtgggacaaggagccccataaaaactagtaaaattaaagctagaaaaattgacaccggtaacataacaatgaacatgattaacaaagaaattaataagtacatacacattcgaagtccacaacaataggagccccctcctaaactatcacgaggggccttaaaaccatgggcaaaatccaacttcactctaaggctatcaacaacacccttacataatctagactccataagaaaaagaaaagatggcttatacatcttaactaacgaggagaggtttaggaatgctcaatcactcccaaggactcgagcattccaacttaagatgctcatttttataggcagaccagctcctccacaagaccagcctcttccctggaagccacttccactatgttctgctgtggtaggggccttgatctcttcagcttctctctttgctcattaccaacagtagcaactgtctcttgaagccagtaatggtagtctacgttcctcattttgtctgggatcatttagttgggccttcagagcttccaacaacaaaagttggggggtttgaagctcctactatggtgaagttattggttggtaagggggcagggctgggatcggagatcaacagggcagttagtgggctagcagtgggggaagaataacttcttgagctaggggtggagttttgtctaggggacgcggagcacgatatgtatccccttgaattcacagtcatcaaggcagtgaaggaggggtttggtctaatatggggtagctggtatgtggtgggatggtaacagtgggatgatagagatgctagcattattgtttggaggggtctaggtggaaatgtagagaccagcagtgccagagtgatcctcatcatgaagtttgaagaagaaatcttgttggtttattgatcccccaagggtagaggagcttgcaaggttcataaggttttggtttggaaattgtatgagttgggaaggagggtcaaggtgtcaagaaaacattgttgattgtagtagggaaaaattccaaaggggccatggttgggtcgggcaatggcacactaaacatgttcataaggcaggggtggggagtgtggggactcatcaaaagcccacatgtactcagtgcatccattataagtatgggcccatgcaacaacagaaatagcaatgaccaggtaggtcttcatacttatgttcaagccaagtaggcgatgccactctcgggaagacgattggtacacctctcgggaggggcttggtaatgtcaaacataatacaaactctcaaataagagcaccatgtttcaagaagagagggttggtggatatccaggagaattctaacaatgtgaccaacaagtatggctaaggaaatggatcggcgtgaaaaagttatgttatgaatttgaacccaaaaggggattttacgcattgattatgggggaagggtagagtcaaggctagggatttcgagaagaatagggcttttattgaagatccaaggttgattaattatggcctttctcatattgccttcataatggaaagcaaccagatacaaattgaagttaggggacctttctttgacactgatagagaattcgccattccaatacttctctaagaaattcttcaaggagttatggttaaaacttttcgtggtgtataaggttcccattagatagaatagaggtggagctggtggaagccattcatgagtatcggtatgatcaacgagcaggtgcactatattttctgtatctgtgaggtgcaaagctgtagaaaaagaacggactaagtcttccatatatggtaatataatagctaagaggcaagataggtaatcatgaacaaatatggtaaagaaaaatttctgctacatagaacatagatagtcagacacgagtaaaatggcaatcgaaggggtgcaaggagtattacttatcctaggtacaataaagtaccatagacggtagggataatagccataaatggtcggttcaggcaggagattatccagatctatccacaattcaggttggtagacacatcaataaaagcgaaaccctaaattaagatatgaaaggacagtcaaaattaaatatgagagaaaataatgattagatttactctaaaaatagatcaaacttgagagatgttcattagtaccaatccacgcttgctctaaaatcttttgtgctcgacattgagctagttgatctcatcaccttgggtggaggcagttgggtgtcaattaccataaatgtggcaccaccatgacaatgcaaagggttgaaaatatgcctaagaagatggaaaagttgctaagggtcatgatgatggtctccactgtttgaagaggaagaggaagagatttgtgtagaaagtatgctcgctggagaagataaaagatgtctcgaaggttcaacttcaatatcaaaattctatcttaaagaactttgtaagttttatttatatatacatatataaaaagcttacaatctaatgtatataccgatatgtaatatatgatatgtatacatatactatgtcagtgtataaaattaggtcatatattatatattgcgttgtaaatatataattcaaatagaaatctaagtttgaactataaaataaatatcctagatactatatatcttaaattttaattgatcaacttaaatttaaatttgagatagcatccgataaaaagatgaattattattccccaaattttagaataaataatttaaatatttgtcaaataatctctttatttttaaataataataaaaggatttcaagattcaaatttatcataaaaagtgataaaatcctaaacccatacaaaatggtaccaaattctaaatgagctcaacaaaattaatgttgaaacatcattccgaaattccaaagaggtcattaacctcacaaaaatttgtaatattacctcaaaatttaaaagtgcattgacattaaaaagccataataaatcgtgtttcgaggccataaaaaatggtattccaaaaagaggtcattcacctcttaattaacaaagcatcacaaagattgcaatcgccaatacaacaaaattgtataaaataaaaaaatctcaaaatttcataaaaggtcatccacttaagaatttttttaaattttcaaatagcaaaaaattcctgaaagtggtcatctaccgaaattcttatatttaaattctaaaatatctcattccgaactacaaggggcttgattcttcacaagaaggtatgtaggcagctcggttaattaaaactactgagttcagttgtaattttaaattcaccttaactttccctaaattatttcaattatttaatatcatcgtagttaaaatcaaaaggtgtttcctttaaattaaaaaaaaaaagtaaataagagattattcttataatcttggatgagtcaaacttaaattagtaaactcttatgctatgaatttagcataaataaaattatatttttgcatttatttatatattctagatgtgacatttttacttaacatccaaattttatggattcccacatggggcaagatgcaaaatggccctaaatctaacaattaagtta

SEQ ID NO: 15003 - DNA, 6420 bp, Cannabis sativa
agttacttttactagcgcagtaacgaattgtgctggtaaaagtgacatttcttgtagtgtatacggtagtgattttttaaaattgtaaaagaaataaatgtgacatttaaaaataaatataaagttatttataaattagtgaagtgatttagttaatgacataagtgtaataatataataatattaggactaaatactaaaaaaaaattatttaataattaacacttagtcataaaaataaagagagagagtgtacgtagaagagtcttagcacaacttattcaattatttttttaaataagacaaaaaaaaatttaattaaatctttaaatatattgtatggtattacaatataattgtccaatcaaagcaaactattaaatgtcctataaataaggtattttttaaattctacactttagaaaaatcttatatttatatataaatcacatgtaaaaaatataataagtgatagaaaacacaatgaaaaatacaaagtatagtaaattaagtattgatagaagaaagaaaaaaaaaggatacacccattaagtcggtgattataataattgtgtaagtggtttaaacatagagaggtaggtgtctataacagtataagcatgacgaaatctcagtagtgcttattatttcttagcgattatatatattaatgttaaaaataaatttaataatatatatatatatatatggaatctacataaggcaaagactatatattgtatgggaaaagaggcacaaattgaatagcatgagagtattatatgcgtatggattataatgatgctctaattggggaaaaatccagcaaatctcatttagtgataagttactattgtattattcaaaactagcatgtagagcttatattaatacaaaaatattgcattaatatttattgtatgggtatcaactcaagtgtaatatgagaagaataagtaagagttggtttgaatattctttaaaagaaaaaaaagttatttttaaatataagtgtttcacctactacattagtatgagacattttgataaggtgtccaaaaataatgtgagagtttaaatccaaagcgacaatattatactaatgtggaacaatattttcatctcaacgtaattatatcttcattctcataatacaaagcattgatgtctaatactttttagacgtgttgttttgtgataggttagtgatactctttaagagttattacattaaattatatgaaacttgatacatatttaaactaataggatattgactcgtaagagggttgcaaataccatttgtgcctttagcatttctccataatataccattaaataaagggtaattttcaattatatataagtaaattaattatattacaaaaaatatgtacaaaaaaaaatataattacacaattctatacaattttataaatatttacaaataatcatcatattcacattatataatagaaataaacataaatattcaattaataatgcattaagctaaatataaaaatacataagttactatttatattttgatatattactaatataatactaaaatttaatacaaaattaaatttatatatacaaacatttaaaaaatttgtttatattttaaaaacaacatatatatattcattaaatatttgactattattaatgtttataatgttattattaatttatgtttattatgataataatttgatagaatcaatataatttgtttattaaaaattcaaaaataaatttaaaagtaaaatacttatatatttatgtttagttagaaactttataagttattcagaaataataaagctataatcaaatgtgatattatgtgtaaacattatatttatattttatattgataatgtttataaattattaatttaatatatttaatgtatagtattataaagaaaatatgtttatctattgattatttatatatgacgaaaaagttattacatagattgtatataaattaaaattatattatgtatctaatataaaatgtataatttaatataaataagttattttatatgatatagtataataaaattatataatgtatataaaattataaatttgtattaaataaagcgaaattacctcatatactattttttaattttttttctttaaatttacggtttaggtttttttagtgatttatccggtagtttctatgtaggttgctatacgaattttagttgcgatttaagttgttccgttagttattataggaataattatgttaaatttgtaaaaataaaaataaaaataaaaactattaagtataaaaataaaaaaaaataaaaaaaaattcttaaataaatactaaagtgatgtacttctttccctcttatacaacaaattgtggactgtatatccatctcatggtcaaaaacagtactttagtataaattaaaagtaagaaaaattgcttcttttcttaatttttttttaaactttttttctttttcaagaatatataagaataactccagtttagccgtccacatttagttgtccaccatctatgtccaatactttatgaatagtcaaatcattaacagattttggctttgaaaattataccttattgaactagcaaatcaatcaaatctcatttaatttacatttctatggacttctccaatctaactaaaatcaaattcatttgcctttgtgctgcattatgctttgttataaataggcaaatggatgagacaattaccaaacattgtgtccatatatattagcaaaataatgaaattccataaataaccttgtggcattatagatgtagtgaaaacatataattcaagaaagttgtaacaccgaacctaacacgtgaaaataataaatgtgtgtgagataagtaatagtctataatacttattaattatagtcccatatttataaatgtgtgtcagagtattgttattcggtaccagtagtgtcaagcaccttctcgacatgttgcgttgcgattggcaagtgatactctctagaagttattacattaaattatatagaattcgatacttagttagaccaatagcaatattgacacatagaaaaatactaaacactactgataccttttaacatttctctattaattactataacatttgacacaatttaattctaacttaattacctcaccacaccaccatacgcatgtgcttgtgtcccatatgatgatataagtatttatctataatatatatgagagctaatacaatacatattataatttttacgaattaataggtttataattattaatttaatcaaatgactcagaagtaatttttaaaaatttaaatatacttaataatttttttaatttataattaattttaaatattattaattagctctaattaacaaaactccagacctaactctaaacttataattttttttttacttatttacctatagactatttataactttcaattaattacttttttaatttgaaatatatatatatatatatttattttttacttaatgcaataatttttgttagaaaaatacaaaatattcaaattatttcatcctacaatcaaataatataattatgttgtaacttgtaaaattatcttataccaagtacagtgacatgagttcaatcctttcaaaagacatgtttttttttttttttttaatttaagctttaaaattaattttataatttgaatttctttatttttttatctaaacaatgatttaaatttctttaatatttactaatatggaacaattcttatactataaaagttgtaaaatttgtaattattgtagtgatttttatttgttaatgtatattgatggttgtattacataaagtataatagtgaacaataaaataacacatgcaataataataatatctaaaaaattgaataataaattttttcaaataaaaatatacattataaattgatgaaaatttttcaaataaaaaaatatttgaacgatctcgatttactttcgatctcattcaaatttgatagtctacgataactttgaataattatgaggtgtttcaaacgcattataaaagatcgaattactactcttgtaaagatataatttattattaatttaacctttaaattaatttaataatttaaaattcttgtttaaacaataatgtatggaacaattatactataaaaaattttaagttttcattatcattgggggaagtcttatattgatttttattattaatatatatattgacggttgtattgcataaattataacagtaaacagtaaaataacatatgcattaataaataacatttaaatgaaaagctatgactctttgtcaaagaaaagcatgtataataaatagataataaaatttgcactaaaaaaaattgaatgatctcgatgactgttgatctcattcaaattggatagtatatgatatctatggataactatgagatattttagacgtactgaatgatcgaattgctactcttatattttaaaatcaacaattgcacaatataattattattccaaattttagcctatatgatgtgcaatcaaaattgtaatgtgcagcaagacatgttatcataagattgtatcacgtcggcacattaagattgtacagtgaggtatttcccttaaggatgagttgtcatctggtcgataaggagacaacaacctaatagagaagtttgttggatgtttatattgaaggatcgatatatgcttgaccagtataaatatattgacaaagtaaactaatggttcagcgggacagttgtttttttggttcccacaacccagacaatgacatgctcaatccagatccactattagttcaagatcccacaagattcagtttttataatgttcttttcaattttgagattgatttaattaattaaactattttaaatttttatgataatatattaattgaacttgttattatgggaaaaatcttatacaattttttttataaaatttgttaatacaaataattttctcaagatactttattctgaacagtgttgtcagcgcctgagtatacattaagtaatacttctcacgtccttccataagtgttgggcaaagaaaaagtaagacaccatcacagtattacaattctgacatgaatcatgttgggaatgcgacctttagtcttttagcgtacccatatgagttaatgagttgtaagctctgtaataatttattatctaccattttcaagtattgtcattctgttgtgtattctgtatttcttgagatgaaccttctaagttgatttgttcatctcaccaatcttatcaatcgacagtacttattatttatagctcgcccttaacttaaaagagtgaatttgaatatttctaccacatgtattttctgagacaagtttattgaatgtaaaaatttctttaaaatacgagctgatttctttacatgtatcaataccatattgttgctcgaaatatgagtataatagagatataaaataacaataatttattctattttattgttagttatgtgaaaaagaataaatttttttaagtaatttagtattaaaagtaattaatccaaaataactaattcaatatgcacttttacggatttgattggatttgagttattatggagattggattgaatccaaaaatataaaaaataaaattaattaatatatatgatagaattttaaaattattgaattaattgaaatcttaaattagatataagtaaagaaaagaaaaaaaaaatattacttcaaaagtattgaactcatgacaagagtgattattataaaattattatgagctaaatatgttataatttttttataagtttaattactgttttaaaaataaaattaattaaaatatttttttacgtgaaactaaaattaagaaaaatgaataattagaactaaattttaaatagacataaaataaaaagtaaaaaaaaaaaatagatttggagttaggtttggattttgttagttgaacctataattaataatattcaagattaattgtaaattaaaaaaaatatatattaaatatggtgtagtttttaaggttaatttaagtcattagattaaattaatagttatgaaatactatccctattgataggtaaaatactcaattcctactgaaatagcccctaatatatatagtagataaaagatgtcgatataatatatactaaattttttgtacccagatgcaatgttcatatacaaacactactacaaaattaagctttagaggcggtttttaaggtcattcagcgtcaattttggtataattcgctatcgatgttgttccaggtgacgctatgtaacgccctaatgctaaggcacgctacagt

SEQ ID NO: 15004 - DNA, 3054 bp, Cannabis sativa
tcttttcattcaatctcatttccgcattaattatattattgacgtgcgtttgcataagcaatttttgtccttaaaaagtataattagtagtcttgctgagaaaatggttgagacaaaaaagaatttggtgatctacacactagtttattatcgacttataactttggctttgatattgcccgttactactgctactgtggaaagagtattctcttcaatggattttgtgaagaatgaaatgtgaaatcgaatgggagaccacacaataaatgaatgataacttactactctatgttgaaaaagatatatttagtagtattagtaatgatattatcatgccacattttcaaaatatgaaaatacgtcaaggacaattgtaaattttttttaatgaagacacttgtatattttttttcttctaatattttgtattactttagccccctgtcacaaaattttagcttcatcactgatgtttagtagagagtaacgatatatgcatttttatctatagagcataagtgtataaacttgcaaattgcagtcataagcctcggtagaaaaatgttaatttgtgaacatttgtctataattgcgacagttaatgaattaataaagttaaatttttcattattataatgacaatgagactatttaacctccatttttaactatattagaaattattacttttttttttgtagggattttaattaaattatttagaaagaaacaatataaaattcgttttagtttttaataggaatttataatttcaatttcattaaataaaacctgtagcctaaattaatgtcccacaaagcattagcccaaaacagagtctcaactcacaagccaagattctaggcacaagactcgcttgaggacaaaaatataacagagaaaattcgccctccaaaattaggaccattttcattattttattttacctaatatattacatattaaaacaaattttaatatgtatgtaatctcacttgtctattgttaaccacattttataacatagaacatcactacttaaaccctaatcagtattcagtaatcacactctcactcatatattaatacactcattattacttgcttttcttatttaaagacattattacttataagacatgtaaatgatatatattcatcctatttatacacccaacaagatcacatcctcttctcctcaaatctctctttccctctaaatccacaatgtataactgtaatggatcaacaagaccaaaactcttgtatatcaccattcccatttcagctatcttactcttaaccctcatattttccccaaaaacaaataaacttaacccacataatctccatttccacaaacactaccaaatagctcactcagcatgccaaggatctctctacccaaaactgtgcgtttcgaccgtagcttccttcccagatctcatctcaaaatcactccctcagataatttcactcacagtaaaccacaccatgagcgaggtccgagcctcttccgccaactgcaccttcatcgaaaggaggttcatgagaggaaccaccacgattcagaaacgagccctcgacgactgtgtcgagctattagacgacaccgtttcggagctcgaagcagcactgtctgaccttacctcgaaaaaatcagcctcgagtcactacaatgacctgcaaaccttactgagcggtgcattgacgaaccaaggcacgtgtctcgatgggcttaacattaccaaacagccaaacagcgttcttaagaactatgttcagaacaggattgtcactatctcaaaccatgtgagtaacattttggctatgctgaaaaagattcccgcgggaaaacatggtcattttactacgacgtcgtctgatcaggaggatgagatttttccggaatatggtcacgtgataaatgggttccccacgtgggtttcttcgcaggatcagacactgttagtggctccagttaacgagagtaaaattgacctcatcgttgctaaagacggcaccggaaatttcactactgttgccgaggcggtggcggtggcacccaattccagcgacaccaggtgaaagctttatatatgttttcgctattattaataacttcaattgaaacacgtacgtcggttaggtgtagcgtaggtcccatatgtataatattataatttatactttttgtttccaaaatatacattatacaacaattttacaatgcatcatgaatttttatatgtttggtatttcaaataactttttaatgatgaagtaccttaaaattataaataagattcaaacacattgttttatatgtttttgaaatagactttgtgaacatttttttatattgtaaataattttaaggtacacaaacttataaaaaaaattaaattaaaaaaaaatctaactagccgacacaaatataaagaatacatccgtctattaaatatattgttaaagcagtttataatatataattaactaaatataaaaaactagaattaactctatacagaaaagtgcttttactgtcctgttcatttataaattaacattttatttgtatgtatgtatgtatgtataggtttgtgatatacataaaagcaggggcgtatttagagaatgtagaagtggtgaagaagaagacgaatttgatgtttttgggagacggaatagggaagacagtgattaaaggcagtagaaatcatgtcgatggctggactactttccgatcggccaccgtaggtcagtaatctctaaccaagtccaacctcatcctctaataaattttattataaatttacgagtatttaaaagaaaaaaaaaattaaatagattaatatatatatatatatatatatatatatattttgaagatttttccctccttatttaagtatttattaaattggatggatatctcttacatggatctgagtgaaaaggcccaacattattatcctgtgacttgacatgtcattcatgagagatgagtgagggagtactgtgctcgtctttttattagaatttagaact

SEQ ID NO: 15005 - DNA, 4018 bp, Cannabis sativa
taaatacaatacaatacaatacgatctactacgacgttccaaacaagccctaagagcattgttattggatattaatattgtctaatactttctataagtgttactttataattagttaatttatttttttaagttatatagaacatggtatatttaattacaccaataacagtatgatattaaggagagtattaaacactaaaaatattctttaacaatttccataaattaattaagcttaccaagttaagtaatatgttagtataatgctaaaaaataaatatggttttgtccgaattaggtttcactagtactagtagtgatcacaaaaacaatgtaaaatataataaagtaacgcttttagaatcaaatcttaaagcacaataattaatactaatcaaatcaaaaggaagaattaatataattataatatgcattcaactctttaattagcaaagcaagtaggtataccttattattagttttcttgcggctagctgctgctataggtaatcatgtattcaactaatattaataagtatatatataaacaaaaacttactaataaacttattaaatagaagagaaaagagtatctatagagaaatgttttcacttgaatataatagggcagtatacttgaagctattttttagccaccacattttatattatatacatttctaagtggagagatcagtacaagaataataatccctatctcttggcagtgcattgcgtggtagggtataatgcctaactttattgattaattaattttataaattattatataacatattatatttcagtaacttatatttaacctaattaagaaaaatggaataaaagcagtaccctaattattttaaaaaatttattagctgactgtcattaagggtgatcctcatcatttcacattattttaatacttcagagttagcaacttatacaaaaatttaactaataatctgatttacctattaattaataaaaattctattttacttaaaaaaacttaattaaaaaaaaaaacgatttgtcaaaaaacaaattagtttaagaaaaattacttcatatactattttttaacattttttttttttcaaatttacggttagaattttttcggtagtttttacgtgtgttgctatatagattttaattagaatttaagttgctccattaattattagagattttttttttttagaattccgtaaacattaaaaaaaaaaaatctcatttaaaatgtaaaagtgaaaaagtcaccgttggcaatgtggcaatattcaaacacacagattaataaataaacataataatcacacttgatgagcaccatcaaaggtcaatattttgtactgagattgtcataatacatctaataagacaaatggacaaaaaaaaaaagtatttaaacatatatatatatattacgcagcggcgccgtaatagtttattttctaattaattatatttgtttaaattattaatattcggattgtaatattttaattagtgcaatacttagcttggcttctactatttccatctactatatactagtgattcatcatctatagtataaatatgattcttctcaagaaaaataggacctgatcatgtaaaaacataataattattgcatatattggaccccctaaaatccgttcaaattgaaaagacatgctatataattcttataattaattataaatttttatacatatataaataattaaaaaaaatgagcggttatggtgctaacagggaataatgttgtggtttggttataaatactcagctaaatacgagtatcaaacaccatcaaattataaattcttacttacttttcttagtgcattattatttcctccaaacataaatatttttcttaagtctcttataagttatatatattaactctatatatatatatatatatatatatatctccttagttgttaacttgttatataaatatatatagtagtgatggaaagcgttcaattagtgatattatgcaaatgttgtatgattgttgcacttatttttggtggagtagtaataatgtccgtacaaggaagggccattgttgttgttgatcattctacaagtgcctcagatgttgggcctcctcaacctcaaccttcacctatcgctataaattaccattttcccaaggcctttcgaccagccaacccaggtaagggccctccagctggtggacatggaattatgacccaaccacgtcgtttcgtttcggtacaccaagatggttttcgtcccactgagcccggtcacagccctggtgctggccattctcatcacaagaattaattaatatataattataatatatatggctttatatttacatcacaatatatatatatatatatatatatatcaacttcatcatcatgatcataataataataataatattattactagtttcttattattaataaaaataaaaaccatgcatgttgcattaatggcatgaatgtctattatcgatcagttactagtattgttgttgaattgagattgatgaatgaaacaaaaaaagatggattccgtaaagtcgtgcacaaaaaaattctccttgaatgagatgttgggtatccaactttgagactctgttttctcttagctacgttcttgaagcgtgattcaatacggctatcttgtgtggtttccaagtatgggtgattctagttctgaacagaatattgaaggtgatatggaggagctccggctacagttcatagaagaagcatccctggagttggaggccgactttgagatcaataccgagattgcgaagactggggtactggccaaaatccttggttcccgtccactgaccaaaggaaggattaaacaaattctttcgggggtgtggaatctgaaaggaaaatggagaatgaaaactatggaacaaggcacttggggcattttcttcgacaagctggaggataaggaagaggttctgaaacggcgaccttggattttagctgggcaattgctaaatattagggagtggcctcttgatggcaactggtatggggttccgatgaataaagctgtcttttgggtggagattcatggcctcccaacaccttaccttgcgtttcaaaattccagcgtgattggagccaaggttggcgagttcttggcttcagatggggttgacaatcggactattgcaaggcggggttttctcaaactcaaggtggatattcatttagaccaacgtcttccggcggggttctacctgagtatatcccgaggaaggaaagagtggatacagtttaaatatcgtaaattgcccaaaatctgttttaactgtggatatttggcccatgattctagtgtttgtaccagggagcgggcgtttgcctttcctcccattggaaatgcagtccctctgtatgggccgtggattaaggcaaatgttcccatccgtaattgttttgatacgaagaggccggtgcttctccgggatggggaagatcggacggcgaatatccaagccattcgaagagtccaggtgtcgaatgaggggcccagtaccagaaatggtacgagaattggtgttgaggccactaccacgattgatacagacaattgtacgaaaggtacgaaggaggtgggcaaaaacaattcgaataattcttctgaaggtgggacagctggaatgacatctggcacacccaattttgaagtcaaggagcatcctatgaataaactgggcccaaatcctgaagatgcaaatgttatagtttgtatgatggcccataatgggcctgatgctgcccaagttattgaaaagcctcatcacgaagtatgtaagtcacgcacaccccatcatcatccagagcccatcttcattaatggacctacagaaacgttggaagagattactgataaaatctctgggcccattttggatgaaaggaaaagcccaaatgaaagtggaactaaatggtttcacgatccgattcta

SEQ ID NO: 15006 - DNA, 5691 bp, Cannabis sativa
  modified_base (5654)..(5666): a, c, t, g, unknown or other
agaaaattagttgataattgataacttatgttctctttgaatttcagtccagagccaacagtttaaaatgttatgtaatgtattcactgaactgatgacaatttaaatttggttaagtacagataatgcgcttctttaccaaccctcgcaagccaatgattcttgcccttgctagaccagatcccaaaaagaacattaccactttggtcaaagcatttggagaatgtcgtccattaagggaacttgcaaaccttgtaggttcatccacctgaagatacttgtttgaagaagattttttcttgattttattacatagttgaattaatgttctcgctgttatgtttgatactctttttgctctctagacgttgattatgggcaaccgcgaaggcattgatgaaatgtcaggcacaaattcctctgttcttctctctgtactgaagcttattgacaaatatgatttgtacggacaagttgcataccctaaacaccacaagcagtctgacgttccagacatatatcgtcttgctgctaagacaaaggtaccacttatggctatagtataccatgtataggatttaatgtaaaggtatcttttacggttatattacttcaagtacaggattaaggtaagacatatcgtttgagcttccttcttacacaagttgagtgtcatacgctgttctatacatgtaacatgtttcaaactctacattttcagtagttgtgatagtaaaatattaattttgtctgggaaaagttgcttatttaataacattattttgagaaggtttattataagtttctttctctttcttttgagtgctatattaagatattagatgtctctgttttgaaatagtccaaaatggatcgacactctgtcagataatcaaacattatcctttgtgggacaaatttctgcaaaggtgaaaaaatccttgctgtgcatatatatttgaactgagaaatgaaacttacaataatattcattgcaatcacaaaggaactgctctgcagttttatcgtttatgttaagcttgatttttatagagttacctctttatcattttatgtgtttgctgcataagccgtgcaattttattgttcttatctttcttgttttcttttggcagggtgttttcataaatccagctttcattgagccatttgggctgacattgattgaggtgctttttgtaaaattaattaagcattatgtggtttatgtttaccataatttagtaatatttgagcttctattcttatgttgtacaggcaacagcttatggtcttcccattgttgccacgaaaaatggtggtccagttgacatacaccgggtatgtccgcttgttaatagaattggttgaatggttatactacaaaaccagattctagttggaagacattcgaacataattttagttacttaggaaagctgattttgcaggtacttgataatggtcttcttatagatccccatgatcagcagtctattgcggatgctcttctaaaacttgttgcagataagcatctttggtctaggtgtcgacagaatggcttaaaaaatattcacctattttcttggccagagcactgcaagacatacctttctaaaataggcagtttcaaaccaaggcatccacaatggcaaagaaatgacgatgatggtggcgaaacttcagaatcagattcacctggtgattccttgagagatattcaggatatatcattgaacttgaggttttcaatggatggggaaaagagtggaactagtgggaacgataacatttcagaatcagaaggaggttctgctgatagtagtaaaatagagaatgcagttttggcatggtcaaagggtatttcaaaggagactcgaaggtcaggatcaatggagaaaccggaccaaaacacttctgctaagtttccggccttgaggaggaggaaacatctgtttgtcattgctgtggattgtgatagcagtacagatcttcttgaaacaactaaaaagattcttgaggctgcaggaaaggaaaggagtgacggctctgtggggttcatattgtcaacatccttaaccatttccgagatacggtcattcctgatcgcaggggggttgagtccaaatgattttgatgcttttatttgcaatagtggtagtgatctatactattcatctcttaattcagaggatcgtccatttgtggttgacttttactaccactcacatattgaatatcgatggggtggagagggattgaggaagactttggttcgttgggctacttcactatctgataagaagactgaaaatgaggaacaaattgtttctgcttctgaacaactttcaactgattactgttatgcatttaaagtgcagaagccagggaaggtgatcaatcctcatttgctattgtcaaactctttcttaaatctaggattttctctatggattttacttgtataacagttctggttttgttcacctttaagtttcctttcaaatatttcttgtctttacaggttccccctgttaaggagctccggaaattgctgagaatccaggctttacgctgccatcctatttattctcaaaatgggagcagactcaatgtaatccctgtaatggcttctcgcgcccaagcactcaggtaaggtgtctgaattgacatcatgggttcatgatccttatctaatttattgttacaaagtttcttatctatagtaattaaagtagcatggcatacgtaaggtagtcagaatcttgatcatgattgtcattatttgtattcttcattgactagtacttgttccccacctttcttgtatggggggttttggtcaattcgtttaaataatttctaatgaccaaacattaggtacttatacgttcgatggggtgtggacttatcgaaaatggtggttattgtgggagaatgtggtgacacggactatgaagaattgcttggcggggtgcacaagagcgtgatactgaaaggagtttgtagtagtgcaattaatcaacatgctaacagaagttaccctctagtcgatgtgatcccacttgacagccccaacattgttcagacagccgaaaattgcagcagcaatgatatccgatcttccatggagaagttgggagttttcaaaaactagcaaaatcggactttcagataaagcctatgtattaaaaagaacaaacaaaccaacaaaaataaactctggacatcagccacatcttgatgcttttgctgatttctgaatctagttcctgggaactcctagttggaaaacgtcaataaattcttttttttctttcctcttctctttgttggttttattggccataatttaataaataaaaatgttccaaatatcatgggagttggtgtatgtctgcctggtgttaaatcaaggttgtacttgtacatggtttcaactaatttgcactataattgaaatttatttcgttttgctttctgtttctgttgatacaactgtcacaaaaaatcaacttaggtgtgaagtatattgattgattagctcttgtgaagtagacatgtgaaagtatggttcttgctctatccactagttgttaaagatttgattgagaccccagtgagtgtctaaaccacctttgtatctttgggcattgattctctctctagagaccactttcatatcaaaaccactcacattaacctatttactctattctttaaaatacttcatcaaaatttaaaattaattttgtttatttaaactcacacttttacattacactgtatatataacttttaaataaaaaagtaaaaaagtgaaatattaaacaaataattagtattgagattaaaataaaaatttaaataaaatattgagaaaagtatttgaagaaactcaaaagtcaaagtctagaaaactatttctaaatatagtatgaatatttgaggttaaaaaaagaaggatttagttcaactgatgaattattattttatcacattttatcaaaaattttcaaagttggactatattagctacactagtgtgagtgtttatggttggactattaatctttgtcaaatatttaagaaatcacttatgggaaaaagaaaagaaaaaatcatgcttactaggctatatggcaccattatagattatactattactagtcaaacttaaatgttataagtaatattcgtttatatcacaaaagatttcatttggtaatacttacatattacaagattagtaaaatattgtacagtttgtgatagcatcacaagtggtaataaataacataatttatatattgataaatagatatagatattaaaagactcaatcctttgatggaaaattaacgtggtggcaaaaatttactttgtaaacaatttatcaaatgttggcaaatttttcacaaaactcctttaaagacaaagaaaaggtgatgtgaagaatttcggtacaaactaccatctttgtctacaaataaataatcactttttaaagaaaagaaggaaaacaagtttgaaaacaatataaacagaaaaaaaaatgacagaagaatgaaaagctcagcacacttccaatgaggctggcctctttatatttatattcaataaataagtattataagaatcatctaaaaagttatactaaacatatacacgtttataagaaaagaatatactagtaaaagagtaaaagttggcagcctaaaatttttcacaaaatctgttatgtcatctcagcaatagtggtagtgggtggattttatttcttgacaacccatctcaaacttggtggtgtttcgactacacctagtttgtccaccaagaaatgaaatatgtaattggtgaggctctttgttaaactatctgcaacttgatcacacttgatcattggatggtacatatttgacttccaaggacttgctaaggactttgtcttggacaaattaaacatctagctctatttgttttgtgcgtgcatggtacactgaattggcagccaatgcacttgctcccatgttatcacaccatgttattggtgtgtaatgcaatggaaaatcaaactctttgagtaaggcttgaatccaagcgatctctgccgaaacttgagtgagagcacaatattctctctatactagaccttgataccacaacctatttcttggacgaccacgaaaccacagtgtcccctagatacacacaataaccggctacacttcttcgattttcaggacaacatgcccaatcggctttcggataccctataatggcaagtctgtcagaggttttgatgtgtaaactgtggtatacataaccctttaaatacctaagtattctctttgcagcactccaacaggttgtagtaggagcctgtagaatctgacttagcttattgactgcaaaagagagattaggtctggtgtgtgtaagatattagagacctctaataattctcctattcgataggattgtggagtggctccccatctgtttttgagaacgatttccaactgtcattgtgggtggaacatggtttcaaatgcatcatcctagttctgatcaagagtttcttgacatacttaccttggttataggtaaaaaccagtctcatctccatgaacctgttggaattattttaccannnnnnnnnnnnnactcacaagtatgttatttaacacc

SEQ ID NO: 15007 - DNA, 3086 bp, Cannabis sativa
aaaattggaatttcacttaatggtgcatggatggtgcccattaacaattctttagcaaataaagaagctgctgaacgtgctctttccttcacctttggttggtaagtaattcttttaattaaaacatgtttttgtgatttatatataaataagcacttttaaaatagacatataaataaataacaattatatatatgtatattgatgttattatatgtaggtttatggagccactaaaatcaggaaattacccaagtgtaatggtaaaatatgtgaaagaaagacttccaaaattcacaaaagaagaatcttcaatggtgaaaggatcttatgatttcattggattgaactattatagtgccaagtatgctcaaaatgctacttgctctcctaatcaattgggtctcagattttctactgattcttgtgttgatcttacttgtaagtttcctcgaataataataatttgcatataaatttagcgcactgcatacacttacttaatcatttttatttaagataggtctcacttatcaaaagtaactttatcacttaagtacgtatatatcagattttttctttattattattattgtttgataattcttacttacaaaaagtaattggctcatttcagttgtgagaaataacattccaattggtccaatggtaataattttgacttatttattatatttattattattgtttgctaaaataattatttaattatgttttaataaagtgtttgaatgattttgcaggctgcctcaccttggctatattcatatccaaaaggaatggagaacattgtaatgtacacagtgaagaaactcaacaaccctgttatttatataacagaaaacggtaaataataaataataataataatgtttttttttttcattattgggagtagctaaaataattttgaagaattattattattattaaataatgtgatttattatattgtaggatattcagaacttaacactggaaaattttccaagcatgacaacaacagaatcaaatattttgtggatcatctttcatcccttcaaagggccataaagtgagtaatatttatccactcaataagtgcagttttatcaactaagcattactaataatatataaaaaaaatcactataagagaattgctaaaggagattattgtgatgcctaatactattaaaatgtgtcatattgatattgatgtaaataaatatcgctaaccacactaccttttagtggtgttagacacaattggcacataatcacaatggcctttcacttagttacgatccccgatcaccaggcttcgaaacctatttttaattgaaagaccgaaacaaaaaagttttaaaagtgtagctgatgaattgaatgacattattgtgtttgtaatgaatgtgtaggagaggagctaatgtgaaggggtattttgcatggtcattgttggacaactttgaatgggctgatggctacaccattcgatttggcattgtctatgtcgactacaaccatggtttgactagacgccttaaagactctgctacctggttcaaacaacttcttcactaatgggtagagaaatttttgattaaaagggtaaaaaatctttcgatttagcctaatcaatccaatccgatcgactgtcttagttaccaagttacaagagcatgtttgttcgtgtcatatttcattcaaattcgaatatagatagtgttgctccaactcaaaccacgattatgaattttgttgtgtcgaaccaagattattagtcttgatgatcggacttgtgcatatacaaatcatgtcgtgtcgtgtctcaacccggattgtaacatccatgctagctcataaaggcttgtctaattttttaacatctaaaaaaaataacattatgaccatatttcaaaaagaagaaaaaaagatataacattatcaccaataaccacaacaatcatttacaccaatagaggggaaaataattatgttacaaagggatcgaaaacccgcctttcttttacatttttcggtcttcatagatggaaaacataattaatggtttgatagaactcatgagaaggaacaaacggaacaaaataaaaagcaagttgtgaatcgaaaaaatcaaaaccggtttattcatttgatgattcccggtctattagctctaactttagacctagtgtggtgtaccttctttggtacatctgttgttaatgcatacatctttacagcaaacagctcctcgggtaaccccttctgatcctgatcaatcaacataaaaataaaaaggcgagaaataggatggtataaaaataaaattgaaccggcgaaaatgtagacaaataaaattgaaacagattcagtagtttaggaaggcatatgtaacctttaatttgtaaagatgcagcccacattgatgaaagagctccttaaagtatgaatcagacctagtaatgcttcgatcatcattgtccaagacaaatcctacaaaccgaaaaaaaaaagtgtttaagataaaaggaagagcaatggcaccagtgtgaatgcactcttctgttagaccctcacgtcttctacgaggctagcaaaataattgttgttcgaaggacatgcctcgacactagtattgaaagtcgagtacagattgcagaaatagcttacgttgttgggaaatattgtaagcttttagtgcatgaaaaatagtcacattagatacaagtaacgaacttttgttaagatatcaaaagaagaattaaaaatgaaacaacattttatgtggtaacttctttagattgaatcaaaaccattcaaaacataagtagcgaacatttgaattcgaattatagagccatcgataatgatgggggatgacccgtttccaaataaagatttgatcaaggaggaacctcattcatggttgtgttatgaataaagaggcttttacaataattcagaggaaactgaaaagttcataaaaaccgatgaaccaaaaccgaccagaccgtaaccgaatttttggttccacgtcatcaccgaatttggcggtcggtttcggttttggttttttt

SEQ ID NO: 15008 - DNA, 3498 bp, Cannabis sativa
  modified_base (2971)..(2972): a, c, t, g, unknown or other
  modified_base (3092)..(3094): a, c, t, g, unknown or other
tttttttttttgtatttttagaaaattttttattttatgcttttctcttgcaacaaaacctctatttataaagaggagaagcctgtagaataaagtcaacaatattggttgtagtaattaaagttaacaataattgttgaagtatgtttatttgttgaaactcttggtgccagcagttcaacaagatgcagtctcacatgacctcaaaataatttagttgaagaatcttgcctaaagaatagaaaattgcaagaaattatcttcaattagagagtagctcaacaaagttgcattgacagttttgtactgacaaacatcatcttatatttgtacaccaggaagtagtttggtcattactgtgctggctaaatttataaagatagtataaaagagaaggtgaaatgggcacttaagtcaatcctcactaaaatcttccgaaagataatggaaaaagatttgtaacttgaataaaatcaaagtaaacaatcaagaactacaatgtcttatgctcattactgaaagggtgtcataatcatgccttaactggtgttaatatttggcagcacccaatattagctgtaaatgttattatttagatatagtaagtacggatgtttttaaagctggacatgatgacattgctggttttatgggaaagctatattacaatgcaataaaaggttaattacaaataaatggtgagttaacgtatatattatactattatagagattttctatagactaagggtgagccttttctagagatttctctaaatcacttcactggtttgagaaatttaggataaggtggacatgttgaccgcttcaaagtatgtaggctgtgtcacttgtcatatttttgtgattattttgtaataagttttaatgaaagataagcatgtagtcttagattgtcaactactatcatgtcatgtgacgtgcttatttaaaatattgttcatttacaaaaaatgtatcatgattgaatgtttttgaccacatgatgtttttcgttgcattcaaaaggatgaacatcaatatggttaagttaatttcaacatggcatcatatgttgggttttattcatggagaataagtatgtcgtataacatgatggtggatacatatctatgttatatgcttttcaaacaaaaggttatttagtgtaggagctttatacctaaatatggagttatgaattgattctgattgtttcgtgtaattttaatctctaggctgtgctcttaaattgtacaactttggcctaatcttatgtcttatctcatgatgctgattttttcatccatcttgttcaatgtctagttaccatttccaatggactgcctttatgctgatcctgatcgcaaggtaactgatctcactaaatttagtttacatgtttgatatcattatttaatatatttaaaacaatgaattacactttcctgtaggcatacgatgttctgggcttatactttggactgggacgaacattcttcaatcgagccagtgtaaactttttaaatatgttgatttgaaatggcctgtttactgaaaaatttatgatttattgaaaagggcttatgcgcaataattaaatagacttagatgcttatacatgttcaaaactcaaatatgacagattaaggtgttttctagaattgaagaactgaagaaagctgggaagaattataccattcaagccacccctgatgatagaagtagtgtattacaacaggtctgatatattctttcagcactgttttaattattttttgaatctgtggttctttatttaaccattttatgttttatgactcagggtggaatgtttatcttcaaaggtaagcaattattgtatgcaaggaaagatgaaggaacaggtgatcatgctccattagatgatatcttcaacgtttgttgcaaagttccagtctcctaaactctgcatactgcaagtacgctaaaatattataatcccatttcacttttcatatgcaattctatcatataattactccatcaataattagatgtacatgttacttatacatgtatatatatgtttatattaatgtatacacacaaatgagaacttggtgcatagcacagtggactgtttacctttatttacatgtgcagataaattaaccccaacttattttaatttaataaaactacagtaatgtcaagacatcctaaaaccaaacataaaatatcaaatcatatgatatttgttaacgtaaaataattattattatcattgttgattggatttttagttaaccgacacggagttgtaataaatgatatttaaactaaaattgtaacaataaatataaataatgatatcagaattcacattaaatgtaaagaaaaacactggaatttaaagagatcggccatagatgttggtaatagtctactcccttgtattttattattcagtgtttcaaaagtcaagaacatgctcttgaatgcaaagaataaaaaaatattttttctctaagggtttaaaattgcgaattcttttctcaggtcatgggtgactagaggtgttcatccaatccaatttgcactattttgctcatagtgcatctgattggcactaagtgcagattttattttttggatccaattcacacaatagtttaaattcaatccaatccaatttgcaaaagtgcagattggatcggttattttggattgatttttttttaatattatattatttaatatttatgaaaaaaatatattttttttcttcatataactagtaacaaaataaaataaattatagttattttatgtctccaacaatacattaaaataaataaaataacaaataacaaatttaaagaaagaaaaaaaaattgtatgtatagaaaatagttaattttattttaaattgtatgtagaaaaaaaaatacatataagaataaaaaatacatttgatctattaagttttnnaatataattgtattatatgtaatagacttttaaattactattttctttatattaaaatattatttgtatatataatttttttttataaaaatatattgattggattggatcggttacttnnncatgtcaatcaacattcaatcctcacaaatgtggattttggattttccaatccaatccaatctgcaaagtacggatatgatctgcacttgtgcggattggattggattggattggattgaatcggctattttatgaacaccctatgggtgaccctttatatatggaaaaagatcggtgcttctcgcttcaggagacgcgaccaacgtcgatctcaactgtctctttggtttttagaggtggttgaagtcttgatttttgtgataatatttcactattttcgtgtgtttgtgactgtctttgagttttttgtgggatttgaatatttaaactagccactgacgatgagggtctcccgagagtgtgacatggccgttaactaccttcaaggatagaagctaatact

SEQ ID NO: 15009 - DNA, 33116 bp, Cannabis sativa
  modified_base (12767)..(12774): a, c, t, g, unknown or other
  modified_base (23606)..(23615): a, c, t, g, unknown or other
ttaattataaatattatcacactacttatttacctttaatttttttaaaaaaagagatagcatcaatgtcatgtaatggcatcaacataattttctatgatagcacatatttaacttcaatgatatagcattctgaaaaaaaacacatcaaatatatacaaaactaaatactaatctatctaataattgactaagaatgagtgtacgaatatgcactcatcagaatcatattcagagaaagttcatttttgagcacccagagcactcgctgcctgggcacccatcgcccaggttgataatttgtcaatctggatgccttccaagtatcagatcgacgattcgacttttgcatcttcatcatctttatcaaaaatggggaaataggaactttcgggggaagaaacaacacttcctgggtgccataagtaaggcctagcacccaagttaacactcgggggcccaacgctcaggttgacattttgtcaacctaggccaattgatgatattttacgagaattctttcgagcatcttctcagtttttagcaaagattaagattcaactatttttggggaccaaacggaactttcgaagggccataaaggagacccatcgcccatgttgacatattgtcaaccagggctgtttccaatcaagttctcgaaaaagtatttcatgcatttttttgtcataaaaaataatgaagattcaagcaaactcaaaaagaaaactacaaactcgaggccctaaaagcaaagcccagcgcctagattgacttggtggtgggcccagtgcccaggttgacaatcaacttggtgcgcttattttgatcactcaaatgccaaatctgattcgaccagtgaatctagaatgatcaaaaatagggtaagagacctcatcttcaagttcaagaacattgaaagtatcaaaatgacatcctgagagcttggaaatgaagtacctagtgcccgggttgacaaatgggctggtgtgttgggttctgtttatccaattctagttttgtttcgatcgtccgtttagtttttcacaataactaagatccatgaagtcggagaagtcaaattcacaattttgcatttctcatttccaacatgagaaactcactcgaaaatgaagaattttgagtctcaaatttccacagaacaccaacatctctgagaactagtgatcagcttccccagaatacagaaatagactaagtgatatcaaagtgatatcaaaatatcacttaggcatcataaagtacatcccttggacgtttcgccacttactcagcgtccaggttgacgacatatgtcaacttgggcgctaagatgtcaacctgggcagtggatgtcaacctggacgctgaatcatgaattatcttcagtaaaatagtcattactcactcaatattgatttgattgacacgattcaacttgtgtttcgaagctaattcaatgctctatcaagtaatgtctcacacttcaactgcaattctgaagttatcaacctcaaattttaccctcaaaggagttacgagaataagctccagtttacccaaagcgggtcctgccatcgcgatccaaacttagaaaattgactatcaacctcagaagttaattttgactgttagatcatcatatacggtcaaaattagtcaattttttttctttcatattttgtattattttttcttatttttttaggcctccttcacctataaaaggagagcccccttagtttatttcaaatttgagaaaactacccacaagatcaaagcttctctctctagtttctctctttagaaattgaagccttgacacttaacctatttttgtaataccatcttgtgagaaataaaaactcgacgtagacgtagctccattattatcgcgatataagaagtgaaatactataaattgttgtgtctctcttataattaattaacaattatttcattctcaccaatctagcaagtgggtgtgacttagaagagtcttagtccaaatttttgactcaacatattggtgctttcattgagagccacaactcgagttccctaactaagattcgattctctatcaagaactttgttccgaaaggaattcataagttcaagtaagcaatcatccatgaacatgcaaagcaacactaccattctcagtagccacaccactgctcaacaagcagcaggcactgagatttcccataaggaaacgaactacgagagagtgtccgaaaagacttagactcagaatcgtggatatatgggatctctgcctggtatggagcaatcacatgttagggaaacaagctacgagtgagcatccaaaaggactcagactcgatcgcagacctacaggtccaccacacgcaactgataggaccaaccacaattctgctcgaagcaattcaaataatgcgggaaactaatctcctccatgggattctcttcacaagtctaatgactctagaccaccccgtgaccctgcaaaaggaaagggacctataatcatacttaggggaagacccgagaagctctaccatgaaagtgacgagtatgagatttgaaaggtgaagattaatgaactagcccacactcgaaaatactttcatgataaacaaggtgcttggtgtaggtactttgcctgaggccctaacaaccaatagtacgaatactttccatgggtgcatggatacatgttgaactggagtaattgatccaattccctccatacatgtcactttgaggaagactattttgaaaggaatagtcggtatagtactacgagcatctactcatgaagcaaacgctcaaaagacctatcatcatacaggataaatcctcacagttactatcacggccactcgactaggcaacaaccacaaggcccaggtcaatcaatcccccgtttttgaccatgccagattcaactgtcgcatcgaaattggcatttgagcaattgaaggcaacgtttcaggttgattgtcaaccttggcgctgggccctatttctagagacacgagtttgtggttttctccccgagtttacttgaatcttcgttatttccaattacggtaaaaatgtccagaacactttttattgtataggattggaaacaacccatgttaataaaatgtcaacctcggcgctgggcccaaccccaggtattaacttgggctttgggtcctagttttgctccttcaaaaattctgtttggtccccaaaaacaattgaatctcaatattttttgaagacgaagatgatgctcgaaagaattcctaaaaaactctattttttgtgacgctaagccaaccctaagtgtcaacctgggcgtcgagccctattatttgtgcccatgaataatttttttttttcctctgaaaagacttatttctccatttttgatgaagacgaattcaatgcaaaagttggatcttcgatcagatacttggaaggcccccaaattggcaaattgtcaacctgagcgttgggtgctcggagccctaggtgctcaaaaatcattttgctatgaatcttattctaatgtctcaaacatgtctgtggtatgtctaattgatgtcccaatgcaagttttggccactttgcactaagacgatcccaaaaactgaaatcctagttgagaatgtcaacttgggccctgggttgaaccctaggtacctaggttagcttcaagttgcaggttcatgtaatttcaactcccaaagcttggattaggttgctctatgtcttcatagtacaaaatactgaaagatagtgtgttggatttaagttattgaagttctaacttcaatctaggagatcctagagtcaacctaggcgcaagactagggtcctcttccaaatcgactgctatgactcaagtctattcaattccgtgacgtcatccttcatgacacatgtcaaacattaatatccatgttatcagagaaaatttccgagttaacaataaataatcaattaattttcatttaactgaataaaaaaatttagaaaaaaaaatgagaagataatttgttctgataaataaaatatctgaaattaaataaaagagaaaataataatttctttttttgaaaaaaaaaactatacaattagaagaaaagcctaaaagatgtttgttaattatgtattatactattaaatagaatgtgacatttacatgagttgtaatattttaattggattgagacttggggacacacaagaagtgggacagaagatttggctcccttcctacctatcaaagcctataccataaaccagctgaaactccatttaaaactccaattcagagatggttttgtgttggattctaagctggaacatttctgaaaactctttgagcaaagactcgtgagcaatattaagaagctggctgtcattgggatgatctacatttgcttcagcgcaatcactcgatgaacggaatcctgcaagtacatttttaatacttccaactttccggtctcgtattccacaggggactatccaatcaaaaggggttaaatctgtggtgacattcagtgctaggccatgatatgctatccattgagtaactcttattccaatggctgctagtttctgattgtctgaaaaaaaaattagatctattataaaatggagtatgaaacttaaaggtatggctattgtcaaatgtggattatgaaaaggaaagtgcattatttgataatgacaactcaaagtctgttctaatctacatttatagatataaatttgtgtatgagttccttactcagcagacatagctaagaagttggtaactcctgatttcttggactaattttcaaatgtgattttggtgtttataccatgtttttgacatgaaaataaggatttaaaggagcaaactcatagcatttgcagtttaccactacaatcttagatttgccatacatcaaaattctatttatcagctgtcacaaagtcaagagttaaattttatcagaaagagctaaagcagtacaaatatctatttatgacctcttacacttaagataaagactcatgttatatttaagttaaacttaaaattaatgtagcaaatactataattttctgatcttcaaattttgtggagttgggctaatttcaaaatataatagaaaatggattagaaaagcataaaactaaagtagaaggatttattaggaagcagcataccgacccaaacaccagtcaagccctcaagtcgagaagccttgatagagaatgttttagttagaacgcgaatgactacctcttctagtgccctaaggtaccagtgtagatccatcttgtgattccgaagatttataatggggtacatgacaagctacatttgcagcaaaaatttcagaagttagtttaattgacagcagtaatggattgacttccataaactttgtagttttcctaaacttatttggtcatcaacaaattcctatagtaaaatctgtagtatttactcttcaatttatactacaatataaaactactccaataagaatttgaaaacagatgctcatgaatatgaaaagtttaaagtataagagtgtctggtatgaaactgtaatcacacattaattgaagctcaatatgcaatgtaaagcaggcgaaggtaaacggatctctaacatgtgtggattttggtacccatatgttcctaatagtagaattaaagacatggagtttagtttaagaaagcacaatctacaccaattcaaagtgtgaagcattgagcttggaaaaagtaacagggtggttaaaaaatttacttggccaggaccatggtatgtaacttcaccaccacgttcagttctatgtacttcataaggagcattcttcaagtcgaaattaagaaaattctcagaactactcgtacccaatgtataaacggggttgtgttgaagaacaatcaaagtgtcaggacaatcttccttcctttgaatcatatcccttttctcattcactaatcttttctgccaagaccatgccattccatatggaattatcttttcatataaatcaaaacactcacagctgcaacagtttcaagttgaattagtgaagcttcataaagcagaaggttaactgcttgataaaatgaagtaagagtacccactctttcctggttgaggaatttcgtgaggtgactttttgagtgtcaaaatcgactctgttcaaagttgactgcaccttttggagggaacgcctttgttggcgtggctttcttaacttgtcatgtgttggacataataagtttgagctaacggaatgtgttacagcaaaagccatatctcaattatctgcaatttccaacccgaaaaagagagttaaactgctggttgtcaatccataaaaaggaaaggaaaaactaaaataaaagatattactgcaaccatcaaatgtattcaagccacatcattccattggttcttaaaaaaaatcccaacggtattcaaaaaagaaatagtctgtcaatattagatcaaatgcaagtactaatagtcagagatctttaaataccacatataaatgttacaagtcatacttgttttctaacataggtgtattttttccattgttaataagaatcagctacatatatgagcgtcacctacagccaataaaaatagtgaaaatagattactctcataaatcatagagcctgtttcagcttcatttaaccattttaaccaaacatttacaataactataatcataaacataaaagaaaaacaagtgcttgatcagcttagcttacctaaaacaattattaacaaaaaagagagaaagaaacaatctgacatgcttcagtttcgtataactttttcaacaacaaaaacaaaaatttccataacccactaggtttgatttggtctagtggtgagactccgtgagaggggttgggaattgggatgagacaaggttcaaacttgaatctcttattctcaatggagcaccaagtgtctaaattgtttccatatagatgcagaatgggttcccctctctctctctctctctccaatgagagagagtataggggtttaggggtttaagggtttctctgtgaatttagaaacagtgattgttgaagaaaccatgggatataaaaaatacagatatgactgagagtgagatcaactgaacaaacaatatctcatatatcatcaaatcagttgaatagtactaaacaaatcattttgtgagagaaatacacacgacaccaaatttcaataagaagtcttcataattttgaggaaaaaaaaaagaactaatttcagtgtaggtacacattcaatgatgaatcaaaatcatataaactaacccaaataaatggaagataaaaaaacacccagaaaatgaagaagatggaggaggaagggcgaacctgacaatgctttttagttttaggattttgggatgtaatgagctagttaggtaggacaacaaacaacccattccaaatctaattactgcctcgtcatcatttcagagtcccacatcgattttgaagtaaatccttgttgaaataaaacttataagaataagattgggggctcaattaaaagatgccttaaactaatgagtaaggaaaacaaagcgagcggtgggagctgctcgccgcgcctatcacattttgtgcgcagtaatttgtggaggggttataggctggccaagtgttgacgctgcttactttgcagaactcacttgtgcgggcctcccaacacccaaccccacaatacaagtttaaatattattataagaatgattagaatttttgctttttaaagtatattttttgtttttatttataaatttataatgtgtattttcacaaaatattttataaaattattaaatatatattgaagaaaatttaaatcattttttaagaaaatatttttaaatgttatattatttataaatacatattttaaaaaatcaaattaaaattattaaaaattcaataaataattaatcaaactaaatttttgaataaaaaattaaattaaaaaaaatgttatatttacttaaataaatatagattttttgaaaaaaaataaatttaaacttatttcaattttttaataatttttaattatttaaaataatttttcttaaaatttaaattatttttttaaaatttactacaaaaaattgaatcatttttattttgagagggtatcatttaataattattaaagtttagttgacaaagttactaatttacaagaatacattaatatttaaacggaataatctgatggaacctaacagaagaaataattttttgtaaaggtaaaagtttaagaaattcttaacaaaccgtatattttagggggatataatcaatattgtcgaaatttcaaagggcaaaattactaattattcttattataataatgagatatatagggtctttttggtaaaaaaatatatttggtaagcagttaaaaaaatattttaattaaaaaggaatttttttaacaaaaataatatttaaatttcttattctttattttgttttaaagattttttatgttatatttttattattaataaataatgtcaacatttacaagtgataaaaatataatttaaatatattatatatatttgtatggaaaaaaagtaattaaaaatttataaaaagaaaaatgtacagaaaaaataattaaaaatatataaaaaataacacttatatatatatttgtatttatagttaactagataataatgttattttaaaatttataatttattaaacattcaactcgtttattttacagttctgcaatagttgttttgtctaacaggacaactacatttgttttttctcagcttttcccacatcacaagtgtgctaaagtggcccaaaattattttttaattgacaattagaaaataaaaaaaaatcacttttaaaattttttaaacaatttttttttaattaatattttggacttcgactccatcctacaccttaagatctgaacccaaccccggcaccgaacccgaacccaatctcgacgtcgaatcctaaactcgacttaaataaaattaacaaaatatatctattttttttgtttttaaaattttaaaacaaaagtgttatcaaaagtcacggtaattatcccgagaaattatgccaaaaaggcacgtgaagcttgcacgtgcgcggaatttgtagctgaaaccgggtggtgttagttaagtggtagcatgagaaaagaaaagccactgagaataaatacgaaccgtcgtcgaataattataaaaataaaaaataaaaaaaaaagaaagaaaatcgagagagaaagggagttatggggaaggcaatgcaattttcccaaacccttctcacatttggcgcctaattatctcccaacacccaattcaccattctcaaaatcaacttccccaattccccaaattcacgccattgttaaccccacaaaccctctcctctctctctccaactcatcgcccatgacccaccctcaccacccacctcccattccgcctccgcctccgcctcctccgccggctgttctccttcccgctggtgttaacactggaacagttcaggtcaggtgcgccggttgtcgttcgatcctgacggtgacttcgggggtgttggagttcgtctgcccttcctgcaaattgccccaaatgcttccgccggagctcttgagtaggccccagaagtacgtagctcccgcagcttcttatactaatcctcctttttcttcctcttctcctccacctcaagtgccggcccacggtatcgatcccacgaagatccagctcccttgcgccaattgcagagcaatccttaatgtgccgcatggacttgctaggttctcttgtccgcagtgtggcgttgaccttgccgtcgacttgtccaaaatacctaaggtgaccccgccgcctcagcctcagcctcttgctcttcctcctcctcctccacctgccgaagaggtcaacgaggtttgctttcctgttccgtatgctttttaacagtttgttatgtgaattatggcgtggattactcttgcttactcgttggagttcaagttgatgatagagagatgatttagaattatgtacttcttgcatactgacctacttacagtagcgcaatacggaaatggttgtggcatcattgtcaattttgattttagaaagtatacagtttgaatcggcatttcctttttgagtgtcgaaactacgtgggcattgggcatttcatttgaagacttcatagttgaggatttttcgaagctctgtgatagtaataagggtttgctactcatttgcacgattggtagtagatagatgacattagaattcacaactatcaaaggtcaaaatattcagtgaaatgccataaaagattatctaacaatgtctaacatttgcacacttatttattacgtctactattggaaacctacgccatatttttaattctcaggatatggtgcgatgaggaacaacaagatgtccttaaggaattacattacaacgaagaacccaaaacccatagaaagtcagaaactaggttcctaaatttcttttcattgtctaaccataaagcgacacaaagtttttccattgattttgatagtgtgaaggaaactctttgttgaagttttggatagttttgaggttctacagatgtatctttgttttttgtattggataattttgacttaattgaagggctcttatctggacaaaatttaaggtaaagcttcgatggttggcagccttgagtagaattaggatgattaatagcattcagaaataaagcccttatcaagtgcttctctcagtaatatggcatgttctctggaaaaaaaaacttgagtctgtagatcacgttttcattcattgtgattatgcagggtctttgcaggctctgtttctggctgaattttgcatgcaatattctgcccccacaagctgttatgattagggtttatgcttctagattttgtaaggatgtctaattcatagaagaagaaaattggcaattgtacagcattgcatattatgtggaaaattttgttggaaataaatgataggatctttcgagttaagaagaccttgctagataatatatgagacatgttaaagttttgggttgctatcagccatcaggctaatgagtgaaagagtttaattgatttccaatttctaacctgttgagagaatgagtggttttgctttagctttttcttttctttttcgaatctttcagttttgaagctgtttgggtggccaagttacttgaaaattttcacactttcctcgtatctttgttaattagaggtgtctcttaggaatagaaaaatagtgttgtaagcaaacttgtgaaactgacttatgttatgaattaaattatgctatttttatagaagaaatttatttatggatttggggtaggtattcctaatagaagatccttaatactagtttaatgattcttcaatttctacttttagcactcccaataggtgatgttaaacccctgtttctttaaaatagagaagataagttgcaaaataacccttatatcaggttattctattgttcagatctacttcacattttgaagagcactattcgttgctccaaatattttttattaatattaaaatatgtagggatattattgatagttagagaaatatttaaaattaatttaaatatactgaaaaatagaatatttaaatgatgtaaaaagttttaagtaacatagaaacagtgtaatacagagaatctgatgtatgatggttaaagtttgatgtaacatagaaacaatgtagttttggtgatgtagttaagtatagagtagagaagttgatgggagtgctcagtccttactagtttaatttaaaattctttgcttgattgatttagcaagtatcttagcatttgatgtttactgatcttggcttttcctttgaagacatataccatcttggatttatgcactacgttgtaggtccttaatttttataactactttcacaataccaacaatggaatgttgtggtgaaggaaatctattaagattttctttttaatttttatgttctcgtcgagagtagtggcaaaagcttggataattttctatggagtatggaaaattgcatgattgaagacatcttccagttgattaaaagttattaaactttcatgtctgtgctgaactcttttaactttagagtctgtcatacgatatttgatacacatatttgtcctgtttaatttttttaagataagtttacttcttttgctggatttcgtgcttatgccaggaggccattgaagtggaaagggaagaagacgaagggggaacagctggtgaaacatttacggactatgtgagtatctttagtgtttgtagatcttgattgaagttttatgccggatttttttcttttatgccttcagttgttaactgaaataatgggaaattaatgcatttgtgacctcagcgccctccaaaattatcaattggacctcctcatccagatcctattgtggagacatcttccttgtctgctgtacaaccacctgagcctacttatgaccttgaaatcagggatgacttggaagaatccaaggctttgtcatgtttgcagattgagacattggtctatgcatgtcaggttgctgcttacaccgggttcaagattattgagctttattattattattattannnnnnnnattattattattattattacagaatgacacagttagtttatgacagaggcaccttcatcatcttcctagtggcgctagggccggattctttgttggagatggagcaggtgtgggtaaaggccgaacagttgcagggttgatatgggaaaattggcatcatcataggaagaaagcgttgtaagtttcatgaataatctctctttgttgcacacctattttcctcaaacatattttgtttcttttaaatttttagaatgcattaagcaacattcttttcattcgaagtgcataatcatgcagactttgatgcttgttttatcacgtgttcttgctcatgttgtgttaaattttttctctgcttcataacctcgtgtaggtggatttctgttggttcagacctgagatatgatgcagaaagagacttagcagatgttggcgctaaagacataacgggtaagaattggactatgaatatacagagatgattttgctgaaacttttttgttctaaattttgctgtgacaggatggtttatttattaattaatttttaaaagaaactgaagttttctttaaaaaaatgtacatgctgttgagaagaagtccacatcaaaggagagaataaaattgagttagcagattgatttgacacaaagggagacaaatatctggttaagacagttagaaaaatattcatatccttaatatcagaggagctcatatacacatcatgcttattcttatcctgtaaggcttaactcatcagtgcccgtaaccctcaacaattgatttgttcctctccaagcataatgaaccaaaccaaccccaaatctgccacattcaatttttctgttttcctttcgtactatactctgaaaggagtcctgatatggtcttggaattgcccttaaaacccaggtcttccctgagcaatctatacagctatttagaagagtattggtaaggataacactatgcaataagtgtaatcagtctaatacttagccgagtcctgtattgctgaagtctattaagggtttttttttttcatccttagctaattagagataatataatacttgaagtcctgtattactaagtgtagtcagtttaattttaaggaatgtaattgattagacttcatctattaagggttgttttttttcatccttagctaattagagataatattatacttgaaggcaataagaaagtgctgtaaggggctggacttgttgagtgcttaggccggttttatttcatatggtctaagattcgattcttcagtcacctgagtgataacgaggagtttcaccttcttggtacaaactctttcttttttgctttgaaatattgttgagaaacaaagtacgcaaaaacatttgaagaacataacagattatttttggccatgctttggaaagtgacttcaatgattgttggggcattattggtgtgggagagtaatttttctggaagttatattagtttttcttcaccctgttggatgagaagtttttctctttggaggacaggatatttttgaacaacaatactagaaaagatagtttttgttttgcttgtttgcatgttggctgaaacagaaaaagaaaattggaatattagtgtataccttttcttaaatgaaaataatggtcatatatttttttatttttctgcagttcatgcattgaacaaacagccatattctaagttagattcaaaggcaaataaagtcatggagggagttatatttttgacatacagcagtctcattgcatcctctgagaaaggtcgttctcgtttgcagcagcttgttcagtggtgtggacctgattttgacggtctcattatatttgatgaggtagtaccatattcatcggttttaccttctacacaaatgattttaagcaccaaataatgaaaaagttaatataggatttcaatatattcttttatctttcatgctaagggtcaaatggcttatttgtagtgccacaaagcaaaaaatctggtacctgaagctggaagtcagccaacacgaaccggggaagcagttgtagaaattcaggttttcccttttcaaacattattgcatatcacatttgttttgttatttatcttttttcaagttctcaagatgatgaattacacactaggtatcagtacgtaagtccttaagttttggtaatctagttggactttacactcttttggtacttctagaggtttatatcttggacttgcttccatttaagtaattttaacttatcttcaagtagtaataattagagtttgttgggtgtttttttttgtgtgtgcgcgcctaataattgtgtgggcaaagcttcacttttgtttttttttttaaataacaccatcaagtaataatagttagggttagtgattttctttgtggaaatctaacttactcgtgcctagtaattgtgatgggaaaaacattttttttctctaactgcatgaaggtcaggcgactcgggccatcatacattaaaacaacaattgctttgtgatgtagaaccaatacatgataggtagatagaaaacgatacataaaaaaagagagaagtaaacctaattttcaacctttcttttgcttccataaagtaggggttttggtttctcatggagatgtaacttgcaattttgccagagttttatgctcccaaatatttttcttttttgagaaagtgacaaaggtcacatgcataagtgatctcctctcaaagatgttgagagttctcgcttatggaggcggatggttgtggttacaaactccaacaaagtcgtgaacaaactataatacaaaaacaaacacagaaaaaacatctatttgggaaaaaaaaaatcaagggaagaaaaataatctattataatacataaaatctcccaaaaattaagtctaaataggataaaccttttaactccttggctttataaaatcaggtacccacccaaagtatcatttcccatagattatatattgcattttccttgtttttaaagattttgctattttttcaagacaaactcctcaaaacatagctagtaagattgtcatccacatgattgaagctcttttgtgcctaatcggtttgcacacccgtaattgaatgcatgcctgaggcatacactaatggaatccaaattcacttaacaatctataccatagtttatgcacaaacttacattccataaacaaatgggtgatgcttttgtcttcctccttgcaacacacgcaccatccaagggacaaatattggtaatgtcgtttgtgttgaacattctcgtgtacactcaccttttccaatactagaaggcatccaaacacttcaatcttggaagggacaataccctctagattgatttggcccattttagatccctgtcctgtgataccatactgccgaaggttgttttgcatgaaaaaaatcgtacttctaattggttgacaaatcttcctatctttgacaatgccacaaagagacaaatgttatatcagttgtaaaagtccaatcaactcagtagtctccctatcactcaagttcctgctaaaagaatgttacactatcgattaggacttattctaggagaaataagaaaatgaattgtaatgacaattgtgttgatgtggcagccaattttaaggtgggaactgattttgttagttacaattactcaagatggggttgggtacaaagagaaggctatccatttgtttagaactaagaactgatttgttaaaatagagtaagacttactgaaggaaaccacaagcttcgctgattgcttgaaaaccttttgtgaatcaataaacaaactactttttctctactagttgggtgtgtgtacaattgtgtattaaattggtatcaagcggtatggctgggaaggtagtagtgacaaagagaccaggaaagaatgataaagaaaagcttgaataggtgtcagaattagaataattggtggactctaagattggaacagtaagagatgaagttggcaccgtctggaatgaagtcggctcagtccagaatgatatgcgacaattcaaggaaggcaggctggtcttggacactttcttgacaaacagggcaaagggagtgtgatagccgaaaacgcaaaacccaactttgaacaacccatgtacgtagtagccctgcaaaatcagcgccaacagaattggaggtggcaagcaccagtttttaccactatcgggagtttcttcttcgacgattggatttcccaatgttcaatgtggttctgacctcgatgattggttgctccgtgctggaatgtatttcacactttagcggttacgacgagatgataaagttggcaatgattaactttgaagggagggctttaacttgatatgatgggaacttcgacactgaccaatccatttgggaggacttgaagccactcatcctgaataaatttagagactctagtaacgggtcgttgcacgatcaatttcttgaatttcgacaagaagggacagcggaagaatattgtgagatttttggaattatttgcatcgtcgacgttgcctccgatgtggtggtttttgagctaattcttgcatggacttaagtagggcatcattgagaaccttggacaatgccttggattttgtggccaagattgagacagaatcgttctttatttggttcccaattgggctgggaaaattacgaaggaaatggtagcaacagttagcggagtggtaccataatttcgaacaatgaccataaattgtcaggccaatattggaggtggatcgatttagagatgcaagagactcattgcaagaacatttgttaacaaatgggctctaggacatcgttgtgcgaaggaattgagtgttattatcacttgcgatgaagaagatgacccaagacctgatgatgaagaagggaactttgtctttgacagtgtcgaaatcacgggaacacttgaagtgtcctcgaattcagcaactggaagtattataaaaattaagggagcttttgggagccattatgttatggttctaatagattccggggccacacgcaagttcatctccaaggagttggtaaaaggaagaacctgcctttgatcaaaataagggaatatggtgtgactttgggattgggatagtccattaagaatgagggagtgtaaagaagtggtgctggaattataagggctgactatcattgatgatttcttgccttttggttagggtagcacggatgtaatatttggcatgtagtggttggctattttgggcaacactgagattgactggaagcatcaaatatgaaatttaaggtgggagaacaaccaataacaatcaaaggggattcttctattggaaagagctcgtaaccttgaagaatatgttgagaacttgtcaaaaggaaaattcaggggccagggctgctagtggagtgtaaccaggcgatttttgaaaccattccagcctttttagagggaattttccaactatttaatctcttgaaggtttaccaccatctagaggccgggaacatgcaataaatcccaaggaagggacccgacctataagtgtggggtggggccttactgatacccccaatttcaaaagtagagattgaaagacaaatttcggaaatgcttcaagctggaatcataaggtacagccaaagtcatttctcaagtatgaagcaagagaggaatttagcgtttctggtcaaatctaggtctcttgtttgagggcagttttccttttccacatttagaattttagctgtttgggaagttctactccaccaaagttaagattttcacctggctgttcattttgggggaactaaatatccgttatgttctaccatattcatatatctctctaaactggtgtgtacttagtctgatgtaaaaaaacctggtgtgtacttagtgaaatggaatgtgaatctattaatcacgtcgttttgcattgctttacagtcggcagcaacagaacctttgtacaagtttcttactgacttcgatgtgtcttgggtttggccttgttaatgcacgactgtgctacagttagatgttgggtttaatggtagaagggtctttgcagaatgtgctcgtatggtggtctttgtggctggaaaggagtattagtgtttttgaagatcgagaagggagtttagactttatgggatggaggcaagtattgagtggctttgtgggttgtttttttatttttaatgaacaggctctatgggtgtttgataataaagatttgtcttcttctgatttacttaggaattggtgtacttggctgtaaatttaagttaataacttatcaccacttataattaaaggttgttttgtttcaaaataaatacttgaactctcgtttcagccacaagtgatggtattaataacttagcggggggaggtcggtttaagacaagcgacctctctctctttttccaaaaaaaaatacgtagcaatttcttgaaacaattcacttcaattgagaaacaaaaggaattttgaattcttttatagacaaattatgaacaataaaggtaaaacaagtagggaacaagatgcttctggaagtcttaaccctcaaacttaaaagtaataatcactcaaagctaaggaatccaaaagtacctgaccaataataattatataaaattaatcatagtttttttgtgcatcactgttccgaaaatgggtttagtacacatggtttttttattgtgcaaaatggtccttgttttccctgtttctggatgagatatagtgatcttttgtagtgggcaagggtagcaaatgatttatttggaaatatcttatttgttttttctgtttgtaatctaacatcacaggatcaacttcctgaagctcgtgttgtttactgctcagctactggtgcttctgagccacgtaatatgggttatatggtccgtcttggtctttggggagctggaacatctttccttgatttcaaagactttttaggtgcaaattttgcttaacttgcctgctcttttttttccctccatagaactgtcacattatttcttatttttcatggagtaactacgtcatgaaagctttgtatcattttgattgtgtttgtgaactaactctttcaaaccggatggtccaacatagctgaaatgttacattccacaaatttgatagtttatatattggtggtttagttgccggtccttttcttcactatacttcttaatgaagtagatttgtaactaaaatgatgatcattgttttggttatgctgttgttgggctcactattattgtcagcattattgtgaatattactagtgcagttcttttgctcttccataagggggtctctttgcgtttttatgtttccttcctttcctgtgcagtaaacatttgaagtttcattgagtaagttttctgatgaaggatttccatcagaacttctaagttatattaatttataaaacatagaggttatagaattatggacatttagagaagaatgtatggttcaatacattaggtgtaacattcatccatctttagttatacagtcatttgttctgtaccttcacttcagaagtggacatgatactttgatactagtctatttaagtgtgatacttcttgatccttgcttgtgcttgtatgagaagtcatacatgcatatttctgaacaattacgagagaccatatatttgtatgtatgagttgttactttgcagtagctgtgcaatttgtttcattgcactgttttcttctttcaccattttatcaaaattttctcctcttttcaacattttatcttactatccgtgatcatcattgcaggtgctcttgagaaaggaggtgttggagcacttgaacttgttgccatggatatgaaagcaaggttataaggcataaaatactatgttctaagatataaactacgagatgtctagaaatgtcatttcattgtatttcaggggaatgtatgtgtgtcgcacacttagctacaaaggggcagagtttgaagttgttgaagcaccgctagaagcggctatgatggtaagcacagtcatattcttgaaagtaatggccttagtgatagatttgtattttataaaatagaaacggaaagaacaaataaatgtatcaaacaaaaggatataattgaaatatatgctatgtttttttggtatgtgtatatgtgaggcatgcatctatttcttttgtttgttaaatgttttctttagtgtctttggtgcaattataagctttcttgggtcatgttcctaaaatgtgctatatctgatccaggagcttgttgtctctcattgataaagagatttttttgtataaatgttatagatgcagtcttgttatgatcttcagggaaaaggtttgaggacaattgattatttgcttatttcataatttcctatacttcacacaattgaactagttgttcttatgaattcaatatagtgatattataaatttttccatgtatctgacaaacacatcgtccttttaattggtgattagcaccaagcatttaataaatgtgcttttgttaacctatcttacatgcttatatctgtaggagatgtataaaagagcagcagaattctgggctgagttacgagtagaaatactgacagcacttagtgcctatgaaaatgagaagcctaactctagccaagtatggcggctttattgggccagtcatcaggtaaatctttttatttattcctttcattactggtaaattttttttgagtgttgctgctgagtgatataaaattttgaactttactatatgtaatagacatacctaaattgtccttaaatgcttctttggttcaagaaatttgagaccatgttctatatatttatctctgtagcacatagtctctgaagtttagacaacttctagcagttcttatcttattctctttaacaattacagatactatattgagacaatagggatctagaattgtacttaaacatagtttagggactacaaagataaataaaaaagatttctgattggtcattcttactgtaatcaagacgaatcttttctctgtattagatcgtgaataacttactaagttgtaatttggatgatatcgtattatcatttaatactaacagcaagtgttggttataaatgatgatgataaaaaaaaacaatagaaataaaagttcagcaattttacaactgttaaacacaaagtttggggaactacatatccatttaagtttttttttttttatttgttttgtttatttattattaactttggaatagtttaaatttatttgtcctttttgttttgggtagcgtttcttcagacacatgtgtatgtccgctaaggtgcctgctgctgtaagattagctcagcaagcattgcgtgaagataagtgtgtggttattggccttcagagtactggggaggcgagaaccgaggaagctgttacaaaatatgtgggtagatgttcttttgtgctatctggcatgtgacttcttactgaaaattgtatttggtgtacttttaattttctgaattaaatgcttcatgtgaatttgattttctagggacttgagcttgatgactttatttctggacctcgagaactgttgctgaaatttgttgacgaaaactacccattgcctgaaaaacctgaacctctccaaggtgtgtgtgtggttcttataacgttcttgaactttttccactttctttaatatttactttattaacttgctacaggggaagatagtgtaaaggagcttcagagaaagaggcactcagcaactcctggtgtttctatgaaaggaagagtgagaaaaattgcaagatggaaacctgcaagtgacgttgaaagtgatgaagaatctgattgtgagttttctgaaacagcattgtttctcggacatcattttagatctttaaatgtatttatcattgtatattattgcaaaattgtacattgtttcctttttcttctttcccattatgattgtgatcattcaagtgctgttctgtagttcccttaacataaattcccacatttctgtgttgtttgataggactttttctttgagaccttctggtggtattcacattttgtcaacacagtataattattgtttttcagctctaaatttttggtttgatcaatgcagctgattctggtcatgagtctactgaatcagatgatgagttccaaatatgtgagatatgtagttctgaagaggtaaatttattttttgggtatccgatgcctttgttttttgttcattaatgaaatgttttcttttttcttccttataaagtctttgaagcgataagcgtttaatcttttgcattattattcgtgattgcattctttgctgcaggaaaaaaagaaattgcttcagtgctctagctgtggacagcttgtccatcctgcatgtcttgttcctccaatgacagatttagtctcaggagattggtcatgttattcctgcaacatcaaaaccgaggaatatcttcgaagaagacacgcatatgtaacagaacttttaaagaggttcacacattttaaaagttccatcacatgtggtattgtgacattgcagtcttttccaactgttatttctataagagaattaacacaaggcttgtaatattgatgttaggtatgaagcagctttggagcgtaaatcaaaaattttggaaattattcgatctatgaatcttccaaacaatcctttagatgacattattgatcaggtatctcttctctctctctctctctnnnnnnnnnnctctctctctctctctcttattgataatttctttaagacagcatagcattgaatttaatttatcactaatcatatagggacttttatcttgtgaaaaattaactaacgttgttccttttctgaattttctagatgctcatgaccttatgtactaactgcagattgaagaaattgtgctcatatttcagattagtttgttagattagtgttgtgaaatgtatagtatatcagacatcagagcgcttgggaagataaaacatagcattgtacactaatgtgacagggttttcaactgcagaactttgaattgtttgatcccactttgtgacaagattacaattagtgcatattaatttcattcctcttcatttgatttaaaaagttggtttcttttgcaattgtagccatcctttgaaaaacctagtagcttatgttgtttgtgtgtttcttttgcacaagctcttacctttaaatcatgcttgttgatactttctcttttatggtattgatttttttacaaaacactttagttgtaatatgagtgtcaatttataattataattatacttcatctggattcttatcctgaaaaagaaagaaaatttgtactataaaagattgcatccttagatgtctgttttgtaattgcttgtcagttattgttgctgactcgtctactttgaatagctttacttttgaagctcactgggaatactcacagtgctgctttcttacactaccaaatttttacctaactgtgttcttagattggagtccttgtttaaattttgataagccccagctccaatttgtttatcaaaggaaaaggttctgataagtttgtttaggcttataaaattctagtttattatttgtacagttgtcaatcttttatttgttattaggctgttttgtattagttggctgagttagttgctgatgtggcaattattctaaagtataaaaggataggagatagagagggagtggagaaaattgttaagagttgagactcactgtcgagagccccaatcctctcgaaagattggaataggagagaacaagcctctcgaaagcttgtgatttgtatcttgtccatcaattcaaaaaagtttgtgaggaatttcagttacttattgtgtaattaaaaaagtttattctctataacagaaaacttttcaaatttacttggttttaagaatattttggatgttaggaagttgataagctttttattacagtgattgtttgtaggctggtgtgagtgggctggctttttttgccttgctggttttgtatttgttggttgattaatgaaatctattatttgataaaaaaaaaagaatatgaatgattttcttctctcttttgctgctagtaaattggtggcaatgataagatatcttgcactcccatacaaaatcctcttgtaatcaattttcatattaataatacaagcactgatgttttgattcagaagatgaataatattaaacagaaaatatgaatacgaagtacttagaggagcaggcctaagtaccagacactatctaaaaatccacagaatttattaaatgtgtgcattaacagagcatactattgactgacttctctgatctctagtttgttctgctcaaatcatgagtagtatttgtgtttttatattgattactatcctagtttgatcacttgttttacatggcagcttgggggtcctgataacgtggcagaaatgactggtaggcgtggcatgcttgtgagggcctctaatgggaaaggtgtaacttatcaggcacgaaacacgtgagttataggataagtgtttttctgtattatgactttatttaaaatgtttaaagcagtaatgttcttttatttttggttccttttctttagaaaagatgtttccatggaaatggtgaacatgcatgagaagaagctttttatggatggtaagaagtttgttgctgtaatatctgaggctgggtcagcaggtgtttcactgcaagcagatagaagagtcctgaatcaggtattttaaatgcttggacctctgtttggccaaatattcaggaattggcaatgtatatgtggtgttaagatatgtagttcttcacaccatttgtctttgcttattgtctgggcttattatttgcataacagaaaagaagagtgcatttgacattagagcttccatggagtgctgaccgtgcaatccaacagtttggaagaactcatcgatcaaatcaagcatcagcccctcaatacaggtgggtacaggataattatgctagatacgtatttatgatttgaaactaagcagactgatctaaaacaaattccctttgtgaatctgacaaaaagcagtctggaagtatcggttatgatttagtttagttggctcttagtgatcttttagaatcagttaccttattgtccaatttgtttggaaggttattttttcatcattgctttcactaaaatttgaagaaagtagtgcaggttgagacaaatatgtaaatggtgaagtttcttaatcgttaaaaaaaaaattaagttggcaaattagttccttgaactcatgttttgtttcctttgctaccttataggctactttttactaaccttgggggagagcgccggtttgcatctattgttgccaagagattacaatctcttggagccttaacacaaggagaccgcaggttagctcatttgtttcctgtatttcagttttgtggttgagctttatgaattagacatgtaaagtcgttttaacatgtgaaatctctgctctactctttcgcactgggtggttaaatgcattgcagggcaggaccatctttgagtgcctacaattatgatagtgcttttggaaagaaggccctggtgatgatgtataaaggaatcatgggacaggtttatgttgagacttcttgcagataatatgtaaatacaaagctggtagtttcttcagctaatttaagtaagttttgtttctaggaaaatttgccagttgtgccgcctgggtgttcatctgaaaataaggatgcaattcaagacttcattgtaaaggcacaagctgctcttatggcagttggaatagttagggacggtactgtaggtatttatttttataattgaagtgcaaatttcctttgttaacttctacaggctatataatttttcctgaattcataacatatttaatataacatatttaatatgaattctgtaagttatctcatacgtactggtgttacagctaatgggaagtatggaggccgtatagttgaatctgacatgcatgatgttggtcgttttctcaatcgtatattaggactggcacctgagattcaaaataggtgtgtaacatgatttgagcaattcttttactgcagtgggaattgtgctaattatgcttaaaccattatacaggctgtttgagctctttgtaagcattttggatcttcttgttcaaaatgctcgaattgagggaagtcttgactcagggattgttgatatgaaagctaacattgtggaactacaaggaaaaccaaaggtcaacttttcgttgtctttctattatacccttatctatatattttttgtaagtaagactatcacaataaagtgtgattatttcccccttttatacatttgtttgaaatgagtaattttctaaacgaaaaagtgaaaatgcacagcgatttcagaggttactgctggattaccacaatttatgtgcttatatggtattgtaaatgagagaaaggaaagtgttatcataatgatatcctaattgtagacacacacaaacacacgctcaaggaagggccacccaccaatgtttctctttgatcataagttcttatttgaaattaggctcccccacctaaccttacaatatttgaggattaagaaactgttgcaattgctatgtgggttccaaagggggacttgaacctcagatattgtctttttcttttctatttgtatttccacccgcaacactttcaggaattgtctcatttatttatttgaaaataccttcttctaatatttagtctctgtattgtttcatttaatgccgttgctgtttttttttattcacaactatttgttctctcttgtaagttattgtttatgtaaaatgagaaaagaaaactgaagaaaaggacatctctgaaaactttgtaatacatccgaaggggagttgtaacttgtaactaaacttcctacatctgaaattcagttgcttgctttattaatgacttataattgcttagcagactgtccatgttgaccaaatctctaaggcgtctactgtgctctttacatttactttggatcgagggatcacgtgggaggtatttgtatatttgggtttgactttctgaataacatgtttacattaatttacgacctataatttttcaattattaactttaatagtctgcaagtaccttgctcgaagaaaaacaaaaggatgggcttggctcaagccatgatagtttctatgagtcgaaacgagaatggatgggcaaacgtcacttcattttggcatttgaaaggtacatatcttaaattttatatacttttctatgttttgacttcattcttctgccaaattgccaatgatatttcttatgtccaaccctcaagtattatcgattatttcgatagtccttacatttctatgtttctaagtctagatttgcaatttcaggaatctccacttgtataaattatttaatgcctatttatagatcctaaatagaggtccttaccgtctacacttttttttattattttttttatttgttactatactctttactatattttatttctcgttatggataacatgagtcaagatgcgttaattccattgttcgtgggagtatcctgctggattttttcagttaaaataattcccctatcaattatgtttcagttctacagggatgtacaagatagttcgtcctgctgttggagagtcagtacggtatgaagctgcaaatgactgacaccatatgagacgttttcagtgtgtactctctttgacccccttcagattttattgtgcagggaaatgtctttggcagagttgagaagcaaatacagaaaagcttcttctttagagaaggctcgccgtggctgggaatccgaatatgaagcttcattgaaacaggtatagattcttgaggaggctaattaaaaacggtgaaagttgagaaagattgaattggaagagaaaatttactcatttaattgattctaaactgtacaaccataataggaaagaaaacataggtccattagagagatggggagatctataataaacactaaacactcattcctaattatatagaaagcagttgagtagtcctgtttgtaaagttattgcagaattattctgcacaagttgatgtagtttgacaatcagattagagaagatttcatccgtcaacataactgtttctcctatttgagaacaaagaaaataaaatacatcctgccaacttttggtccaaataactggtctgccggattgagtaaatttctgtgctcagaagtatgtgtattggagggtgaaaattctatgttcttacatgattacattgttatttcagaaatatatcacatcctggttaatttttgaaattaaagctgttgaaactgtaacatcagaattatactctgaatcttctgtagttatcattttttcttttgtgtctactatttaaatccttctgaactgccatgccactgttttgtatttttcagttattgcaaaaaaactactcttgtttgtgattcttgttctacaataattttatcatacatcttatttattgattatttgtgttaacatctgttacctttaatgcagtgcatgcatggtccaaaatgtaagctaggaaacttctgttcggttggtagaagaatacaagaagttaacattttaggcggcctcattctgcccgtctggggcacaattgagaaagccctttctaagcaggtaatctgttctcatttgctcaattgattttattatgttaaagaaaccggaagcttgccatatccaatgatataattatcatctacaaaagaaacaaaagaaaatataattatcgtctaccattgtttatcccatcccataattagtatatatcaatgatgagataaataatttaagttttatatatttcttttatcttttttttttttcaaaaaaaaaaaatgattgttggcacttgctcattttttacctcttgtttttcttaattcaatccaatccaatcaatacttctatatctggctcaccaaagatgtctaaaggaatatcggctcacaccttaactaagtatgctttatcggctactgttagcaagatttggtggtccggtcatcctatttgtattctaacttttattttgcatgatgcaaattttgaatgaataaaaaaagatgtctaaaggaacaatattgtcatttaatggtcagtggaaataaaagggaaattgcagaataatgtcatttgtggatctttgtagtccattacgtaattagcttcagcataaaaggggataaagcagttctttaggaaatcctgattgaattcttgattgcttagccactggaattcttgttgtttatttcatatattggaaattatattttcagtagtttttgggcaaagattgtacattcatcaagactaattctatttcccttcactctcaagtataaatgtacatctagacattagtatatgattttcattgctgggaattcttcttttatatctcgtctactttggctgattcatcattgtattatttgttccttacaggcccgtcaaagccacaagcggcttcgagttgtgcggatagaaactactacagatagccagcgcattgttggattacttgttcctaatgcagcagttgaaacagtactccaaggtctctctctctctctctctctctctctctctctgctgttttgaacttgttatcactaacatatttgcaactgtaaccactcccaagtgatctctgagtaagagttaatgcaaaatgttttcccaactgtgttagaaaatgttatatgagatatttggcattattttacagttcttgaaataaagtttaaagcaaaatgagttttcctttgatttgtgcatgcactaagtttggtatttccttgcaggcttagcttgggttcaggatgttgatgattgatgccaattactaatcagatgataactatcaagattattttgatgcttcttctagtttctgaagaattttatgttaataaaattaaggagaacaaaaaaaaaaaaaaactaggtgtcgtcgtcttccatgcgaaagagatggtctcacgaagtatttctgcaacctcgaatgacaactgtgcagtctcattcttattaattttggcttgattttttggccttgtaattttgtcaaatgctacagacaaaatgtctcacgaatatgctaatagttttgtaactgacagtacaatttttaatgaaaatgatagatgaaatataaaatttcatttttttgtgcaaaggttcaactgtccaaaatccaaaagattacagcaataacacgcccaacaaactcattgattcaagcaaccatttcaatctcttatttcctattaccataaaaacacttgagataggattgaaaagatcagcacacaaaagtagcatcaacatgatggtcactgcaatagagaccaggctgctgagtaaagccttgactcttaagctttttcctagccttcataacaagctcctggtacgaaacatcaccgtctgtctcagcaaggattatctggattgcattgctgagagctccataagcttcagcagcattcccgcccggagcagcatcagcagaagtttggtgtgtttggcatccactaatcaagatcccgccatcaggaagtgccctcttgcttgatcctgcataaacctcttctttgctgccaacctttgtctccattgcaggctttgcataatcttcatcgtcctcgagtttatgcttgaggaactcctgtgccaaacttcccaccatcccaagcaaaccgctactgccttctccaccctcctctccctgaccactgtggttgagtttgttcagaatgaccttcatgaacttcttaaccttggggctggcatcttcaccaaagacatcaaaaagggttggcctcactttcccaacatcaatgtcttctttaccagtctgctgcttaagcatttcgatgtaagtggagacagaaagagacctactcttcaccttgattccatctatctcaaactctctctcttgaacatcttcatcttcatcatcattgtcacgaccatggtggcgcagtttcgacgggacatggaatcccctagactcgattgcgtcctcaacttttcgatgaaagaagctcttgaatcccccgaacgaggaagatgattctgaatcatcgtcatctttctttgtgctctccccaatttgctccttagcttcgtcaatgagcccaccactatggcaagaatcagacacaattgtcaaccgacaaccatccggaatttggtcaacgaaatctctgaagtcgtcatctgttgttaaaattcacaatcaaacaatcaacaaagccaatcaaaccatgtaaattatctaaaaagatcagaatctattcgattcgatattcttcttccatccaaaaagatccgatcaacttctctatcacatcaaaatccaatacagtaaaaataccgaaagaaaaagcaaataaatgaaataccagtaatgagattcatgtcacaaggaactatgcactcatcatagcctgtatcatcgtcctcgccagtctcggcagggagacgagtaccgtggccactgtagtgaacgaagaggaaatccccagggcttccggatcggatgagacgagagagagcggcgcggatgttcttgcctgtgggttgagtgtaagagtcatcggtatcgatgagtacagtaatgtcatcctcactgaatccataccgatcaatcaagcatgtgtacatccttttgacatcgtttatacatcctctcaattctgccttcgttcctgggtaattgcaaccgatcaacaatgccttcttcgccatttttgctttcttttgtgatctctgttcctaaaaagctaagcttaagattgctattggtctctttatatctgttgctgtcaaaggtttattttttttatttatttttatttttagtttatattattacattatttttgtttctagttgtatcgtatgtgtggacaacgtgttgtgttactaccgaaccgagtaaaggcattaaagtgggtttgtttgatatataatcttatattaaattgtattttacaccatatttttatataaaattatagggttttttttttttttaattttttatttttacactaatttttttttttttttt

SEQ ID NO: 15010 - DNA, 3659 bp, Cannabis sativa
atatattttttattcagttaatttattttatgtattttatgtagatatgaaatatataaagaaaagataataacaaaaaattgaaaaaaacaggagtttagctaagaaataaatcttagctatgtagagatacataatttattatgagctaaatattgaaatattgtacctcgtctattaaagtgttattttaagaggtttaagttataatttagttttgtagctgatatatctcttatatagtaacaaagttgagagcatcttcaatcatattctttagacacattttgtagctaaaataagaagtgagatttaaaaaaattaagctctaatagtatacaaaaaatgactccataataaagaatgattagggagtttttagggaagctctctactaattttttttgctaaatttttttgaatataatacaaagcactattgcttttttattatttattaacttaatttatatatatttaacaaatttaaattataaagtattactaaaatgatcaaatatatagtatcattcaaaaaaaataatgatcaaatagtaactaaaataaaaaaacatgattggaaccaaaaaatacctaatgaaaaatagctctatatattttaacttttgaattatattagctaaaatttagctaaaaaataaaatgttttggagatgatgctctaatatagtagcgataaattcctagatcaaaatataaatagagtttgaattgtacatgacctaaggactctagatcaagaaactaattaagaactttagtttataggccttggctagcttctgcatcttcttctaaaaattaaataaaaaagagattatttttatattataaatgcatagattgcaacaaagaaagaaataaaaactctattatacctttgggtcgctcaaagtttagaggccgttcgcataaagatattttattccaaaaagttatttttatagttgtttaatattacaagccacaccgttggatgcagaactcatcgcaaccgtagattaaagcgatttgtcttcaacaatagcttataaatatatatagagacacgattttttcccgttatgtactttcacggaatgtactccatgatgtacgacagttagatgggagaattatttgatctgagggctagggttgatttatgggtaattagggttaaaaatagtaacatatacctgagacctatctaatataccatgagactcataatgtaccacaaaatacattcctcaatatttgagattggttggtgcgtgggtaaaatacgtatatataaagttataaatacatgtctttataatatatacataatgaataatggtcgtagtgtagggagactatgaccaatgacctactcgtgtgcctaggctagcttttgcatagcagaatatgtgtctctagattcactatatatagccactactagtagtactatagatggccgtcaaccactttgtaagaatatgtaatagactagaaaattacgaatttttttattgacttcattcacaaaaataagaaataaatataaaagaaaaaggcaaataaccaagaaagatgatcgtacctgtacctaaagttaaagttatatatatatatatttatttatataaactactttttggatggaaacacagctaagctaacatgaatcatgatgtttcccttttatcctctctttttctcctccttttttccctttaattttagggaacgagctttataattgaataaaaatcctactgtaattataaaagaaaaaaaaaataattaaatccaatgtaaaaaacattacacttaagtatatattttatacgtacaatggttttaatgcattcttttataatttatatgttatcattataaaattgattattaaaaaattgtgtgatgtacctattattgatttcggccataagtagaagaagtgttcttgacacactgctttgtctctttcctttctttcttttcgtacaatattgtctatattgtactctactacacctgcatgtattgtatattagccaagccaagaacatcaatataatattttctgacaacatttgatccctagtatttgcgaaactcaaaatatattatattaatatataaattgaaagcttcttttaatctctctctctatatatccttatctgcaatcatatattttgttagaacaaaaaatggtgcgcacatgatagaaccccacgttatggatttcccttatcttataaaatgaatatatatatatatatatggtagtagctaggaacattcctaaacccttgttcatatatacttctttgtacagaacaaggcacacccgtgacataaaagagagtgttggaaagtattttcttaatagaagatcctctctctctctcttctggaaaaaagcctctttcttacccaaatattatttgttataaaataattaacattatgttaataaaggaatacacatatattggagacattaatttaaaacaaagtctacagattaaaaaaattatgtgccacacaatgcaatcttttcattaacttaattgagtgtgattaacaaaaatctcatcgtcatgataataatgttgttattgaattttttttggtcaaagtattgactcaaagtatgcatatgttaggattttaagaaaaagaaagaatatctagtgtatttcttttttaataatgaaataagtatgtagtgtatgttagtgacaaattgtcatgattataagtattttatttgtataatttattaattataattatatttaaatgccacttctttttgacagaaaaatattgtgcataaatacaaattttctttttttccctttcaaaaaaaatataataatttttttttcttctttgctatgtattgaaatcaatatatactaagattaatctatttgaatgcacggttccttaagattcctctgtgtactgggggaccacatttccccatataataagtaaatagtgatacttttcaagaagacactttctatatctcgaccttttttttttatatataattttattttatttaatttttatatttctcaaagctagttcgtattcatgagaattgagtttttttttatggctagaacatgagtacttttaactcataaatacacaataatattttgttgaatgttttgggaatggggtgagatagggactcttaatattattgcttaataataatttctaataatttggctttattgatctactcactctttcgggcctggcatataataataataaattaagtttgttttttttttatgtgtaacaataacatgactacgatgtattttattttttgtttttaaagatttttttttgaaaccctttttaaagagattgatatacatgaggtgtaatgtcagaccatttaaaattattaataattgaagagaaatttctttaaaaaagataataataattgaagagaaattttatttgccatatttaaaaaaccacccaattattaaaaaatactccctaaatatatgttataccatttaatcctactaatttctacacttatccaaattaccctccttatttcaaaaagactcaaaaaataaaaatactctgatgcaactaggaaatccaaacgt

SEQ ID NO: 15011 - DNA, 4444 bp, Cannabis sativa
ttgaatcaccttatcacaggccctgccatttgctcgcttatttttgttcggatctcaggcgtctttgcaccatctggatgccgtgcggctggctaaccatctggataggtgtgaatctaaagtccgctaaggatatggctctgataccatgttgagaatcatggggttccatctcaaaactaattggcaatgagtggagtagcccatgttctttatatatggctcaatacttttacatttactccatgtgggacaatgttctccaatatacagtagaagctagaacagtactcaagtgatcactcaccaccataccaaggccactacaagtacaatttttatcaatagcagcatcactattaaccttgatagaactagccaaaggacgagaccatttcgaactaatctcattagaaggtaaagagtttgtttgtccctgaaagagaggaggcccagccggagcctgactatgttggaagttctaaagaaattcttgagcccaatgcaccaccacgtcaggagggagtttaatgttattatgcaccattttatttcttttgaaccagatatgccacaaaataaccataactaattcaattttatccttagacaaagaatcaatgacattgtgaataaagctaagaaaatccgtatgagtggaaagagggttacccaaatcaaaattacaaagctccagagtcaaaaagctccttaccccataaaatattttcctatataaaagagccttcttgtttggatcgatctatatcactaaagtttcgattcctaccttttagaacccaagcggccaaagaagtgggaacattgtagattcttgccgcttgtttagcaagaagagtttggttaaataaatgtaaatctcaaaaattcatgccactatcttctttatggaggcacaatttatcccaagtatactagtgcatttcttttattcacattattccttccccccaacaaaaaacgaacagacatgaacattcttgataaaacttttagaaagtttaaacaagttcatagtgattgataaatttatctctgatggacctctacattattcaacgaatgaatatattatactaatccaattaacgaaggaaaaattggaaaccgaaaataccgcaaccgttttatcctaatatcattatcaattaaatatcctaaattatgtttcaaatagttaaataatatatagaagtatcattgtatctataagattcaaaatgctgatattctcctaaaattatttctgaactcctttcatgctcatcttccttttaaatggtaagttagtaagttacatcatccggtttatatttcctttctattgaatgttgctttgtttattatcatttatttcctaaaaatactaaagaaagaaaatgaagaatatctgtgattgtttcctgcggactatactatttctgtgagatgggaaccaaattaaaaagattcccaacaaagaaaaataacttttgagtgaaaagatctttctcttagaaattagtaatgtttgatttcaaaaaaataaataattagtaatgaatattaccacattaaaacttttttaataagcaaattttcaaaaaaaaaaaacttttttaataagcaagttctcaatgtttatacttgagaatttgatatcattcaaatcccataattagtgtgtttaaatatgtattgttaattaatagtgtgaaagcaaaacaataagtcaaaaccttaatcctaattttatattatagagacccaaagaaacaactcaccgtgactgatttccatatgggtataattaatagttcacacacacgatattaattggtatatttatcctaattttatgtgttgttttttaaagttgtaaaaagctgtggtcgaaggaagcataatagtcatggccaaccttggtgataatgcacctccggggaggcttgaggtttgtgatttcatcatattttccttttcttggattttaatgaagcaaagggtatatttgctaatgggaatttctgaattctgatacatatatgttttttcctatcaaaggggaggtatgctgccatggtagtatgctggcttctgggaaatggttgcctattttcatggaacagtatgctaactattggagattattatggttatttgttcccggtaaagcaaaattatttcccctctttccaatttctcacttgctatggctatctgcatgttgaaacattcacatggtttagatgttttacctatacaattacttcatacaaaaataatcttacacaatcatgttttggatttaattcattatgatatacatctaatttagttggcatatataggaactgatactacttatttactactaagaattttttcaattttcttagtactagagagagggattagaattataaaatgcgggtattgagtagactatttcattgaattttatacatatgaaggattagaaattaaacctgtgatacattctgcgttgaaactatgatattttcatgtataagtcaagctcatgtgattgttcgagtgattaaatttagctccaatgacattcaaatcaatctatggattcctttcatctgatatacattctattgagttataaattcaagtttaactttttgatgcagcgataccactctgcaagagtacttactttggtataccagccatttgcgcttggaacactagcagtactcgcctataatgaggcaaaccttaatactagaaggcggaacctgttgggatacatactctttttcatagcttctgctatggttttggtcgtaagtgtgtttttgttactatatctaattctaatgtaatccaatgaactaacaactcattgtgatcaagtcctagtaatctgatcccttattaaacttgatgttttgccatttatatagttggatttggcaacatcagggagaggggggcttgggacgtttattggaatttgtgtcgttagtggtgccttcggagttgcagatgctcatgttcagggtggaatggtcggagacctttccttcatgcagcctgagtttattcaagttggtttctactcttcttagcatattttagagctctagtttcttttgttgttttagtttctgcttctgaattccttaaacgcttctcttgtttttgaaatttgctcagtctttccttgctggtttggctgcatcaggggctctaacctctgccttgaggttaattacaaaggctgcttttgagaattcgaagaacggtcttcgtaaaggagcaagtatgtttatctctcctgattgttgttttgaactcttactgctttcagttgaggtcttaacaactaacacctttctaccattacacgcatattgttatgcattagtatttctgaaagatatagcttagagataaaataattattagttaaagtgaatatcatgctttgttatactttctcctcgtcttaccaaatggaaagttatgccaaattctcttacacacaatttgtcatacctgttagcaaatttgttgtatttaacataaaagttgcatcatttgttgtgcttaaaatctttgttttctaatactagttgtgtttcacaatccactgcagttttattctttgtcatctcagctgcttttgagtttctctgtgtacttctctatgcgtttgtctttccaaaactgccgatcatcaagtattaccgctcaaaggcagcctccgaaggatctaaaactgtttctgctgatcttgccgccggtggcatccaaacattacccgaaggagtatgttactttcatcaatatatttttaaaggaaaaaaaaggctatagccatttcataacctgagcaagattctataatcttgtgcaggatgaggaagacccgaaaagactagagcggttggggaacaaagaattgttacttgagaacatagattatgcaattgatatgttcctcatatatgtactgacattgtcaatttttcctggctttttatctgaagatacaggctcacatagtttgggtacatggtaatgtgctcttttcattcatattcaacctggactaaattagtgttaaattgataagcctaataatattatcatatggtgaaaatattaggtatgcccttgttttgattgctatgtacaatgtatgggatcttattggaagatacattccactcatcaagttcctgaagttggagtcgaggaaaggactcatgatagccattctttctcgtttcttgctcatcccagctttctatttcactgctcaatatggtgaccaaggctggatgataatgctcacttccttcttgggtttaacaaatggttacctcactgtttgtgtcttcacttctgctcctaaaggttacaaggttagattagttctcagttgaacataatacttacaaacttg

SEQ ID NO: 15012 - DNA, 6126 bp, Cannabis sativa
tctcaattcctaaaactgctcgtgaagccatatctcattctggttgacttgctgcaatgatagaataaatgccttaaatacaaatggtacttgtgacttggttgattttccttcaggaaaacaagtcatagggtgcaaacaggtattcacagttaaggtcaatatagacaaatcaattgctcgattaaaggcttgtcttgttgctaagggtcatgcttaaacttatggaatggactattgtgatactctttcttctgttattaaactaacatttgtttgactatttatttccatggcaactaaaatcattggtcattgcatcagcttgatattaaaaatatttttcttcatggcgatctttaggaaaaggtgtatatggagcaaccctctaggtttgttgctcagagggagttaaagcgagtttgtcgtctgacaaatatttatatggtttgaaacaaagtcctcgagcttggtttagtaaatttagttaagttgttgagcaatttggcatgttgaaaagtaagtccgaccattctgtattctataaaagatcaattgtcggtgtattttgttggttgtgtatgtggatgacattgttattactaaaagcgatactaggggcatttcttcccttaaatctttcattcatgcccaatttcacacacaggatttggaagtgctcaagtatttcataggagttgaagtcacttgaggtaacaaagaatttttctatctcaaatgaagtatgtacttgatttgttaactaagacaaaaattgggagcaaaaccttatagtactccaatgaatccagttgtgcaccgtggggaatcatttgaagatcctaagaaattttgcatattggttggaaagttgaattatctaactcgtccagacattacattcacagttagtgttgttagtcagtttatgtcatctccaacaattcatcattaggtagcattattttagaagaaatttgttagacagggaaatcccaagtctaatggatctagtgcagcgcttggaacacgtgaatttggcccactcctcaatcaaccgtaggtgttggaagccagaatatggaggctctttctcttgcaaatctgccttccattggcttacctcaagtcacggctcaagagacttagtttggactaaaactttttggaaatgttgtgtaccggttaaagtaaaagtttttggttggttggtggctctaaggaaagcaaatgtccacgaggtgctacaaaagagaagaccattcatggccttatctctgagttggtgtatctgttgcaaagccagttatgaaacgatcgaacatttgttcctagaatgcacatatactcaaaaaatttggtcattactattcaaagaacttagccagcactgggtactaccttgtttggtgtcacaagtcatactaagtaaaccgatgggaagcaaaaggagagttaagctttggaggacggcaattttagcattactatgggttgtgtggaacgagagaaatagcagaactttcgaaggggtggagaaatcagcagaccttgtttaagagagaattaaattttggacagccacttgggtctttaaaaccaaacattttgaggttttttcttttctagacttaagcagagaatggagtgttatgctgtaaaattctgggatcctttggttttgatgggtcactcatagttgtattacactgtaactgttttaaatcctgtataccacggttttcctccgccataagtgaggctttaatctttgcaagggagacctgttaagtggtctcctcctccttttcaaaaaaaaaaaatcattaggtagcattagggcaaattttttgtacttgaaagaaacacaggacgaggtattgtttacaaggattatgagcacacccagatcccaggttgagtgtttctcagatgcagattgaacaggttccaaggtagaaagaaattccacttcaagttattgtgtctttgttggggcaatctagtctcttggaagagtaagaagcagaatattgtgtctaaatccaatgcagaataagaatatagagctatggcacagtcagtgtgtgagatagtgtagatttatcagattgcttttgactgaagtcggatttaaaacttcagtaccagcaaaattgtgtgataatcaagttgcttttcatattgcctcaaatcccgtattccatgagcgaactaagcacattgtgattgattgtcattttgttcataaaaaaattcaacaagattttatctccacaggatatgtgaaggttggaaaacaattagtggacatcttcacaaaggttttgaatggggagcgagttgattttgtaacaagttgggcatgattaaaatttatgctctagcttaaggggaagtgttagaatttattagctagatattagttgtaaatgaattaattacttagttttcgattctctttcctagtttcttagtttagactccctaatcttgtctaaatacatattatttgcttaaataaaagatgtaaaatcattcaccattttctactcaatacaattcacatagatggtgtgatgtgctatgtgaaaaaatagtattgaactagcaaccatatctatgtacactaccattcattggaatccaaatttctttttcataaaaaataatgttacagaaatttaatctatattgggttggcactggcaggctggttgccaagatttaatgcacccaaatggatggcctccatctggtttactttcggtttgtagtaaacgaagcttatcttattgtaaccacagttttcctttgccataagtgagggtttcatatttatatcagggagaggtcagtctaagacaagtggcctctttctctttttcaaaacaaaatgcacccaaatggatggactaggtggttttaagggtgccattatctacaaagattacgtaaaatttatacatagatattcttttcttttctatacatgagaatgcattttatgcaaatgattcatgattccacgtattaatttaattattatttctaaaaattctttgtaagcaataaaaagttatagaagattaacttgattatttgcaaaaattacctttgtgtcgatgttatcgatgcagtccaaaacaaaatcagggtggccggaaagaatttcgtcttctgatgatgaatcatacagcatgactttggcctctatgtggcattcaggaaagattgacaaaaaatgctctttgagacacgaggcttttggagtaccaacatctgatcttgttgcaacagcatgtctatttaatgatgaaagagataccttcacacaatcattagctaagtatcacaaatttattttaattcttaaagaaaggaagtaaaaaaattccttaggcttgaaagaaaacaaaggtaacaaggtaacccttctactcatttacgaatttgtttcacttttttataataaaatagatttcctaatattttgaatatggattctcatttttgaatggggaaaataagaactaccttcgattgaataatacaaacgatttctcttttatttatggtatattatactatttaaatgttaaatatttcttagaccaacataaatttgtagccactacaaatacatgtatagaataaaattctatggtgcgggtaacacttttgtccctattaatagagacatcttcatctttaatacttagaaaaattataactcaaattttattatataactgtatgcattccacttgttttcgaaacattttgaataatttaatgtgccaaaaacaatattcaaacattagttgatgtgtgcttctttttttttatgcgtgcaattaattgttttgaactctaatttcggtatcgtaaattattcagaatttttcaaaaaaatggatgagatgcatgcgatagagtgtcattaaaaaaaactaggttaaaaaatttccaaatgatgaaaacataaatgaccctaccgatagagacaaaagtgatacccctactatagttgcatcccatatttaatatacataatttgtactcaaaaactattaagtgggaaaaaaatgtatgtccacatttctatcaaatgtcgaagaaatatcaaacaatatctataatgtacaattgatatcatcaaagttttgaaatcaaatattcattctcaaaaattcaacaaaaaatctatatttcaccaatatttcaaatgtctttcatgttgtttagaattataaataaaatcatgtgaggtttgaaaatttgattccaaagacattggaatctctgaaactacccataacaacaatgagaaaacaaacgttctttttcattggcacacttgttgcctaattagcctcatcctaggttcgaacttgggccttaccacatttcccaagccgctgtcagtgtcaccctagaccaacatagtggtttacaaatacatacatttaaaaaaaaaaaatcatgtaatgtgtgtacgtataaaaaaaaattactcagcattttgacactacaaattaagccccacatttggttgagaaaagaaaccaaacaagtaattctaggatatcaaaattcaaagtatttagtaaaactaaaaataaaatactattttaagtgatgtcaccaatgtttactaaagaaaaactaaaaacataggccaaatgtacctggtcaaaatctacaagtaggagtctgccaattccagatcgcaaaagcatagatgcagcatgactccccactcctccaaggccgatgaccacaacatatgatccaataactttgtgttgagactcaagaccaagaaactgaatattcctaagtatacaagaaaacacatacgtgacatttaaaagatgaattttatggcttccatactgaaaaccttcacaaagcaatttgctgtaaggaaacctgctcaattgttcagaaacgatgtcatcacttaaaatgtctgcacaagccattccatgatttgaagttggatcctcaccaactgcatggcatttagtatttgctgaagaaacccaattttcttttagacaaaaaaaaaacaaaacaaaaataaaattacaagaaaagacaatcacaagtagtctataatatgaccaaatcatatgagatgattcacatacaattcaactcaattgcgttttcgctgcgttggattgccacctttctgtaacaatataaagcaaaacatcttggtcactgtgagcgtctaactaaccaattattccagtgcccaaaaaaaaatacataacactaaaacttccaccattttttaggtatagaagataatctgatttctggagtccgaactgaaattccttattctgccaggaaataaaggcataactaagccatgtcatgactcgtgcagatatgtaagaaagtatacataaacataaaatatttgaggaaaaaaattgacaaaacaagaggcacacaattgaattttgaaggttgtaaaagatgtagaatggaaaacaattataatagaatcaatgaataaggaagtgaagtgaatgggagttgccttgaatttatttttatttttttttcttacatgaaagttgccttggatttttgtcggtggtacaaaaaagaataaatagggaattagaatcagtattaagaagctcaattagaaacgaaagtgaatgggagttaccttgacatgagtctgagaagaaacaaggtagaagctgagccaagaagaatacccgcacccatcaatgctaagctcttagctctctcccccatcttcctatgttgcgcaactgggaagtcgcgggtagcagagccgccgaaagttgttgtggtcggaagtcacgacaaagaaagcgaacggcagttagtcggggagaggagtgcagagcaggaatctcgtggtagagaagcagcgggagaatcaggaaaaagcgggaaaaatgaaacgcagaagtggctttttgtgccctaatttccatagccgtacctttcaaatttggaattatttcaaatacaaataaataaaaaaaattacaaaaataaaattgtacgacattttaaatatttttacgatttttatgcttttatttatcgaaaatacagtgtttttat

SEQ ID NO: 15013 - DNA, 5706 bp, Cannabis sativa
  modified_base (5679)..(5679): a, c, t, g, unknown or other
tggctaaaagcgaagtcaacaaatctatatttaaaaatctcgataaacaaacgcatctttaatgaacaaattcaaaaatcatgttttttttctatttttgttataaatttttttaattttaaatacttacacggatttaaaaattagacttttgtttatgtttaatttttatttttataaatttagataaaaaagtacaaaattatttaaattaactagatttaataaatattattcaaaatatttataatatataatttgaatttcataataaatatctaattttaaatatattcagtaaaatttcataatataaatactttaaaatttttattttatcatttttaaaatattttattcattaataataattttaaaaaatattaattataattaaaaataatttaaaaaataaaatatctaaaatattttgaaatatagtcatttattataaaagtgaaacgtgtatataaaacaaacaagatcgactgtgaaacggtggttgggcaggattatcggtttcggttggtttagttgtgctgatacagtgacggacagaggacgaggaagaggaagaaaaagagaagagagttagtgtagtggaggatgatgcgttgagattgatagatacagagatacataggctctctctctctgtctatcaattaaacttccacatgggaagactcttcctcgttgaattggacggcagggcttaccgatgccgagtttgcgattcccctcttgccctcgctgatgatgttctctctcgggtatgtatatatatatatatatttacataattatgtgtgatttttgtactattatgggaactcatccagttcttgttcttcgacctctgaatataattgctagtgttcgaccccctccccccttttctggtctgggattaagcctggggttttaaacttattagtgtttattgcccttttcactatatcaaaaacctaaaagttaggaatttcgtttaccctagggtttgttctgaacagggcttttaataaattgtatagaatggattggacttgggtgctgtagtgacggttattgaaattgaggaaaatcgacccatttagcgtgtcatgaataggaggcatgaaattgtgttaaattgcttggttaccaagaaatttgagtaggaaatagtcgagcttgattatagaagagtgcctaatctttttgagcttttgttgtgagtttgtgaccctcgaaacttttgagatgtagttgaagagaagcatgagcatttaattgtgcgattggattaattaatcagattagtgttaaaaaaaagtgtctttatctgtctgtcattgggtatcaagtgcatctagtttagttcaaattgaaacatgaaaataaatataacttagtctgctattttttacccactatgaaattaatttctgccctaatattttagtgggaagaataccaagttatctgggcagaagccagatgtccttgtagagctctctctcatcagcttctgtactctaatccttcaaaatacattaccaaaatcctacttttttatattttaccttaaatttttacattatcataattctacttttctcgaattttaatacactttattcattttaaatatataatattaatattcacacgtattccatataaaagtacaactaaaaccccaaccattaataagtttagagaagttttaaaattaaaaagaaaaaaaaaagtgtagaacatctgatgtagcgtatttttagtttaattgtttaaatattttagaaattttttattttaaagcatcttatgtgggctcttactgtttgactaataatattcacaaacaggagtggtctgcaatttgtgtttcgtgtagtgtggagactcaagtaatagaagcaaacgccaaattaaaacttgagtcatttattaatctcttaaaaactacaattcaaacccaacctactcgtttgtaaaaagatcatacttagtttggacaagttatcaactcagtttaagacatgttttttatgtttatacactatatgtttaccagtcatttgactcatttctcatgttttgaacttatttaactaatttaatgtactttatataatagttataatgaatataattctgtacagttttaagtagatgtttggtcattttcgagttatgcagataaaccagcaaattttttatttaacaatcaagttaggagtgttaattcgaaaataatctaaatccatttatttcatccaggtttcaaattgtgctattgtgtatgactcattttactgttcttattcacaaggtttgaattgtgggttgtaagaagacccaaaatggtggcaaatgtagccttttatttttatttttttgagacctgattgctactttagaatcttataatcaaaatatttctggctttatatatgtatttgcaaacctagcttaggctactagaagttatgcactttcttttgcctctcagcccttttggtgtcctttttctgtttttgttttttatgcatgtatagtttatgttttaacaattctattctataatgtatggtggttttactctaactagttatgtttaattgtgctttagacattcaattgccgtaaagggagagcatatctattcagcaacgtgtaagatctcttagaaacttgatttgggtgtatttcattttcaatttcagacttcgatttagaaggaataattgcattacttattctgttatgaaagggatagtagaaatttgtaatttgaaacttacgaatctatgagtgaaagaatcatcctacttggttcataaatgatgtttttcaaatttttgtcattctcgtctttccaaaatactactctttgtaacaaagcatgcagaatgattcgttgctcattagttttggaatgaatatattgtatgtcagtgctagattactatgattatgattaacttttcttggtttgattctgatttagtagaatttcgatacagggttaatgttacacttgggaatgaggaggagagattgatgctttctggtttgcacactgtagaagatattttctgctgctgttgtggccaaattcttggctggaaatatgtaagtttgcgctgcctttcgatctcaatctttagtttttcatttcataattgttggacttataatttatcaaattgaaatatgttgtgggatataagctgatcttagagcatctcccattcccaaaaattgtgttatatttggccttaaaaaaagattttgtgatatatttacattaatttttagtattgtgctctaatgtataattacaaaattttgatgcaaaatttaatattttttaaaaagtataaacaggggatatcattaattttattatgtaagagaataaaaatttataatatatataattaatagttaatgttatagttcattataataataaaatattaaaagtgatatacaaatttgcatcataacatatgttgtgtcaaatttggcactatatatttgtttgtgacaaatttgcatcactttttgagacaatattagagtataaattttggtaaatgagttatattattatagctttagatcacttatttgcaagatgctacaaaattctgttggttactttattaccgaaacctgatctatgtttggaatctcaataggttgttgcacatgacaagaaccaaaaatacaaggaagggaaattcgtgcttgagaggtgcctgtgttattttatgattggtttacatattatatctcttttctctgtaatcagaattgtaatttttaaagtgtctatatctaaaatatgtcagatggaggatagacgaggatgtggccgacgaattggatcttgatgctcgtcctggttcaagcgatgcagaaaatctttaggaataaatatattgcatttttataaaatgtaaataaatgctagaaacctggctgtgcaatcaaaagagttgaacaaagtattattatttttggtttacaaatagttataattttagaagatcattagagtaatttttagtataaatattaaatttaacttctggttgcaaataaatactttaagcttaattttttatggtaataatatttaagttataattttaaaatttttataagtacttgatccttaaatgtgaagtaaattaccatgtgttggtctctgattgatgaggttatgaaatttttatttttaattaaaagttaatttaaatatacgaataagaaaatgatacgtggatactgtttgacatttaacggttaggcacttaaaagaaattttaaaaatataatttaagtattattaccgttaaaaattgtatttatttataacttaaagttaaacttaaatatttacgctataaattacttaacattattagtgataaaaacatctcaatgaccatgtgaatttttattctattaggttaatcttcttattattttaatttcgtgtgtttagaggacatgtgcttcctgcataacattcgcaagtacaattttcttagaaattttatttcaaaaatattatgtttttataattttttttttctttctttcattatataccaaatactacctacatacatattgtttattcgaaaatttactctgtggttaacacgtagcaagaaaaaaaatattctagaattgagtagttttgagtcatagcaatcaacctgaaaggggtccctagcctaatacccagggtgactccaagaacttcggaatgggtgtttggatcttgtcaagttgtttccaactcaccatctttcagaattctgaatcaagatgactagaagaatcaagtccaatgcctgaaaactgaaaagttacgaaaatgcacctcggaagaagtcaacttagatgcctagggatttcactcagtgcccgggttgacatcccaactagggtttcaatttttgggtccatcttagtgcaaatggctcaaactttatactttaacacgaataacacttgtcacgaatatatttggggcacaaaaatcaaaatcagaacacttttattttttagcacttgaggcaccaggtgcctcgggcacctagtgcacccagcgcgtaggttgacatattgtcaacctggggcgtttccaatcacaatattaaaaaagtatcccgagtattttattcgtctccatccaaaacgaagaatcaagtgctttcgagaacttggaggccaaaacgggcacctagcgccaatgttgacactttgtcaacccaggccatttccatcagcagtttagaagaagtcttttaggcaaatttttgttttcgtcaataattaagaattgggttgagagtaagctactttcataagctattcgtctgttgtcatttcatcttttaaaagctaacaggttataataaatttgttgaattcctaagatctaggccattggaacccgaatctcagggaacacaaaattagaaaatttattaatcctaaagcatttatctaagaatagaattaaaatcctaaggctcatggtcagttggaacctgactcctatggtgttcagaagtaacttcatgtggcgaaaattcatctaaagtttcagtacttgatgaatctaaaacaataattaattacacacaaattgttggaatttattttacnagaatcttatatctactcacaagtatg

SEQ ID NO: 15014 - DNA, 8050 bp, Cannabis sativa
atatatatatataaataaaaaaacgaaacccaacctagcactattgtattctccaatgcaatatagagcagttggttcttgaaatgtaaaattaagcaccaacacaaatttatgcctcccacgcagcgccactaacttcgttcataaatgagctccaaaatctttctccaacaataatattgttttttatggagtcaacaagtgggaatatcctcatgacctcgtatcctccagaaagaacaacccacccaaattcatgggaaaagtgaccagccccaactatcaaaagcaaaagcttttgctatcgttctttgtcaaaaacccagctctcacctattgtaaccttccaccagtggtgtgtttgagagtgggcaataaccccatggataatcaaataacccatgtcttccctttattggtttcttgacaatttttcaatccctctatcaaaatccattaggtaaaagatgaaatgaccccattaaaacttggatttttcttatgcaagtaaagagcacgcccaaaaacaaaaactattttttgcaagcttttctcgctgcaatagattcccatatgtcgcctttgcttccagatggccatcaccaagacgtcgacttccaccaccaaatccattggtgcgcctagaaattcgacgactgaacccgtcatgtgtttcaccgttgctactagagttcccacaacttttgtcatagccaatattgatgacattgtccacacactcttcccatgttccgcttgtgatgtacctcaacctaggggcattaatgaattacatagataataggtaaaattgtagagaaaatttgtggcaagattggaagccttttattggcatcttattgccaaagtctgaatagaagttaggcctttggtgtggttcttgagcatcagttcaaccttttgatcaaatcttcttgcttgccatctcttcctttacttcaaggaagtcatttttgtactaatttcataagtagttgtgacctcatccaaagattccaacattcaagactcgttcttgcaaatagccatctacaaaggaaaacgctctaacaccaatttgataggcactaaaaattcaaggaatgatacaaaatcccaagttattcaaaaaaaaaaaaaaaaaaaaaacttgacaaaactccttgagtaatcttgtactctaaacaatcacacaatactcatccatcaccccataagtgagaatttataggctagactaggaaagactcctaactggccaaccagtagaaatctaagtatttgacatctcacttaagaacattacatcccagcaacaaagtacttagacaactcaggtaccataatcctaattaacgttgcctatggagtgacatgtttaggctaatttgaggcctaacatgaaccttttctaacactatatagaaacttccaaaaggtctttgttgaaataaattacataaactatgttgcacaaaaggtaagaaacatgaaaacataataatgcagcaaacatcatgaaataaatatttataaccttcattatcactgattcaagctccgaaaaactttcactagaagactcgtcgagagcttcatcactctccatctgcccatagagtttgatctcatctgttgatattcctttctcaattaacacctgcacaaataaaatttcactaattttgtaccaacttcgaaagagcaatagtaccagtactaagtacctggaggagtccaggagcatcttcctccagcgctgtttcagctgaatcactacaattagtttcacaaacaaaatcataagattggctcttgataaaattattatttatattgaacattaaacaatattagtacaaataatatatataagataaatattttacgtagcagtctttttcctttttcgaatacgattgatgctgaatggctttgcagaatccgctgctatagggctaccctcagtggcaaaaggcacagattttatctcataatcatcttttaacttcagcaactttgtacgatctcctagacaaatatggtctctttcatcttcatcatcttcatttgagatttccacttcagcttttaccccaggcatgttaaaggaaaaagtatcacaagcattgccctccaagttttgacagttattgtcatcatgaggctcatctttgattttgagcgaggtcgataaagatgaactactaatgtcatttgtgtaaacaagcatattatcctgtctttcacatgaaatgaactccgtagatgaatatgtcttgtcataatctgaaatatcactactgctaattaattatacacaattaattgagtgtcaataagttctaaagaagaatcgacaatgatatcaattgataattatatactaaagttctacacaaattaagaggctcctttcaggaatatcaatggactcacttttagcagttaatgaaacaccaataacatcaggagtttgttccttttgcttctcatcacactgttgtataccatttcctgatgaagcttccaaactaatctaaaatacacaaattagaatcaattttaataacaaatgctaaccatcgcctaaatttctgccaaaaagtatactaaattcaaaacaaacaaaacaagaaagaaactgatgtaattctatatgcagggaaattacccaaaagcatgaggcagagaatttaccattaatactttaaaaaaaaaaatcagattgataaaatttaagctcggagaggaagtaaacttcatactattacatctcttaattagtaaataatggaattgaagggttatcagataaggaaatttaatgcatggtgtacacttgatgataaaagttgccatgaatacccaaaacataaaaagaacaaaagggggacaaattttctttaatatcccaggatgtattaactagtaaatatcaccatttttagagacttagagacaaaagcaacactaatgaacattttcatttagaaaatgctgtcgtgaaaatcaatatgattcttcaatgtgtttagctgtaaactaaaacaatgaccacaggttcagataatgtataaaaaaattattaaactatgtgcatttaaatgaataaattacctcaagtgctggttttgtcattcgcaacagtttcctgcaaaataatgcgggaaaaaaaaatatttttaaatacgaaatgtaaatattattgacgaaaaaggaaaatctaactacagaaaaacccattgcagtagatcatctcaaccccttaataattcaagaaataaacaaactcttcacaattgagagtacccacagaggcacccaaaacataaattgtcctaaacagagcacatatctccttcaaaatttggaaattcttttattgctttccaaagcacacatacaactcatttccataaataacaacaatagcattaataattataatttcttttcattcccccactaaaagactaaataggagaataaggtttttttttatgtacaaataaactataatttccttctcctactaaaacttaaataacaacaatagctaataattataatttcttttcattcccccactaaaagaataaataggaaaataaggcttttttatgtacaaataaactataatttccttctccaactaaaacttataaattataacaaaatagggagcaatcctggtaggaaagcatttgtttctcaaatatttgctaagacaatcacatacttggccataagagtaatgatacaataaacaaatagcaccttgaaagcagcatcctctgcctctctttcaacacaatgtggtctaaacaatcatcatcaatgagatcggagatctcacttttcacctgaacagggggtaaatcagcaacagaggagtttcgtaaacaacctcccattgagtgcaacatgttgtcagaatttcccatgtgtgctgctactgcaggaacatctgaaagtgttgaaattgccggatagcaactgacattggcagcaagcttccctacttcagcaacatcaccattagatactgtacattttatttgctccagactatcattgaaacaatctccagagattcctgcatctaaaatacaatttccattttctgaacaaggatcaagtacagatttttccacaattctatggcttgatactttacaatgaacttgctcacactctttattttgtttttttgcaaaaactgcaagtactatttgtctgggagaccaagcagatgtaggaagaacatcctacaaaaattacaaattccactaataagaaagcaaaaacaacaattacaactaattccatacatttgaaacctgtaatagtgatcatattgctttcttgcttaaatatttttattttcccccactacaaaaacaagcgctataatggccaattagtgatttcataattctttgctttgttgtcgcaataacctttacacttataactaagcatatatgtcttcagcaccactcaacaaatcaattttgatgataataacagatatttagtacataacatttcagcagagagcataattgacagacaaaatatgataggataaaaacatgagacctcacttctcaccttaattgttgggacatcagcagaagaagagttttgtatacaacctcccattgagtgcaacaagttgcaagaacttcccgagtgtgctactgcaggaacttctgaaagagttgaaattgccggaaaactgctaatatgggattcaacctttacttcaggaacatcaccattagaaactgtacattttatttgctctgaattctcaatcaaacaatctcgggaagttccaacttcttgaatagaattttcaatttctaaagtaggaacaagtacagaattttccacaactctattgcatgatactttacaatgaacttgctcacaatctttaacagcatgattttgatgttgagcaaaatattcatgcactacttgtttgggaggcaatgcagatgtaggaagaacgtcctacaaaaagtataaattccattaacaaagaaggcagagacagcaagaaacaactattacaaaaactttttgtagtgatttttataatgctttcctgcataaatattagatttcctcaatttaggaacaagcattaatggccaattagtgattccataattttttactttgtagttaagaaaaactttacatgtatataactacagaaatatatgcagagccacacagcaaattaatcttgaggcaaattgcaaaattattagtacataaaatttcagtagagcacagccaatggacaaaagcataaatagttttcttcctaatcattaatatttcatgaaaatgtgaaacataaattttattacttacaaaaaattattttcttccgaaattcaaaaggaatttaatttctctttcaaaatgtttaaaacaatgcttcctagcaataaaaccaaaaaatttatcaaacaggtgtactaactcatcaactttcattaaataattaaatataagaattataagaaaaatacatatatgtatactatttagagaggtcatgaagaagtctactacacaggaaaagtttttactgccaagaagcttaacagaccagtaattccccaacgaaactatcacaaagatttcaaatcaaagtatgtgacacatacaaaaatctgacaccattaatcagttcttacacaaattgggtttttctggtttggttccagtacaaggttcagtttattcttttaaattatttgtaatccaacttctgcaaatcaaataaagaaaatggagcatttactctttctagcagataatcacattttggttgaaacatgatcaattgcctgagaagaccttgagacagactaaatcttcaaaacagaactgcagaatttttttatataacaaattttaagaggatcacaagactagaagagagagacagagactattagtagtaaagaaacatcacagtagacaaaaagcacagaagacaattatataagtaattaaaaacactcaattgcttaaaaatttgaaaacactaagcctagaccctttaattatccacccacaaaactacccaaaacatgatatttttacccccaaattggatcaatatgaaatttctctacctcgtcaaaaaaattatctacacctatctagcaataatgttgaacaaaacactaaaatttgcccaaatctcactttatttattttacgtagcacttttacattacaccatctctatatttttctttatttatttaaatattatatttttaatacaatcccttttatgtatttataaaatgagctaaagtcaccaaagtgggctaaaaatatattaaaaaaagatgtttaccacccttctctctccttagaggtatgtggtgatggcatgagctaaaatagctcaaaggtaaaaataatatacatatcccatttagctactctcataaatgctttttttttatcacttttagctataatttgagcaagatagctattttacattcactgatgaaagtgatatcattcaagatttagcttttgctttttccttttcttttttttttttttaatgaagatccaagatttagcattagtactctaaaaattgaccgagaaaattcaatgaagaaataactgatcagaagccacaattttttcttgaataaaatataatgacttagtgaacgcataactaaagtctccttccattagaattgatctttgaaagaagaagttatcgagtacacctatcataatttttggtggacgagagattttccaattaaaagaatatgatgaaaagtagataaaatgataatcaacaaacaaaaataaaaggctctgatcccatttttcaagactatttatgtcaggttctgcgatttaaattgcacaaaaaagattcagatatcactttcccaaacccatctaaccgaaacaccttcacagaaccctgcagcctccaaaaaaatagacaaaaagagttcagaaacctggttccaacttccaatttagcgcagttttgaatctaatggaactccagactttcaattcactaacaaatcagaaatatttacaatatatattccacttttaatctctcggaaactgcatcaacggtctcaatatttgagaaagggaaaacacacgcacatacaacagcacactacagcaagaaaggaaaaggcaacacaaagtaagtatgaattaccagtgaatcacagctctcgtcttcttctttaattagtatacgggacctgcatatatcacccaaagaaaaataatttcagctcttgagaatctcgagtaaaatgagcaaaatttgaactttgcaattgaaagctcacatcaatagctttccggttccactttcaacggcgctaggttcagtattacaattcggagacttatttgcgagtagcaaggaccggcgatgtatcagtggcacatggtcaagctcatcagatgggagaacaccattaatattgccgtccgacttgaccgataatagttcgccgaaagaacataattgggtagccattttagggagttgaaagccttgccaatgagcagcctaacctctgaaccaacaggatcaaacggggaagataaccaaattggtgattggcttcatgattgagcatgtaaggattgtcaattgaagaaccgaaggaaggaaggaagaaagtgactagggcttcgaacgagagagaaatgtgcactcactctacaatctatggcgccaagaagaaggattcaagtaagcactcctaaattcctaattattaaaaaaccttaagaaaaataactaataaaaaaaaataattagtaattttgtccaattttgacccctaaaatatatggtttgttaaaaattctttgaattttaacatttgtaaaaatttagtccttctgttaggttctgtctcattatctcgttaaaatgatgacgtgtctttgtcaattagtaactttgcttactaaattttgacaactatcaaat

SEQ ID NO: 15015 - DNA, 10520 bp, Cannabis sativa
  modified_base (5823)..(5825): a, c, t, g, unknown or other
ccgccacagggcaaggtctcctcagctgagaataggctcgagagattaaaaggaagggtttgtatgctctcctcttctccaaacgcattcacatcctcaatctcgtcgtagctcgcaagcaagtggcggaacatacctaaatctataagagaaacagaaacaacattaatatcgcaatacacatgataacaacatcacagtattatagtaggaatatggtcaaaaatgtaaataagtataaaaaaaaggaccttcagagtcataatcatccaacaccgtagtattctcagggtcgctctcaatgccaacgacttccttatccctcctcgaagtggtgggttgtagagtcatgtgtgtagaagagttagctgtggtaagattcccacgagaagtatttccccgattggagggaacaacaagagtaccatatccatcaatcgtacttgcgacagttgagttacactcaaaaaggtacagctttaccaacttgagcatttctatggttacaatctttggggcatactacttggctgctggcatggctgtcaaaaccgttgcatgttgtatcatctcctcgattggatttgatctaaaatatgtacccgtatagttgaaagttcgatgggtagtatccattggggttgtaaaaaagtaagacgattgatgtttttttccacgagatttgctactaatactagagacatacggtcgatcctgttctcagttcatgaaatagaaatattctgaatgatttgtagatgggcaactccgaaaagaaatgtggtaatgaatttcgtgaggagagggtcttcccattccttctggtgatataggatgaacaaagcagataaagccagatagccatgaggagcaatttgaatcgagaaaacgtcgagtagtttgccacatcccaaaaaagtaatcatggaacggcaaagtcgccccagtctcaatgtagtattttgtccaagcacataaattatttggaggagagccaaccttttgatttttctctgccaaaactatctccaccccttcaccaaaagggcagcgagaagagtaatcctacacatcagatagcttcaaattgttgtctaaacaatcaattgcaatgttgggatcccaggtaccaggtcatatgatgttttcatctctaaggtggtcactatgtgttgagtcatcgcctcttattgagtccgcttccttcgtttcttaaggggattgggaggggccatataagcttcgacttcccttaggacgtcttgggaggaaggattggtcatttttgcaataatacgaggggtggagcactctcctttgtgtaagaaatacaagttccaacatggaaggattctcttcaatctccttactccatgaataggacagacagtctcgtgagaccggctagatgactcactaatagctgaaggactgggtgaagacgacaaatctgacgagtttggaggtgactgataatctgagtatagacgggctaggaggtcgtcgtcgatgcagttgtcacctccacaatgatcatgagcatgcatctacaaacatgagtaggataaggtaacccaaaaataagtaaataaactaaattcacttgataaattattcagttaataaaaaaattagataaaaaactaatttaattacaaaaaataagtacaaactaaatttgattaaatcaaattagaaaaatctaattttgttgaattagaataaatctaattaaattaactaagctaaatgaattttatcaagaaaaatatattatttttttggtttattttgggtatatcaaactttcactttgaataattagaaatatatatgtgtgctcaaactcctcaaagaacctttttggtccattaaaaaaacaagggagtcgattggctccaacaaaagaggtgaatggttcttttcactaagaggagccgaatgacactaagagaagtcgaatgacactaaagagagctgaatgacactaaaggaaccgaatggcacaaaggagctgaatggctccattagctcctcaaataagagcaaaagcaacagaggtgtttttataagtaaattactaagtgaaatgaatagcatcagggaagaaaaataaaagaaacgaattgcatcatgtgtacatatgtatatatttatatatatatatagcatgtatatacaagggggcctcatcatcatcaatgcctactcattttttctacttttatttttattccctaaagtctaaatagccacagacacattttttccctcaaattcaaatctttttggatcaaactagagacttcagatgttcatcaccatcatcatgttcttcattttttctcaaaaagtttaccaaaatcacaccaaatatataaatctctatcatttctaaaataaagagtgaattaagataacccataatctacattactaagttctattcatagattctaaaagttacaaaccaaatttcacaacattagcaaaaggcaaataggttaaaagagggtttttatgaagaaatttgaagaacactaagacattcatagtttctacgcattttaacataggaaatagaattgaatagtaaatgggtgggaataacttactcaatagtgatctttaagcttgaatcctctccaacaatttttagtttcccctttgagcattcctttgaaatatgttttggagctatttgagagggtttttggaagggctcttattttttttaagggaagagtgaaaatggttgtgttggaaagagaacatatttaaagacaataagggtctttgttattcatttttatttttattgttagttttccaagatgctaggaaatattgatggtttctacatatttgttcttggtagtacaaatatttgcgggtatagagtccaaaaatgcgagaattattttttctacatatctatcataatattataaaattataataaacttaaggggcaagtgttatccctcaaaaattccaatttaaatgtgcatggattttgttctagatttggaagtgctatgaagggagcacattgcacctccaactgaaggagcacattgcacctccaaccgaaggagcacattgcactttgaaccaaacaagcacattgcactacctcctaccagtggagcacattgcaccacctcctactagtggagcacattgcaccacctcctaccagtgaagcacattgcgcgtactaagctccctactccatcctgctaaggcacaaagagctcctcaactaccaaattacctcaaggacctaattggcacgaaccgttaagggacccaattggctccctttgtgcgtgcatgacgatccggtcaactaaatgcgaaagacacatgctcttaaagctatttcgaaaatatagtcaaaaaatgataagtgaagatatatttattttttgaatgattatttcattattattttgtattttaaatctaacccgactatagttacaggaaggtgcacctaggttaaggaattttaaatcctagaagaaaacttatataaagggagtgaaatcacttgtaaaggcaccctgaatttgatactcatgaaatcatactcttgagccctcaaattctaaaaactcacttgagggttgaactcttggagagctctctttaaacattgagatcaataacactccaagtggactagcttattaccgctgaaagggggtgaaccactataaaatccttgtgtttgtctttgttgaatttacttttacaaattaatttactttgattaactattgcttgtgttcatcttgctcgtttacaatcttcttagatccgttgacaaaaaaccgcttcaacacacgaaaatcacataataccccattcaataaagcttgaaaggtggcgggaggtaagactggaaggcacgaccaaaaactcgtagtgtccctcatgtgtgtgaaaagcaatcttctccacatcacttggggccattcgggtcagatgatatcccaatttcaagtccggtatcgtaaaacaccttggcgccatggagctcattgagcaactcgtcaataaccgggatgggaaacttatccactatagtagctcgattaaggcctgataatcaacaaagaactaccaactgccatctttcttcctaaccaacgaacttggactagagaatgggttggtactaggatgagctatgccaacgcgaagcatctcttggaccatcttctcgatctcccccttttgaatctaagcatatcggtaaggacgaaacgaaataggccatgtgcctggttttaaggtgatcaaatcgtctctataacgtggtggcagtaatcccagtggcatttcaaacacattgttgcattgctcgaggagctgagcaataggagcaggaattggtgagtggtggtgatcctcttctgtggttaaagccccgagttgagccaagaatgcttcagccgctttgtctaccgtgaacatcatagctttgaaggaaatgggccatttgataagctaggatcccctagtaatgtcacccaaaaaccctccacctcgaatttcatcaccattgttctccagttaacttgcatatttccccatgttccgaaccatttaatacccaagataactccacccagttctactggaaggaaatcggtaatgacccgaattgctctcaaatcgagctccacttaagaacaaattccttcagctctaaccttcccaccagtactcaaaagtatcccatagcaagtggtggttaagatgggaagacccacggtagtaacaacttccatcgaaacaaaattgtgagttgccccactatcgattaagactgtaattggttgagtgccgattttcctagctaatatcatcttatgtgcggtcgaaataccaatcaaagagttcagactaagagtggcgagtgtctcgtccgcagccactatgttgcctgaattcggtaagaggggaggatttttgtcaagttaatcacgttcttcctcatcagcagtgagaagaatttgaaggaggttatgttcacattctcgatcgagatggaatttcttgtcacacttgaagcaaagtccctgagatcatttctcttggtattcagcttcagacaaccttttgtacgaggtgttgtcggtcgatcgagtactaccaaccctggacgtcgtggaagccatgtttgctgacgatgaagaaggtcaatgttgatagggttgttgcaggactcgtgaggagaaataggtattgttggagtaggctagtggaaaagacccaaaagagggtttagacagattgggcttaagtagtgagcctgaatgcattagttggtggccctctacaactctttggttcgtctccatgatctggaccagaccttggggctgaagaatatgcaaggctgccctaatttcctccttgatccccataacaaaacacccttctaaaatatggttgggtgcccaagaaactaactaggactgaacattttggcaaagtttgacccggacccgaccaactcgcctggaccagactcggccagcctgtaaaattttaaaaaacccgctctgtttgggcaggttgggtccaactcagtacactttcgagcaggtttgccagttgatcttttatagtcaacgagtttcgagttggacccgaacccacccaccaatcggcccaaaattaaatttttacttttttaattttttttacatatataatatattaaacataaaagtcccttcggggacattcgataaaattggaacgatacagagaagattagcatggcccctgcgcaaggatgacacnnncaaatcgagaaatggtccaaatttaaaaaaaaaaaaatatatatatatatatatgaaacataaaagaacctaaaatctaatccttttatatttattacatatgtaatatattaaaaataacaatatattattaatatagtttggaactttttagattgactttgtattttagatttgaaattaatgcttttttttttgttttaatctaacaaatatagattatggtgttataacttatatacttaatttaacatatagagaaaaaaaaaacatatagaatttgagttttttttaaaaaaaaaaatgacagagttgattgggtcaacgagcccgcgaacccggctagcacgaccatttcacaggccggtctgggtacaattttttgaaaccgaaacccgcgaacccaaaagccaacaaatccgcccgatcttcagccctaaagctaacacctcccattgaatccaatattccttcactcgtcccaatttgcaccacaccaccaatagtagctcctcaaataacaatccaattaaaaccgctcggaaccaaagaagaaccatttgttaagcatcgcccaagacattatgggatgatgttgattctcccactaaaaccaagacagagcattgacaccaagtcccacaatagtcgtgtcaagcatcatcttctctgtcattctcataaacaaaaagtatcgttcaacacgataaacccagccatcgaggttgtcgccactaaacaagggaatttccattcgtgtaggatggtagtctaggctgttcgattggcagttctgaaatgagccgagtcaaatcgaaggtcccgtcagaatgttcagtggagggaccgtcattttcgcgagaaactttggtgtttgctagtccagacgaattccaatggagttgggttctcaaattgaagaaccagtaccgtcgagagctcatcgttgactgtctacacttgcaatagctgcgtcagaagaggttttcgctggtcgtccgaggatttgtgagatctaactcaacacgaactccttttgtttagcaactatatgctcaattgtggtctgaatttccccttgtaacttctccaacccttgattaactttctgtacatcttggcaaatttctaatacatccattgctaccttttcttctatgatttctaccatagcatcttttttgggtcccatgaacaggagctctgataccaattgataggaatttcctaccaaaccagttcaagcttaaaagaatatacgaaaattgaaagaaaagattgaattagatgtgatactgatagcccatgaatttgagagcctggcctctccttacaagtttctagcaaaatactcaaatatcctcccacaacaacataccacattatttataatctaacccacacaactattgtgtgacttcaccacaccagaacacaactttccccactagattacacagccaaattgtcccttgtggcaatcccactcttagccccctatagacctcttcctagcatacataaatgtaacgggagggctatcattattgtgtctaattgcctgtgtatgaaaaatattcaaccccgtattgtaaagtctgacatttttgcacatcattttcaattattctaagacaacaacatctgcaagcaaaaatacacttaaaatgtaaaatggaaagataaggaagcttagtaattaccagaaatttaacaaatacaagtgatgcatcccaaactgttgttcctaaatgcttggagtttggatccttcacaatgattcagagaaaaaatcaatccattatcaaagaaattattgtgagattcactaggaaaaaaatcgcctaaattcatcatactcagttgaacaaaacaaaagcccatcattaaggaaattattgtgagatactctagggaaaaactcccctgaatgcatcataatttgcaacaggtatatatacatataccagtattttgacagatatatgtgtaggtaactaatagtcatgagttgacatgatacaaaactgaatatgatacatatataaatatgtttctgacgcagattccatattaacagcaatttcactctacctagtaaaatagcttatccaagctttcagaggcaaatactaggagttctcgagaaaaatttatattgcattcacaccctcaacctggacttctcggactgactaaaatgccaaaatcaaaatgtaagaaattatagtcctgtaaaattgtataatgtaacctttttcctgacaaatatgaggaaaatacttgtttgattgacactttacgaactatctatacattcggtacatcatccaacttactcaaattaaaaattctcaaggtttcaattagacccaaaattagcatattcaataaacatcaatgtgcaacaaaaaagcaggaacattcctggagcacaattgcaaatacctgagaaaactgcaactcatggttcattacttccaaactcattgaaaatgtagtaggcaaatttaacctgatacacataatttatactgctttaacagaatattcttcgaagaaaaatatagtcttgccccaaaaactctgcattgaaaaaaatgatttgacaaaggataatggatttgtaaaatctgtaatacctctcagactccatttgatacagcaaaaaggcgttgaggagagtatagtgtagtattatctaggaaacttgatcgcatttaattcactgttacaccacagagagaaccgggattattattacgcaaataaaagaaaaaagcaataatcataacgatcagggaagatgggttaattgcttttgcttttacgaaagagtaaataaaagagtttattaagattgcaaaatgaaatgaaaatagaaagaagcttgaacctcagtctcggactgaatcactggttagggcttttgtgcgactgcaaggcaaagctgaacttgtctcactgctccaagcattcgtcaaaatatcgaactatgacttttacccgaaagaaaatttggaaagatagaaaaagtgaagagaagagtactggtaaaagaaagaaaagaattgtattttattttgggatttttacatacacgtaaaatttggcatattttttatatttttatttatgtttagttttttaaatatttttatagaatttattttccaattttatttttcaaaaaactatttaattataaaaatacttttattatgtatgtcatcattttttagtctcttttatatgttaactcgttctctctctttctttttttctattttctctttcttctcttcatattttctctctcttttcaaattaaaaaaataaatgtgatattaattaaataactacttatttttcatagcataaaaaattttaaaaaaaatgatgtgactaattaattatttctttcaaataagatttaaaataatattaaattaaatttatgtttcactaataaaatattattttgtattaacaacaaatgatattattttttaaaaaaagcaccaatgacattacttttaatttgagattttattcttttatctcgtaaaaatatttttttattttacttttgaaaaatgatatttactctttttctaattatttttcaaatgtgctaccaaattatttattcttacaaaaatatttcaaaaaaaatatattacattagttttattaaaattttaaatagaattaattttacacataatatatatttttgacagttaacacaatttctaaataccatattgctaatctctaaaaattgaagtgaataaaaaatattatcaatataaaatatcgaattaagttgcactaaaagagtatatgtttagtttttcttaggtacatatatttttgaggatgtacaaataatttgtaattacttttaagtttgtttcatttttttttttttttttgagattatttttatgttttttaagttatcgcaatgtgttgatgtgtaatctattttcatattaaagtacagttgttatcgagttgttcattcgttttttttaagttgtttaataacaacaaaaaaaatatatatatgtttaattttttatgagtattgttgacctcaaaaagtgatcaactgacagtagggtcatatagatctgatgctagccacgtgttacacaaacaaaatgaaaaagtataaactacacaaatttgttatagaggttcaaccctttatgagcgggtaatgacctactccccttttggttgtattgatacctagagataatactatttagatcactataggtgagatatgatatagttctctatatgtgtaggagcttatctatgctaagaatctaatagaatccaatctatgagattgcaattcaagactagcaaaagctaactagccttaggaaatgatttcatttatataagggagaatacattgagtaagcaagaacgaaaagcaatagaaagtagttacaaagaaacagtaataactattttaactaattaactaactaaacagttagtttaggtacagtagtagttgtatcatcccccctcaagcgaaagggtgtttgacacacttgaagcttgtgcttgagataatgaaatcgatcagttgacagtggcttcgttaggatatctgcagtttggtcacaggaaggcacataaactttgacttattttgttaagatttgg

SEQ ID NO: 15016 - DNA, 4775 bp, Cannabis sativa
gtaattgtgaactcattcacaatttcattcgccgccattgtaatattatttcctacaaaatacaagcaaaataaataataaaaagtgagacaatatttaattaaccaacctcaatatatatatatatataatttgtattcaagattgattttaaaaaagcatatgatcgagtcgaaagaaactttctggacttggttttgaggaaaaaaggttttagggatcgatggaggaaatggattagaatgtgtgtcttcaccacttcattctctatattcattaatgggagatcgagagaaatattcaagggctctagagaaaaaaatatgcaagttgacacacacaaaattgaataaagcaagacctcaaataactttttcatataaatcttcatatctatatttatgtatatggaagaagtttcaatgattacatttttattgtaaccattatagttacatttttttagccattagatcactattaaatggttgtgattgatttagaaattaaataaaaataaataaaaaataacatgtaacctgaaaataaccttataatttatttccttataaaactaattaatttagaataacttaggttgtgttaatcacttcaaatgatgcttataaaggcgagcagtttcgcagatctatcttctgttcgaagaccaaagaatggagttgttgctttaaattcctatggccattcgggcgatactgttttgatggaataattgcatttgacaccagtactactcattgttgttcggttgtcatgccagcagagttcgacaccaatttatggtgcagttttataaagggtgtttgtcttggactagttcggggtcatttgcgtttgttgcagctgtttttggatagagaggcgggtggtcactatgttctcagagcatgggatttagttcagtcttattcatcgccatcatcaccgtgggttatggttaaagatgttagattgaaatggggagcatatgaaaatatgtcattgtgtcccattgcattccatcccgaagatgaagatgttattttcttcaaaagagtactactcaatcattatgatattgttgagatcttcgagtacagatttgggagcaaatgttatgaacatgtttgttattgtccattcgccgagaaaactctcagccttcatattttgcctgtgcttgttcatggttggcctactagaattcctcctctccatactaaacgtccccgaccatgttttagattatcaaatctagacatcgatagtgtatgatttttatttatttatttgattgattaaagtagttgaatgatgttcaaagatgagagatgttattttgttattaattttatccattattgaatatttttcatctgttgatatagttgatttaattgattataataacaatttttatttacgattgctaaaagatgtacaaataagattagaatacattattaagaaaacaaatcaattcaaatctgtttttgatgatattttagaacagcaccaaaaaatttaagatcttagctagacctttaataagttcataataagtaccttaaaaataacatttatttacatagtttggaagaagaagaactaagaaatttagttggagtttggtctattttaaaccactaattgcataaaagtaaaacataatatatatttacaatagttggagttaaatttagttgtaaatttaaatcatttgggactagattaagagtggccatataaagggtattggagtgtgtgagtagggttgcaacaatgtaacttaaaaattgtaatttcgaaaggcaactataaaagaaaaaaaaagtatctataattttatgtcttcaaataataatgacttacaaaatctattttatctagggtaggaaagatggaaaggaagaatgattgatagggtaggaaagatagaaaaagtagaggaatggaaaggaaatgagtactccttttcctttatgttctttgataaattagaaagaatggtaactaatatgaaaaatgtaaaattatttaatttgaaattttttttatataattatatagaaagattctataatgcaccatctaaaagaaatatagtgacgcactcttattcgttttggtatccaaaataattttttagccatattttttctcatggttatgtacgttatagttatttgagacattttgtaaaatttgaagaaatttagaaaaaattaacactctaaaaacatggttcaaacaatgtgttgcactcgtgagtattttattttatacgaatgtgaaatagactatttgaacactgctttctatagtgtaaattattctgaatttttcaaaattttgtaggtaatcttttataactaaaacgtacacaaatatgtaaataattggactaaaaaattcttctttatgtcaaaacagtagagggtgcatcaaaatagtagaaccagccaaatatatatataatatatttttaagatataaatacgtaagtttaattttcggttgcatatgtatacttaagtttaactctctgttgcaaataagtacctaattttaatttttaacagtaataatacataagttatatttctggaacttcgaaagtagctaacagttaaatgtctactcattatccacatatcgttttctaattggtatctttaaactaattttttttaaaaaaattaaaatttaatgacttagaccaatgaaatttatttaacacttaacagtgagatacctacagaaattttataattataacttagacattattatcgctaaaaattaaacttaagtatttatttacaaccgaaaattaaactttttatattgcaaatttcttctttttattttccatttcctccaatctcattgtgctcaataaaatatgtggtaattatgatttttttataaaaaaaatgacgtggcaacctctgattggagaagacactaaaataccaagacttggctctttctctctctctctcatctgatcgaagagaaagaaaggaatcacttagacaaaaatggcgatgtgggtttttggttacggctctctcgtatggaaagccggtttcaacttcgacgaacgactcgtcggtttcatcaaaggctaccgccgcgtattctatcaaggtctttgattttttttttttttattttggatgggtctctctctgtgttcttccttcgtttatcgatgtctgtcgttttgtttgatttgattgtcgttttgtataggcagtactgaccatagagggacaccggagtttccagggagaacggtgactttagagcctgccgatccccgcgaagtctgtgtaagttttttttttttttttttgctaaaacgccatagcaatgctaaattttcagttggtatctaaaattttagcttagttattattattattattattgcgttttaatcaaatatattgacatttgagcacttgggattagaaagtgagtataggaattagaatgttctgtaaaaatagcttatatgaaattttttataatttaaaataatcttgtatagtccaaaaaaatgatcatgaattataatcttcgatcataaacaatcattgtggttgcaaaacgactatataaaataaattaagtaagattattttgtaaaattttagtatttcactagtatagcaaatttcactaggagtaattagcagttttttttatatatattaaataaaaactataaatttaaattatgttggactcgatatttaattacacgataatattttattataatgttgaacacttctcatattcttcagtattattagtacaatttaatattgaaaaacataatttaatttaaataacgcgctgtttttttggtattgaacaccttatgtgcttaatagcaatgtgatagcacaatagtaacaagaactaataaaatagtagccaaacaatgaaaaatgtatattgaatatatgagtaaaccaattacaattgatgggagaccttaacccccccaaagattttactcaatacactacatacccattctcattctattctattacttacctatttatactattctattcttcactcaatgaccatcacaatgctccttcactttaattactacctatcttaaaatgaattttgattgattagaaaaagttaccacatgaatgtgtgtagtgtcactagatttggagttgattacctcactaactttatagtaagttttgaaattaatgaaagtgacaatatttatgtttgattttgtgaggttaatagtggggtgctgcttataagattaccaagaaggaagaccaagaaattgcattaacggtaagacttctaaatcatacatacaaaagtatgaatgaattttctatgtgttttattccacattgtttctaatgctgtgcttagatttttagtgagagtttagaaataatgaatacaatatttcactagctaagatgaaaatatcataaaaaaataacatttaagaattttctaataaacatataattaactatgaagttgttgtagattttaattttgtcaagttttacatgttttgaaaaacattgttatgagtatatataagatgcatttgaatgattttttatttatacaatttcacttttgtgtgcattgttccatttcatgcagtttgaaaaatctttcacacttctcatcagtcatcactgtttacttgacttaaaccatattaatattatcttaacaaaactctctctctctctctc

SEQ ID NO: 15017 - DNA, 9629 bp, Cannabis sativa
aaatacaaagtaaatgttagacaacaagatttcatagaagtaaagaggcctattaaatgccatattaggcaatgaagctcaccatcggtacaactatcctgtcacagtttgttcttcttaaaaacgtgtaagaaagaagaccaatgctttgagtcaatatcctgcccacagaaataagagctaaacatataattcttcatatgaccaaaatttatacacaataagctgctgaatgttagtttgaactaaatgcaaggttttagtataaccaaatctaactttcagaagagaaataacatatatttgacattccaaaatatcatacacatctactacagcctacaccatattcacaactcacagactacaaaatatataatggaaaagtgggttcctgcattaaccaaaaagaagaatatccccttaaataaaaggtagagatatgcttcgttacagattaagggcgtggttgatagaaggtaaggagatgtactttgtccaactacgaaacttggaaatttaataacattaaaattggacgaacccattattcaagtggcgactgaagacaataacatcagcaccaagtctcattgtactagtcttgaagccatttccatctgaaaaccttatataaggtaattaatttgaataacatacaaaaaaaaaatgaaaataaacataggtagaacttgtacattgtccaattgctgattttgatttctttactgtaaatccaaaactcatgcactgccgcatagtatcagggcccattccaccaccatcatctaattaaaatacacagttttagaaacaatgaattgcgcaacacatttgcagatctaccaaaaagataattatgtacaaaaacaaggcaatgcctccaaactacactttattcctagatagagattgcacacagtaccttgaattaacaaggctggatttccatctcttggattcaatattttatcaacagctacaaaagtggccccattttggatctatccaagtttttagagaaaaacaaagaatgaagtttaaaaattatctgtcaagtttgaactactcaatattttcagaaaacaatgtcatattcaagaacttcgttattaattaaagtagagactaaatagtaccatagttaatatgtttcaaattcaacttttaaaagaaataagccaaagacccacctgaataaacccatgtgaaaacactcctttcataaaataagccttaaaggctacacaatcttaaactttctggaaatataaaatgtaccattccaactcttacaactaaatttaattttttttttctatcaaatttatggcctgtccattgattcattaattaaataaaaaattcagagggtcaatgttaagaaaagacaagttaaacaattaaggcttacctcatcaattgcattgtccagcagttctgctatggctgcaagcacagattaaattcaagtgagatcagttctattacccaccataaaaagtagctttttataaatgagaacaagtttagttcatagaatatgaacaataccaccaaatgcccacttatgtgaagtggcattggaatgaagaaacatagggtggacttgtagatagttttttccatctgcaatccacaaagtaaatgttaaagatatgtaataagcattgacaatcatgtagaataattaattattatacaactttaaagtttaatcaaccatccacattatgtcatcataggatttcaatgaaagttatgctttccaaaacattcacttgagagtttgatataaagccctaagtacatgtgatccaaaccaaaaaaactacaaaaaattatcatatgttttcatcatagcccatatgtacgaatacacatatttatttagctcattgtacatggcaatcactataagaggtcacaaatgcaaaatccaaatgtaacttcattaaaaagaaaaaaacccttaacaaaagacttgcattgagttagtaaagagaatgctaatcgaatctttgtgaggaaatctaagaacttgggttttccaattgtgatcccacaatcttttaatgtgctgtttaacaacaaatttcactaatctagaaaagaaagtagaaaattttggtagggtgaaatgtattcatggctgcatgagttacttacgctatatatcctcataagaattcgttaggattccacatcaactaagtatgggattacttgtaacaaatagtatcaaagccaacaccctctaataggacatgtgatgaaagttgcaacctaagaggagctcgaaatggcttccatagagtgtgttcctacgtagtgagtcaccatagagtgggttgtcgcacagtggtcaccatagagtgggttgtcgcacagtggtcaccatagagtgggttgtcgcacagtggtcaccatagaatgggttcctatggaaatcgactctaaaaatttttaagataggtcggtgatttataactacttgaatgtttgcataaatcttctgaaagaaaattctaccttagtaggtgtaacatacaactagccaccttcgaggaaaatttgatttacaaaacttacagcattttcctaacatacttctttactcaagaaggttggaggataatgtatattaccgaaccataagctccagaagaccatattcgattaaaatcttcaatgcttccaatctttaaaggtctaggttctattgcatccactttttcttttttggattttaaaccaagtctaacccaacttatcccactattcctaacctagtgagaataatgataggctattcaacacgtacaacctagtggttacccttcaccataaaaaacttaacaagagagacctaaaacctcaaatagaaaaaggagatacataagactaacctacaggctacacccctcaatcatcaaataacttatcgagagagacctaaaacctcaaataaaaaaaaggagatacataagactaccctacaccctcaatcagcaaatataagacaagtgatgaaaactaaacaaagcttctaggaaagatctaaatttatgaattgttgtcaggaaggaggtgagaatatgtactcaacaaacatcatattcttactttgtatccttcaccagaatttcgagcatttattactcaattgacctcaacattagtcctaacttcaatccaaaatatacaagaactttgtggagagctgtcacgcatgaagacagatgaagaaatgaaggccctttaagggaaaaaaaaaacctaagaagcggtgaatctacgtgatggaaaaaaataaaagtcagttacaaatggatttgcgctatcatattcaagcataatggatccataaagagatacaaaacacgtcttggggtgaaacgatatactagacatatgatattgattaccaatagacatttgttctagtaactagaatgaatacaattagtattctcctataacatgcaataaaccttgattgctcattgcatcaatttgatgttacgaatgcatttctaaatggatgccttgaagaattagtttgtatagatttaacttcggacataacaaggtcattcttaaggcaaggatatgcataatgagaaagtctaaacaaactaaaataatctacaaaagtttagcttgggagatttacaaaggcctaactagagctatgtggaccacaccttgtttatcaagtactcttataggagaaagcataacataaatgagtgtggatgcattgataacctagaggtcataatggaatcatatgacataactcgttagatacttcaaaatcaaagcgggaaaactagaatactttctcaggatagaagtgccaaaatcaaaatgaaggataaccatcaaaataaaataggattaagttccactaaaggagtcacaaatgtaaataaactcataaaatacaactataagttcacaacttgtaaaatttcaaagaaaaatagcatgctaataaatggatacacggaaaatttgagggtaacttattcgtctattgcatacacaaagtagagttaatctaggcatacttcatgactctaaagtgtaatgagctattttatgaattcaccataaccctacatctaattcttcaattattaaaattataatctaaatatatactatggaaatttatatccacaaaatattcaactaattataaaacctaagttcttgtggcatttcttttaagacagataaaattagacttggatcgaagtttaaaggtgttagtaagaattactatataaaaatcttcggctctaccaaatatagcatgactttcccgacaaaatggaataggagatagtgaaatactttgaagtgcgactttggaaccaagagcattgttgtagttcccagctttccaaaattgtcgacatataggtgctgaagacatagataatgtcgacgaaagacatgcattttccattggagattgcctttgatccaacatactatgactagtacgtgaaacatttgggctctccacttcactttcatgtcttgaatacatggttttcaacatttgatgctttgacaattggactttactattcttgtctgattgcaatgtactccgaaccaaatgtggttttaacttaataacttctacatccaactctccacgttcatcatcattggataagtccacaacctcgataaaagtcatcttgagctctagagaagtgaaagatgtacacaacaaagtaaaaatgttgaacataaaagggaaagtatcaactaaagaaagagaaaaatgcatcaacagaccaaacataaaagttaaaatttgatgagaaatgcaaatcaatcacaaggattgaaaatgaatcgtcccaccctaccaattcaccaaaactccctagaagtcgatgatacaaaataatttaaatttgggcacacaatgcataaagagagttttattctagaaaagatttttatagtgtttaaaagtaaagatagagtttcctataaacacatataagcttgcagaattagggttttacacctaagaaaagatgaaaacaacaaaagcttggtaataacgttcacatacttgattatcaacttagaatgagaatactttcattgaatagggtgagaggcagcatcaactattataaaaacccaagtagctctttgttacacaccacctatatttctagcttttccaccttagtatgctcacctttagtcttcctttcccttttttttttggacattggaggaaggggattcaaacttgcaaccacttctttgtgaggagtagtgctattaggctaagtctatgactacacattcaatcttcctttaggagcataagactagccaacttacttagtcgcgacttataaaatgtttaactatcacaaatcttttcttaaggccattcttatatcatttgtatcatctacatttgtgtggtacttttcccttttaaatatgtgaccaacaaaatatttcaaaaatatgattcaaccctaaacatcattatgcctgaatcctaaagtttgcataagctacacaaaagtttgactatgtgagataacctttcatatactattgatcttatttttaaattaactcaaacaagagttttttctggtcctatagaaaggagggaggggactaccaatgtggctcctctctcttagcgctaccatgagagctatgtctactacacattcaatcttcctttaggagcataagactagccaacttacttagtcgtgacctaaaaaacgcttaactatcacaaatcttctcttaaggcctttcttgaatcatttgtatcctctacatttgtgtggtacttttcccttttaaatatgtgaccaacaaaataattcaaaaatatgtttcaaccctaaacatcattgttgcctgaatcctaaagtttgcataagctacatagaagtttgactatgtgagataacctttcagatattattgatgttatttttaaattaactcaaacaagatttttttctggtcctatagaaaggagggaggggactaccaatgtggctcctctctcttagcgctaccacaagagctatgtctatgactacacattcaatcttcctttaggagcataagactagccaacttacttagtcgtgacttaaaaaacgcttaactatcacaaatcttttcttaaggccattcttgtgtcatttgtatcctctacatttgtgtggtacttttcccttttaaatatgtgaccaacaaaataattcaaaaatatgattcaaccctaaacatcattgttgcataaatcctaaagtttgcataagctacatagaagtttgactatgtgagataaccttttagatatgattgatgtcattttcaaattaactcgaacaagagttttttctggtcctatagaaaggaggggactaccaatgtggctcctctctcttagtgctaccatgagagctccaaccctactcaagagtgtcccttatctatgataaggtgcgtcaaacaagaatgttttttttttcgaaaataaacaagtgttaataacacttttttaaaattccctagccctaatgcttcataaatatagcaatgacataatatgaataaaatattaaacacaattgtatataaaaataaattttgtttccaaattacatgtgttcaagataggcccctggtccaatgtgtctaccaaaggatgaaagaccacaaacaccaagcatgagttttattactacactttaattcaatcttcgtgtttgatgtaattgttttaggctaaggtgttctttttgtattgattagtagcttttaattaggatattaatgcgacaagctttattagctatgcatagacaactaaacttaaaatatcagggggttgaaagagtttagaatttagagaaatctcttgagtgagatctagccctcttgaaaggttagaataggagagaaagcctttgaaaaagctcttctgtttaattctttagtgattaattaaagtattctagtgggattttcagcaatcttgtgtaaatttaattgttaaactttttctagtctaatataaatctagcaaattggtgtggtgagcatagagccatgggacccaagaaaaccatggacaataacaccccaggatccaaccttgcagttaaagtcaaagccctgagaatgaagataatgagtcaaggagtctattaaagagatggggcaccaatttcaacagcaaatactgccacaactcaaagttattcttgcagcccaagaacagtcaagaaacccccaagaaccaagggacgaagtgattacaattcctagagtatcaaaggatgcaagaagcataggaattcagtcagaacacaactatggcgctgccttggtaccaacaagcaaatttcatggaaatcaatgtttgagggaagatctttcgaaagaggacagccaaaaatccatcaaatatgagcatcgattaaagaaactcaaaatgccatctttgatgagacaatcctaacaggtggattatgcaagctaaaagattctttacttgtcataattatgatgagaaagataaaacatagacaatttttatatcgtattcgtgggaagctttactatggtaccagtatgataacaaaaggaggaccattctcagttggaaggagacaatacgaaaggtactttggcactttcgagacacacaaaactccttgcacaatcaaattttgacagtgaaacaagaggtaactctctccgaatataagaacaacgtaaacaagttgttggcaacattggataatatcaccccggaagtgcaactttgcacgtttaccaagccaattccacaagcgataagtcagtaaaaagtaattcttattaataggcaccgttctacttactaaagaaaaattcaggttgtaatggaacggttgcctctgtacttcaatggatttttgataaaggacgaacataggggtttagggtgtttgcaccatggtctagcatcacaaaaacgtattgggcaatcaactttgcactatgcttgaatttaggtgccccactatcccgatatgcttttcacatgaatttgctctcttgctcgttttagtttcagtgggtgtttaatagatgtagaaagtacttaacaagaaggtgcaatcagccacttgttgcggaccacataacactctcaatgtccaatgttagatcacgtagtttggtcattgtcctacagcaactagtgaggttatggaggtgaatttttaatagagggggagagcacatcgaaggatgcaccacctattaccacggagcctgcacaaacttggaattcgcattggtgttagagtcttcctcaatctatgaccatataggcactgctcactcgctaagaagactaatgataaactactagcaagatacaatgggcctattctgattgtagaacacattggccaagttgcttataagctccatctgcaatcaactactactatataccttgttttacacttctcccaaccttgatgaaatctcgtcaatattcgattctccccaacaactcacaaccaacttttagctccgagtagaacatgaggtagtgctgcaaagaacttgtaaaatggaagtcactaccaacattcgaagaagcttacgaagattatactaccaacagtaaacaatttcagacaaagtgaaggttttagggtcaatgataagcccctgctttgatgtgtctatcaaaggaagaaaggccataaagggccaagaatgagttttgtagagtttcatcatagcagttttatttagtttcagtctttgttttaattgttttaggctcagttactaacttttaattagattgttgatgcgccaagcttcatcatctatgtatagaaaattataactcaatttcagggtttgaaagaattttgaattgagagaaagcctatccaatagttattttgtataattctttagttatcaataaaaggattatgggatatcgacattgttgtgtgaatttaattgttagacttattctaatctaagaaaattcaatcaaactttgtcatacaattttaaatgatcaacattactgtaattagaattgtcactatcattcccactagggatgtctttatccataacatttcaaatttgatcttcatttacactaatattttcaataggatcaaatgtgatttatcaatataaaatgaaaagaaaatttttagatattcgaaatcggtattttaagatacaatcaatcgaaggggttgatctaatccaaacaaaagaaaaggaaggatttcttttaggaaagggattggtatcttatatgattcatttcaagaaaaaaattactagatcaaaaatttttgattgaaaacaattataaatctaatgttactttcagtaaaaatttatgataattgggtattttggtttgacactgcttcacacccgaaaagaagtgaactacgtctgagttaaacttggatatggaagtcttctttcgtttctcgacggtgaagtaagactaagctcatgagcttattatcctaggtcggaacaagttgataggatcc

SEQ ID NO: 15018 - DNA, 3718 bp, Cannabis sativa
tcccggtttactacttgaaagagcttcaaggagttggccatggcaattacgagccactaagccagtcccataccatccttccgcctcaaagatagctccagtctcattctgtcataggattttaatcattgaagaaaagtaaaagtaatttacatttgtattacattattttcgatattaatatcattattaaaactgaacaacaaacagaatgaccaaaaacattaatatgaaaaaaggctgataaatgttgtttatttttaattaaattcaaaaataaaaggtattgtgttcacgtattcacgttgagaatgaaatgtttataaaatgtatataattaagaatattaatattaaaactaaaagtaggcaaaaatataaattgggttggaaggtagggacaatggatggctgggttgtcaactacaagtaaacgcagtccatatttgaatgtattaaaattggactaacattgaattaggattacgttatgaagtggtgatgtccttatcatcaaattcagagctttaaattacagtatcaaaacacaaatatttatacataatatacataattattattattattattaatataattagtgtgatgatgataagataacttggtcccatcccatgccaatcagctgaaatgaatgagaaaataacaaaggaattttaatcatacattagggggaaaattaaaaattaggcaaaagttaatacctattggagaaagggaaaataggtgtatattttgtggagtactaaaaatatcctttcatacacttctcctccctcccagcaaatcacatttccttctctttctctcttcactatcttctctcttacctcatcttctctcattctccttaactattacacattaaaatttaaaatttagtatacatttcacctctccaaactactacaagtaagaaaaattagtgtgagaagcttttcttagggcactgaaccaatttcgggaacaatcaatgcgtaagtgatatttttttatttatttttgttgttggttcttatatttagtttagaatgttgttttgatgtttgatctgtggattgttgttattgttttgtgttaaaatagttgttgtttgtgaatactgcattttttctagtttctaagttttttttttgcctaatccaatggtgcccgataggggttcgatgctagtccgttggcaaactcagatctaaggtcagggatgatttcctgatgggtctaatagtcggctcgatgtgtgtctgatatggtgtaggacctgttgggtatatagggtgtctaatgttggtcgattgttgtccgacatggcctaggacctgtttgggtccaatagggtgttcgatgtgggccaattggtgtccgattgtgtgtgagttttgacgctagtgtggatccgattgggtctgatgggggtctgattatgtgtccgatgggttttcaattttgaattctgtttgaaggactgattgaggtcgatacaggttcgatattggtctgatgtatgggcaatattactcatttcatgaattatatttatcatatctgattatttttttttcttaatactattttttatgtatgtggatgacgggttcaactgtttttgcgttcgttatgtataatggtatttgtgagcttgggggtagagattggatttataaccaagctaaaaatttgacattcgagattgatacaaacgtaacctactcacgtttggttaagcttttgtatgaagaactcgatgttgacaaattgtagtatgacttgaaattggaaatgaattataagtatatgaaagggttaatgtatcaccctgaggttattagaaatgataagtgtctaaggttatatttgtctatgcttgcaaagatgtcagatgaatttactcccttatttgtgactttggtgaagaagaatgtctgtattgatcctactcctacatcaagtactattaaagatactcatggcaagattgggagttccgttctagaaacaaatttgaaggtgttggcaatcgatgtgttacctgaattaaatattatgatgtcgtcaggctgatattgtagcgcaaatgctcgttcacgatgattttggtgatggtccaaaccttgaatggaattttgatggcaataataatgtaagagacaaccaagagacagaggtccctgatgtagctttgaacatgactccaatatcatactaaatacccaggcaaccaacacatagaagaagatcccgtggagaagatttccaaacgtctgatactagtagtagacatccagacggaatcagtaatgttagacgaaccactgatggtaaaggtcatagtgatgttgtaagaataagtgatgctagaaggaccgctgatggtagaggtcctagtgatggtaaaagaactagtgctgctagggggacaattgatactaaatttagtgattcattttcttctttgaaaagttacggtaaatttaaggagaaaatatttacaagagaagatatcgagaataatagtcattatacatttatgggtggtacaccaggtgaggagttacatctaggaaagtttttaaagacaaagagcatttgaagatggttgttggcttgtatgcaatgaagaaatggttcgactgttggtttttatggtccatatcagagttataaaagtgaaagcgaatttgataaaaatatttttttatccaatatgaaccataagcccaatgatctcaacataatatctatatatagaagattaaatctagactaatgaaatgaaaagaagacgatacctcttgtagcctatcaggggaacctcgctatcttttagtataattacgattatccaatccaagaactattgtgttgtgaagaattcacaccccgcaatcttccaagctagccttaacactcaggaatagagtgagctattagatcttataggatgaacaaatttatgtattatagtgtattctcaactcatgagacattgtaattgagatagagtatatcacaatctcacacacaccttgaatggtgtaggcatgtgagatgagaggagagagagggagagagtgaggcgtgagaagagagagaatgggagtgaaaatcaattcctattttctctcaacttgttaatgtatttcttaagtttttgtcatctgtcaatttatgatactatatatcctatatatagtgttataaataaaccctttcaatcatttattcaaataaaaagaaaatatttaatttgatttgaatttaaaattcaaatataaatatctaataattgcttaacatatcagttaaaccttttattttattattatttttttaattaaataaattatcaaataacatatttaattcaataattaaaagataattatttaatttaaattaaattatttttaccaataaataattaaacaaaatgaacacgtgtctttatatgtcaccttggacgtgtggaccagacctacacgtgtgggccatattttaaggtccgaaattaattcctcaattttgccataaataagacttattatttattatgtcaataaataataattaattaattctcattaatcacttatttcacaaggattaaaataaatattattttgtctaaaatgatatttttctctctttaatattatttaagaataatattatatttaactatttaatatagttttatc

SEQ ID NO: 15019 - DNA, 10406 bp, Cannabis sativa
  modified_base (287)..(304): a, c, t, g, unknown or other
  modified_base (5861)..(5863): a, c, t, g, unknown or other
  modified_base (10173)..(10180): a, c, t, g, unknown or other
catgttcttatatacttatatatggctcaattcttctactatttattctatgtgggacaatgtccacaatacctaataatgccattgttgattacttgcttctttcccatggttgttggaattctagtttgattactaataatttttctgagaaagggcggatgttatattcttgctatacctcgagctcatgttcctttgaatgattttgatttggcagtttgagattatgtcttttaaatttttttggctattaaaaattttccatgaattattgagattgttannnnnnnnnnnnnnnnnntaattttattcaattttactaatgcggtgattgtccatgtactaaaatcatgcttcccaaactttcatatctaccgaatcatatttttcaaattttgatatgtattaaatcatactcttaaactttgttccatattagattttttttactaaaattagacaaaaatctttaaatctatctatctcaataatttaggaaaatattttagggatctttaaagtttaggaaatatgatgatttagtgatgtcaaaattctagaaaaaaaaaaaaaaaattgaagtttagacaataaaaagagagaaaacatttgaaagtaaaggtttggataattcctttccttcccttagcgtggcgtgggggttgaaatctgactccgtccattggacgttccagatttattacgctttagcttacttcccttaaccggacacagctcatccttagaaaaaaacttcatcctcatatataaataaatttctatttttaatttaggcattaatttgattcatttttttttttggaaaggaaattaattaattaattaattacttgtctccaagcattatgcaatttgtctcactggtaattggtcggccaagaggagagttggggttgtttaggtggggcccaatttttctgggccccactccagatctacaaataacgctaataatcatagatacagtaacagtagtagtatataagatcagatcagatcaatcatcaattcattatgtgcttacgtcgacggctaatccaacggtttacaaggcgccgaaagcacaatacaatcggctgagattgagagagaaggctctctaaacaaaacggcttcaacttaaaagcgccgaactaaccaaggaaacggtgccatgtcagcacataagaataagcgtttttcttaaataaataaataagaaagaacagcttgtttatttttccgctttctctttttttatagctatattacttattagtattcataataatttctacatatgaacacaaatggaatttctgcagagctccgggatccgcgtttctcgatcatagcgaaagagtttcaaaaaaaacccatttccaatcttcttcttcgcgcgtaatcgtcattgttgacattctcatctactttcatgtgatttttctatccttttcctttattgatcattatcagttttctctgatttgcgatgcaatttttttttttttttggtttttattcaataagaagctaatagcttggttgttctttacattgacgtggatttggggacagattttattacgatttgtatcataatctaaatattctaagcctaatttagaaattttctttttcggttatggatgtgtaataactgcttttagaaatcacattattggattttgtttagtgcaatttttgttggaagatctttgtgatttcttaggcatggccgatttctcatcattggatattgatcttttttgttttttcttagcagattttgtttgattgcaagagatgaaagtttgaagggcatagcattattatttacggagaaggtttactgaaattttcttttgggtttaaatacgtatattaaccgaaaaaggaaaaagggaaagaagcgagacaatgtcaacgaggagtgaacatcacacggtaccactttcggtgttactgaagcgtgaattggctaatgagaagattgagagaccggaattaattcatggtcaggcgagtcagagtaagaaaggagaagatttcactttgattaagacagaatgccaaaggatggttggagatggcgtttctacctattccgtttttggggtaatgattattttttttttcctggacaattttttcttaacttccctgctaagatgaagacttcagttagattcaattgttcgtcgtcgggtggttgactgcatttctaaactccgagctagattttcatagaatgttctttttttttccttgacatttctcgtgcacatgtgttggacgactttcatttatttatttttatgatattctgatatatgaaacacccatataggcattatccttcgtcaactaggagtgtaatgactggtctacttttgatttgttcaacgtggctttacaatcatttgtggctttctcaacataggtgtattgagtaaagaatgatttgagttgaagctatatgttagaatagtctttgttgaaaaggattgagctccattagtggaacatgcttggactttactattaagttctgtcattttgggatttataattttcaaatcaaggaatgtctttttgagtattaggctagttaagagtttttcaaaatcgcaatatatctcctgtattacttgactatgcatcatctatgtgtttcattttgaactctgtccatgactagctagctccgaactttgttagactatgacaactatatttgaagcatcgttgtgtgactctttgcggaacagaagtggataaaaataggttcataacttaacagctcttgcatgtttcacagttatttgatggacataatggatctgcagctgccatttactctaaggagaatcttctaaacaatgtcttaagtgccatacctttagatcttaacagagatgaatggatagcagcattgccaagagctttggtcgcaggctttgtcaagacagacaaagattttcaagagagaggtacagttgtcatttctatgttatgacattgttttccatttagcttagtttttaatgatctatctgtttgtaagtttttcggtatgtatgaaatttatatattgttgtggttgaatttcagcacaaatgtcaggaacaactgtcacttttgtgattattgaaggatgggttgtaactgttgcctctgttggcgactcccgctgtatacttgaagcagctgaaggaggcatttattacttatctgcagatcataggcttgattgcaatgaagaggagtaagttataaatatgatgttaatgttatgtttccagtggttatgttataacaataatatctatgctaagacattttttttcttcaaattctgttaggagatcacgtatcactgcaagtgggggtgaggttggtcgtctaaatactggcggtggtgctgaggtaactccctattgtttctctcgatatgtttaaagtggggagttttccaattgtctatttcgttttgctaagcgtgcacttctcccacatttgagcatcacatcttgtagtattgatgcatgaagcttaactgaaccaaccaaacgtcatatttggaacttaagatgtaaatcaggacactgcacatcttggatgatgagagtaaaatgggtttaaagttcagaattttttataagaaagatttaggttgtaggatggagctaaaggcttctctttttccccctaaaagtttctgctttgggataattctaatcaaattatcatgtatgctactatatactatgagatactgatttcctattatcatgtttatgcttttattttttttatcagattatacataactaaagtttgtaaatcactttgggtatttcgtagattggtcctttgaggtgttggccaggtggcctttgtctttcacgatccattggggatagggatgttggcgaatacattgttcccgttccttatgttaagcaagtgaaggtttgtttgtcctttcatgtgtctctcacattattctgctttcttttatttgtttccatttgcctagacagctttgcattagatttttctttactctcctagtgatagtgaggattaatctttttctcctgaagtttgtgtagatagtgtattataatataactttggtttttctgtacccgtgaccttcctatcaaaataatcatcttggtgcaatgatcaattcacaggcaataaaatatttaccttcaattcaagggctaaaatagtagtatcatacaggttagctcaaatagctgccacaaagcctgaggtttgatctagcttttaatgtttttgattgacaagaaaggaggtcttgtttggccaaaatgatttgagttttgatgaaattaagaaattttattccttcatagaacattcttttattttttatttctaactactgttgagttgtggtaaaattactttagcccttgatgtttcatttaaggtttctacttttttatgaatagaacattataccctttaaatttggtcaatttatgtgggaaggctaacattgcagcaatatcatagtttagggtgttgcattagtaaaaattaatcttgtttgacagtaattgggatggtattttaattttaatttaaagtagtgatcctctcggtggaccctataaagattgtataacaaggtttagagtgatatgttgcttttggagtcaagctaatatgggtgaaaatgtaaactagtagttttagttattttgattattttacatatttgggacaaatttttaatgattaagcgcctgttatggaattcttttacctgtcctttttccttcttgaatttttgtcacttgttgttgctcaatatgtgcctgattttgtttcaagctgaacttaatgatagcatttagattaaaactctctcttgtagtgattgaatttgaagtcattgtttgtgatggttcaaataacaaggagtggtttcttctggcctattatttgtgacgaaacactggttccataaagtcatatgttcataagccatgattgcattctttcctgggaaagtctctgcattttcagctgaaagagagctgtccacttgagatcatctattttcctctttcaagacttattatttctcaagtattgatcgatggaattttgctgttattctttttaaaatttcttcctttgtctctcttgaaactttctacagctgtctacttctggtggtaggctgatcatttcaagtgacggtgtttgggatgctttaactgcggaagctgctcttgattgctgccgttcgatgtcagcagatgctgcagctacgcaaattgtgaaggtgcatttacaattaaaacttatttattgttttaaatataatctacacagaggttgttgattcacatcacatgcataaattatggatagaaaactctcttttaccattacaccttttgatgcgatgacaccactaattttctgttttcacgttgtatttgttacatttatacatataatatatatatttgttaaaaaattattttatttcttttccaggaatctttacatgcgaagggacttcgagatgacacaacctgcattgtgattgatatattacctcaagagaagccacctgctccgctgcccccacctaagaagcagggaaaaggagtgtttaagtccatgtttcgtaaaaagtcaactgaatcaacttcttatgttgacaaagagtacatagagccagacgtggtggaggaattatttgaagagggctctgctatgctttctgaaaggtttgtgcttgaaaaagtcactatcaacttaacatgattgccatgagaaagttctctctctctctctctctnnntctctctctctctcttttccttttctttttagtgtcacctttctttctttattcttgttctgttttagttcttcctgtttaactttttgggggttgacctatgaacagagtatgtatgaagttactcagcttttagtattttgacacgataaaggcttgtgttgattacacaggttagacacgaaatatccactctgcaacatgtttaggttgttcacatgtgctgtttgtcaagtagaagtgaaaccaggagagggcatttcaatacatgccggctcatgtaatgcaggaaagttgcgtccctgggacggccctttcctttgcttaagttgccaggagaagaaagaagccatggaaggaaaaaggcattctgctggtaatgatctttctctcctatcactccattggcaataaatttcgtcatacaacattcaaaattaatcattgttttgttggtttcagataggtatagtagtggaagtgaatagccaacaaccctccacgggtatttttgcaatttgagagcattaactattattttgaagttgatcataattgggaagctgaagctttttcaggagaatagtttatctgtgagcatagcattttggtccattgtgctgttcctacttctattagttggaccccaacttggatcttcatctcatcttttcatgttccaaatcagaagattccggctacacaatgcttgcattttcagaagatctcttttctgacttcagattcagagtgatcaaaacagtgcaaaatcaaacctttactgaaaaaaaaggtgggtattgtggaaggattggataaaacttgcctgtgcatattgttttcagaggtaataacttttctttctggatccacaatgttccagttcatagagttactaacattgaatgaaagtagtagtttaggatgtaatattattatatacggagttggaaagagacctcattaactttcatttcgaattaggaaatctttgtgtttgtaagcaatctgaagttaaaaagaactttgaattaggcaattaatttttttttttctctttttccaaagagtaatttgattcttagctttaacaatgctgttctaatgtgtggattctgcctccctatattatattgtaaaactattttaccctaacttaaaccattttataaatggttgaggggatttataatttaaaggttgtcatgattttgtcatttttataatgtcctgttaacaaaaataataacattaataaaaaagaaatatgtggtgtgattaaactagtataatttgaattggtgtgatatagtggtgatgctttgcatcacggctgtgcttatagttatctaccacattattgggaccaagaagcttttttagggggcaagacgtagacaccagttgtccgtagctttgtaataagccgatttacatgtgcacttgcaagcttttttagcgactaatctaatataccaaatttttttatggatccacttatatctacaagaaagtgatggatgttacttctataagaaaaataaaattaaaatcagcatagccttttttttttttggcttcggtcttatcttttgaacaaagaagtgaagctatggatgaccaattgtgttgtcattgaagtgaaggaggaacccacttaggacctttctggtttaaaactgtgacaaaatgggctgataaattttcttaaggaatgtttgttgcctgtgaagtttcacatatcaaaactagttatccatagggaagagaattgttttgccaccaactgtttttggggtcctactttttcatatgttcgacagacaggaatgtggcttcttctagagttcataatataaaaaatatgaatcttttaaagctcagcttggctgtatttgtttttgtaagctgatttttttttctttttttgctttagttcaattcttttagggccgaaacaatataaaaatagaatttccatatcccaacagatacattcatataggggagggagaaaattgagaatcaatgaatgggtttattgtactttgaagaaagaacaagattacaagaattatgggtggcaatgcaagtggaaaaagcctcctttccgacccaaagagagttcccacgagtactcagagtgaggacggagtgcgaaatctttgttttatgcattgttagcatctttcttatcttttaagaagaagaataatataattttataaattttgagtggtaaaggctgaaaggtggccgtgaggatatatttatccaattaataattatatattaattatgaaaatggtgaggctatgactcagtctaccacaataatgcctccatgattgagatgttgacccaactataccaacaaatttcttctacgctggaatggaccactacgtacacgtgtgtgtggcccagccaacccaatcccctctctttctcactgttaaaataataataacaatcatatgtttcggatctttacctcaaaaaccaccctccgattaatttttttatggcgaatgtttggaatccaagttgaaattgtcacataatttgtacacctctcacttgacctctgtgtttgctttgcttttttctattcctttatgttgtgtctaattgattgattgattgaagagtataggctataaagtatgaatccctacgtgtctttgcatgacccgcttgagcttagtgctataaatatgggtcggtctttttaacaaagcatgaaatcgtagctcgagaggtacgagtacgacacgacacaacaaaaaaaaaaaaaatatgagctttggcacgacacgatacgagactgaagtatgaatccctacttgtctttgcatgacctgcttgagcttagtgctgtaaatatgggccgatatttttgacatggcatgaaatcgatgcccgagaggcacgagcacgaaacgacatgaaaaaaatatgtgtttaggcacaacacggcacgacacgaaaaaatatagacttaggcacaacaagacacaaatatatgagtttaagcacgacacgacatgacaagtttgaaagtacaatacgtaagcatgaataaaataattcgaaaacatgacaaatcaaaaagcctaataatttgataataataacaataataaaataataaatatttatttatcaattaaaattacagtattattcaaattataatgattataattatttcttatatgattatgtataactattattaaaaaatatatataattaaaactataaaatacatatacactagtatttagctcatcaattgtaataaaaatataaaaatataaagtacgaatttgaacttgtataaaaaaacaggctggtttatttaagaaaaataggctctcgaataaagtacgacacgaatttcagtacgaaattaccggacttgtaggccggtcgtgccctataaaattattgtacgacacaatacaatccatattttttatagcacagcaaaacacaacctgtattttaaaaagttcaaaaaatatagatccacaagacacgtatatttacagctacttgagccttctattgacgattcattatttttttttatttaagcgtttatatattacaagcataattaagaatctgagacttaaatccaaaacctccaacatacacgtactctcttatgaccctagctcaagtggtttccattaacttttgtcaataagaaagagaaataggttcactattttgttttgcttatttgcggataatattttgattcaatgactttatgactcaacaaatttatattaaaatgtatcgtgcacaactgtacgcattatactcagactctgaccttatgtattagttatatatttttatatacgtatctcctaacttcgaagcctagctaacataaaataaaataataaatctccaagtaatatttatactaagagtaagagtgaaaaagatagaaaatgaggatgtgagtaagtaaaaaagagaacattattacaacctataattatgagttgattatgaggtgtatagttgtagggttgcttttctcaagcaccctttctttgttggattcacctatatatagagttcaagtgtcccaaaatgtagcattacctggtttatcctcgccatttgcattggtaccagctaggtagtcaatcttttttgttagataagaaaaagtcgcatattagaaagaaaaaaaaattcatgtaactttttcctatccaaattgagtttgtaaaccttaggggagagataggatatcgatcacacacatatatatatatatnnnnnnnnatatatatatatatatttgggaagactatcatgtgcatgacttttggacaaatagacaaatagtttctccatctatatgattaataaaaatagtatattataacaagattgatgtgttgttatttttctattgatttatagtcagtgacggatccagaatttttattttgtgggggtttatttatcaataaaaaatatttagacttatattataatcactcttatt

SEQ ID NO: 15020 - DNA, 15727 bp, Cannabis sativa
  modified_base (57)..(63): a, c, t, g, unknown or other
  modified_base (15578)..(15581): a, c, t, g, unknown or other
tttctaaatatacttatgttatttagttggattttattctaaataagaatttactannnnnnntatattatatatatatattgctaaaaaatttttctatttgttttatctggctcgatcaagttataattatttgactccacatttattctatataaaatatggttatataagaatttttagtttatgagaaattattgagtaattttttttttatttttatttaaatcactgttatattttcaaatttcaatgattatatgactacattgaatgttattaattttaaaaattatgatattaaaaatattaaaaaaaaattaaaaaaaaaactaaaaactaaaataaaattaagaattagcttaaagaatgtatgacattttgattctcatcactgaagttcattgttttaaattaaaaatacaaacgcatgcaatataatatttttagtttcgtaatatacaattgaacaaaaaaaacaatccattttgaaattagtaattataaagacgtaagcacaacagaagattagttcacatcacaaatcaacatgtcagcaactgggcaattgaaatttagtaaattgtaagaatgttagcaatatcagaagatcaaaagtacttagcacaattaataaaaaatttatatacaagagggagggacagggtatcatgctctgcttatcagtttcatatcatcatcaattacaaaaacctttttaccaaccccttttctccaatagaaaacctttttaaaccgaaaaaacaaatagagaattgagggaaaagaatgtataatctaatgaataattgtgttcaaagggacattgaactcaaggcagcagtagccctatatactttggcagaacacaatgacaatttcttcactttgctggtttagaatcgcgattcaaaatctcccaactgatctcctgggcacactccccacaaacagtactgcaaccaactttggttccctgacttcgtagtgtaagcaaatgagcaagtttagtgcatttccgtggcacactacgcttcctcatgtttgattgtgtgaggctgctacccaaatcaggttcccgttcatcctgaacatcatttggtgcggctggcctttgctctgctggtgtagtgtcattgagaggaactcgttgtacttcctcccattctaatgttctctggaatacttcccaagccatgtcttgctcttcctttgaaagtctctcatcctcattctcttgtaaaagtgtttcgtgttcatggtaattcgcaatccagctgaaaaaaatatattaaaaaaaatatgattgatagaggtatatgcggaacttccaccaagtaaattcattcacgtttaaaaaaaacaagattgactaaagactgagtggcagccaagcaacaatcaaaagcactagcttcagagaaaagtgcaatgaagtgatcaactgatcatgggaaatcacatgccctagttctcttacagcagaacgaaaaatgacacagaatgaaggatccatctagatatcaaagtaaaatcaaatatgaacatgtaccgtggactatgcttgccaagtagtctttccattaacttgtcagaagagcaacttccatgagaagcagtcactttctgtttgggaaacttggaagcctgtgcacccgtagtatctttatttacttgctcattctcttcatcgagattagtcaagttgtcaagattgtcatcatctccaaagtcaaaaagatgtaacatctcttcctttgaaattgttctatgcacttgttgtctatctaccacccttgcagccagaccctcctttgttacctatttgaaattgaaagtccttaataaaaatttaactgatatacaggcatcacataaaggtgaaattctgtgctgcttttacctgacgcttgtaaattttttcctccatagttccatgtgccatcaatctgtaagcaaacactggctttgtttggccatacctaaaattgtagcacaaatgtttgtttatgtagtctttcaagcgatatgaaaaaataaaaaataaaccttgaattttatgctttttcttttcttttcaagttgttcataaaatatttcgggacaaagaaactatatctattgctatgtaggtcaccctcttgagtgcttacatgcctaagatactcaaatctcagaccttgtagaagcaaaccacatgactgacaattttagcgtaccctccttggatgagtcaagttctgtgtctattgaggtttctgactatcaataattaaaaatcataaaatgccatgccatagatttggaatgtgggattccatgtagtgaattatgttacattttcagaaacaaaattgatctgtcacatagctccaaagtttaaaaatgatgctataatctatatgcactgcacagccaagggttctcttcataagggctgcagcccctattaggccttcacgttgaatctaaagtctaaaccctgatccagaatgaagatcatcctaaaccataaacaaaagtattgcaaaacttgttaaaattacttgcacttgaaatttcccagcaagtaatcaatcatcacatcgcgcttactcggagattagatgtaacccacagccaagtctctttgggtaccaattcttaaatgacacaataccgatgcagtgtaaatgtatccattgtcattatgaagttgatttataaattaaataaattgaaaggacacacttacctccaagctcgatatatggcctgaaggtcatatgtcggattccaagaaccatcgactatgattacacggttagcagcatgaagattaatccctaaagatcctgctctggttgaaatcaaagtgcatttcacccgcttgttaacaggatcattaaaactctcaaccagcttctgtctgtccgagctctctgttcttccatctagcctgcagaacaagggaaataatacgttaaagtagtaattctacaaagctgcagcacacaattcagtttccccataaatgaaacatcacattccaatcttatgaatatgtaagagaagtaaagaaaaaaataggaaataaatgatattgaaaaaacttataaagccagttgagcatatatacaggaagcaactacactagggtacagtctaactgaggcacttaaaataccttttttccaacctttttatgacagtattcattgtagccatagctacaaattttcaagaaattctagataatttaccatgctcaaataaggttcatatagtttgtgcctacattttcatacgcatgggaaatgactgcttaaactgtaaattgtacagaatttttcgaaaatttgcagagtttgctatgactacaatagacatcatcatgaaaaatattagaagtgcttcaattagatggctattttttgccgttaaattgtagtcgctccatatatataagttaaaagtaagcagcatcttcaaacacataaaaaatacgtacaccaatcaattaacaatatttctaacaaatacccacctataccagtcttttcccttcttccaaaatttccctttcttcccttgccgaggtagttttgacaaataacgttctatcaagtcaagtgttggtatgctttggctgaaaaccaatgccttatcacccacatcagaacacatggatataatgtctagcagaattaccatttttccactgtaattaagctctttatagctagtttcatggagaaaatctttccaccaatcctgaaaaagaaaaggccatatattatacctaaagcaaaatatcagaagtagaaatgatgtatttgaagaaggcacaccataatgaaaaataatccaagaagaaaagtcatacaaacttacctttaagaaaaaaccatcatcattttttccaggtgttaccacatttgaattcttctgcttttctgtaaagcataaaatataataaatacacgattatttttaaaaaaaaaaaacctttaatttgacttctataagagaagagcctgtagatagttccataccttcaaaaaccatattatagtcaatgttttcatcactagagctctcatctgcaagaaaattatcaactgcatcttcacgtctaactgcatcttcacgtctaactgaatctttgtcatcctttttcaactgcaagattccagggtggttccatatctactacagaaaacatagcatttcataagaataaatactcacacaaagcaatactaaaaattatagattgcttctctgccaggtcagctttacaagggatcaagtcattaaagcacaccactactacaaatgagaaagcagcagcaccttaaagtttttgtaattccatcccaaaaaggttcaaaattcatattagtaaaagatcagaggcattcaaaaatattaattaaacgtcttgtttcccatttgttactcacatgtccttttcagaaaagataaggaaaatatatatacaagtacatatataaacacttcatgtgtaattttctgttgatttctgtgtgcgagttaactgaaaacataagtaataatataaaatgctagatagcaacctgtgctaaggcctggtaccctgcaaaaaaactcctcttcctaatcttttcagtagagaccctgtcactggcaaatccatgcacatccaggaatctcttgtataattgtctctgcaagggagaaagcttgacagctatgacaaaaacagttttaggtggtaagtccttggcagccacgttcatgtccattctttggacaaagccttttaactgctgatagaggatatgagacctctgattcatgattttcacgtcatccagagttgaattagtatgttgaccattttctataggattttggaagctgcatacacagggattgagttagacatgagatacaaactaacaaagcacccaaaaactgttcaagtagagaattcttgccgattccgaaactcgtgactgcttccaagaaaaccctctctcacaaaatcaaccatctgttacagataaaaataaccacagcatcaatacacattatagatattaaaattacatacatagtaaaccagaattattgcccttaaataaactcacacaataatattccatgagattgttctgtagaggtgatccagttaatgctatccttcgttgacattttacttgtttcaaagcttgggttacatcagctttagtattttttatcacatgggcctcatcacaaacgagtatatcaggtccatcctgaaagttgaaacatatatttatattagaagtaagcatgagaaacatgtttttccaagagagggagataggctaatgagatactaaaatatatatacgaataatgcaaatttgtggacgatacataaaatagaataggagatgttaaactacaaaagactacatcaagacatgatggggaacacaacatggggaagagaaaactttaatgaatatttttttgttgtagcaactttaatgaatatattaaaataaagagtttgagcttgaagtagaaaaacttatgcttatggagaaatctaaccaaccagctttgagaggatatatgacaagttatgacacatttaacaatagggatattttcataattacccaaaaatgacagatcacaaaaatatggatctttccgtttgttcagcaattttacggatttaaacttttttttacactttttttatgttattttcaaaattatactatgttgccttatatttgtattatgttgtttacatgttttcatgttgctttcacaaggctccgtaaaaatgtaattagaaagaaaaaaaaaatcataaaaatgtaaaaaaaaaaacaaaatgttattttaggcattttgtgtaaaaatcccttcgcaatgttataagatcagctcaaaagcccaatatgttgaacataaatcatataaagaaagaaaatgtatcatcacttgctaactatatgttgaaatctcagtatcagagcatgtgggttttgccagcaagatattacaaatatataagttttaatgcctcttaacaatttctagcacttaaaaaaactttatgcattctacattaaactaaaaatgtggtaagtagcagcacttcaactaactagagagaatttaacttcaacttgagtattagctttcctagatcacagtagagattagggaagttttcttaattaaaaactctttgttcaatgctttgttgttttattttgtgcataatattaggactctgttattagtctaaaaaatataattgaataggattatgatagctgagttgtcatgtagttagttgctgagatgaaatgtttgtgagttgtcaaatagttaaattgctattggttggctagttagagtcttcgttaatctagcctataaattctcagattgagtcttatgaggttatgatgagttttgtgtgattatttagagtaaaagattactcagggagttttgccaagtttattgaataacttggaaactttgtaattcttttgagatatcaataaagagcctattccataatgctttcaagaatcggattggactatagtgtatcacgtaactgtatttggctattctgagatcacttttgatctcatttttttgttttatattaaaaaaaaaaaaaacaatagagcctaaaacatgaaaagaaatcaatcaaatagagcaaactattgcaaactacagacattaaaaaataaaaagtaagaacctgcaaggcataacaaatttccctagccatgttccggtccttcacattctttccaaatgataagttccgaaaagcagaatagcctatgaggaagacaccacctttggctctccacttagcaagcaattctcctcttctctccctggcaaaaagatatcatgtcctagatcagatcgtatcagaaattgagaaatcaaaccataagagtggaaataaccaaatttaaactagagtgtactgatgtaagttaaaccacaacaagaaatgcaattaaaaaatctcaagttatattactatgaaatactgaagagccacctagcaccttgctaaaatttctttggtccaactaatgtaatgacaaccacttacaagtttaaattaaaatatatagctgagaatgaatacttcatacaaacctcgatacatcttctagcatgaagacacgcaatggcttcacttcagaaggcctccacttcaagaactcttgccgccaattatgcaagacattgacaggcacaactataagtgcagttcttaatcccaaatcaacacttctcattgccgtgtacaaaaaagctatgacctgcatgaacaaaagatacggacatgacagattctcaagagttagaaacaccatatttatcataaaatgctcatgaggtataagggcacactaactaatcataaataatgttaaagataagtgtttctttataacttctgcccctgcacaatccagcattctcattccaaggtatagaaaactaacgaactaaatatatgtgcaaagatctggagtgaaaaaagaagcaccatctacattctacataagtaaataaatataaaataaataaaatatacacaaatcaatacgataaaatcaacatacagtacaaaattaaatagagcaatggacaagtttcatgcagaattagagcctcacctgaagagttttacccagccccatcgtatgagctagaatgcaaccaagacctttatcacctgatttcactcttgtgacagactgtatgatattttcccacaaaaatctgatcccggtgatctgaaatagttagataagtccatgtcatcacattgcaagatcaaaagagcattaaaggatctttataaaaaaaaaagagcacataaggaaaacctgatgaactttcaatttcccagaaatgcttgggggaactctgacagcttcttcacctttctccctcacaacattcacaatataacctgttgatgcatcaccaagcacaccagtgctagcatcttctgacaaatttccattaaatcctactgagctcataacattagatttgccagaaaactgttcatggaaagacttcagacgctcttgacgttcctacaaaagcgggacatgaacattaactttcggtattaacgtccatatttgacaggatacatctcagatacatcattagtcaaaacatgttcggacaatatatattttggagttgttatgtgcgtatggagtcaaattaatgcaggaataccttttcaattgcaatttttcttttggtctcttctcccaattcagcatcatcaaggatcctccgaattttctttttccgcttcctcttggtactggcaggaaaaatctcaaacattagaatgaaatatataagcaaccgtccttgttccaactagaaatatgaattctcccaaataacaataataataataataataataataataatgaaggattatgagcaatttacacctgacagaaacatttaaatgatctgcatcagaattatcagaatcactttcagagctagaatcaacaatttttccatttcccaatgctctgtctaattccaatgtcaacttctgaagaagacctggacgacaacagcaacattgccaactggacatctggacctcagacaagcactcagcaccaatattcctttttatacaagtcgtgcagaataaattcttacatgatttacaatttaccaagtcaatgctctttccacaccatccacaataacactcagagcaatcaggatcctgccaagtgccacaactacacttaataaaagttccaacatgaaaaaaactaagaactatagcaaattaaccaatccataaaaaagttaaagcccaataacgcagtatggttgcaaattaatacaagaaaacaatgcagaacttccacaacttgcaaagtaacatctcatgtttttttctttgtgatgaacatattataatgacctcagcctgtagacaaatctaacaagtaaatgttaaaatccaaccaatcaatggtggaagctcaagtaaagttggtagaaaacctacggaaaatatactttggtttatgtaaagccttttgaagatggctcatattagataccttaaaaaatataaaactttcatcgtaaactaacaaaggtattgttaacagattaaagaaacctatgaaatgaaatatttagataatgcagagcagatacatccccgcaggcatgctgccaattcaccccagacaagacatcacaacaaggacacacaaaaagaatacagacttttatcatagataaacagaagatagaataaaattgggttcccttcttcttatacaaactagataaatagacaaaatacaaaagttcttgtacttacactaagttctacaactagctactaaatactcatgaagagagtacaaataatcagctgccatgtttatttagttttgtccttcagttacactatgtttggtagaggggagaagagaaaggagggagagggatagaggaattgatgaattcccttgtttggcaagagggagaagggaagggagagagtgatggagggagacccattcccttcaaatacacaatttctaatccctccaaaaatgggggaattgaagaaaaagacaaaaaaaaaactatataaaatgacatttctaaccttcaaaataaatatataattatattaaaaatgataaaatagtaattttgatatttattttactctccatccttccaactttacttctaataccaaacaacacgaacaagagtaactatcctctccatccctcctactccccatcctttcaaaactctccatccatcctactccccctccttaacaaacatagctttattgttattgtttatatttaatgtctttgcctctgcagacctaatcctcgtgtacttaaataatacatataaaacaaaatgagcaaggtatagatatattaactgacgaagccatcaagtgttgcatcatgaaaatgctgtacaacaattttactgataggcataaagtttgtatttacctttgatttcatcttttcttccattatggatctgcaatcagcacaaataatcactttcagaagtggatgtggatgcacctcaatagcaatctcattacaagctgtacagtggaacttgtcattcagattctgggaagaaagagcatcagcagcagattctccggcagtatcctttaaatcagattgatcctctacctcaactgtactgaaaactgaacccttcacctgaaattcatcatcactgtctaatacaacagttcgccttctcttattctcaatatccagttcctcggtctcaataaaatgtttggaccctctaccttcagtagaatcacgtagcacagactcggaaggtattgcagacatgccattacttgttgagcatctcctgtcaccatctgaagtttcaaaaccttctggaaaatcattcttcaaactctggcatgcagttccactctcattgctatgcagagtttcacaatcttctgtagttttctgatttaagacaagcagaatgatcacagtacccatgtcattttccacaaatcaatcagctaaatcagaaaaaaaaaaaaaaaaaactgaccaaaccccaaattcaaatagtaagaaaaatgaagaatatcatatttcaaatagtaagataaatgaagaatatcatggccatgtttggcaggtaggataaggaatgagataaggataaactatcgtaatcccatgtttgttacaacttgaggattggatcactaatcccaagaagataaaaataatgtcccctgcttcaagagtagtaagtgcagcaccatgaaacctgcttgctctttcatactgcactagatgactctttccaagaaaaaaagagatacaacagtaaatgatgaaaggaatttgaagagcgctctacactttaacttatggccacaattcccggatgttttcaaataagaaattgaaggaaaaacctgtttagatctcttttgatatctcctccgtttcaaatgattttgaagcttccgatcaatatctgcatcatcttcttctttaacctgtccccaaacatttaaaatagttttaacaacttaaatatatagctctttcctacatttatttaaagtgaatggtgattgatattgttttgctttattataaaatataggttccacggcaggattttaccaggttctactaacaacaatatgaaaaaaaacacaagcaactgaatcttggaagataagaaaatacgtttactaacttgttatacagtagatagacttacaaataacaagaacaaaaacttacattaaaaaacacactcagggctcgtttagtaggccgtataaaggtcgtattgtattatataacaagtaatagtatatttggataaaacattgtattgtattaattattacgaccataaacttaaatataatgtgaattgtattatttaatacacaacaaatgatccctattagcttgtattataatatttacaaagggtccaggattagggacgccggacccagtcccaaccctggacacgaatgcaaacctgaaccccaaatgggggtcgaagttgaggtcgagtttatggtaaagataatataattctatacaagctatgaatacaagtcaataccaaacatagtattgtattaaataatattaatacaatacaatacaatacaatccaacataatactatacaacacaatataatacaatacaatacggcgtaccaaacgagctctcaataaattctcaccatacagcatgataaaaagttaaacatgaaatataaacaccacttttctaatcaatcccctcaaaaaacatcaacaataaactagaacactcaaaatacatgtaccaaaatgtagggaggttccttctatccaacctaaactctgtcaaaacatcgaaaattccaactagggagaaaaaaaaatacgagggcataccttcctaaaatttttcttttgttcttcagaaagagcaagatctttttcatttgcaacagcagcagcaacaaatggatcagttgaattgccatcaatgtcatcaatttcctccacctagaaaacacattaaaaagaaaaaagaaaaactaagttagcataaacatataccagtcaagttaacaacagaaaaagagataggcgagaacaaacttgaaagaaaaataaaagcaaaaaaactgtatgtataatttttaatcagaatttcaatatgcagatacacaccataaagttagaactttctttctattagattagtagccagcttataaatagctcagcaagaataaatataaaaataaatatgtaacctcgtcgacaccaggaaatttgagacccatttctgcagcctgctgcggcgtactggccaagtaaacagaagcccaatgcttactgccaaatgaaccacaatcttctgagaccccatctgaaaataatttgttcacagaacaccaatcgacttctgaattttctgttacagtttccttacttccatctgcagctagtttcttttgcaaaaatccactagcaccctcctccaatagtttaccatgtcgtctgaaccagcatagaaattacgtttatgttaatcaatttggtaccttgtcgatccacaatcctgaaggatagaaagataccttcttacaggtctgtgggtttgcaagaactcctcagcgtgagcttttgactcggtgaaatcaccactcgcctgagatcctgtccaatgtattcgtcttctccaagcctcagtgctgcaattattaggagcctgactttcaatccacttaaaaatgcttggtagttcaatgccagccccatcaagttgttcctattagaggaatgaagcaaaagtaaaatacagtatttaaaagataacaaaaatagaaattcaactggttcaggggaaagcttctttaacagtagaaaaataatcagcttattacctgtttcggaaaaaaaaaaatgtctatctataattctaaaatgagatacttataatagttgccaaaactaaaatagataaataaaagaattgtaaattaattctaggcattaggcaaccaatgaatgtaggcaaacgggtaatgaaaaattcggctaatattacgtcagctacagttatgaatgctgatttaacctaagcttgcgccatccaacatcataaactcttaaaaacaacagacggaacaaatgttgtacttgtacatccatcttgaatatcaatgtacatcactaaagtgcaaaattaaattgtatcggccattttttgaatcaggaaacaagagacattatgatgaaaattcaaaagtttttagcacacagaatttggtaaaaaaagaattccatttaaatctgcaaaataagatatttatgcaaagacgttaacaggttatcgatatacgttatcaaaaaaggaaatgcaaaaactaaccagcataaacattaaaagagagagaaaggaataatatttcctatctttttattctacaaagcgacgattgaaatgaaattcacataaaaatatgcaaagcctgtaacattaatcaaaaacaaaaaatttactcaaaattgaagaagccataccaacaaatgagaactctctgtctccagctcgtctagcacagcttcccactcttctataaaagtagccatttcatctgcaacagccgtttccaactatatacaagtaaaaatatataagtggtgcataatggtcattgaatgagcaggcaagaattcaaacacagaaactaacatcatcaccatgaagagtctgtgctagttcatccctgacttcactctctactttggcaagagactccttctcaagtgtttcttgagcctctgcagcctattttaagtattaaaataatggagttagaacattcataaatatcagaatatatttaaaaaaaaacagtatattatacatctaagcatacatacaagcgcaaaactaaacccacaagaatatagcataccttactctcaacctccaaaaactcagcaaaaagatcctctatttcttcctcagctaatggttcctgtagtggcattgcaagaaaaaataatacacgatcttaatcgaactctataaaaagaatgaatagtttaaccaaaaacaagtttctcctctaaaactgaaaaccaaaacagctgttttaatttttctctaaattcaaaccagttagtgagagacattctaattataatttaatcaatcttttaaaagcataaacagatacagtaaaatggactgattttgttttcacttctctattcaagggaaaaaaaatgctttaattataataccaaacatgccccattgcaaatgaaacaaattagtgataaacatatacgagacacttgcctcgggatgcaattcatcatcgtttctcccagacgtagagggtccatcatcttccgagtcatcaatgaaagaatcactagccgaagactcaacatcttctacctcctcatgattttcttccatctttgtattctaacattaaactcaagccacgaattcgatacctaacaatccacgtgcaagaaaagatcactaaaagcatatcatttcaatattatctataggcgaaaactaatcgaaacaactcacatcaaattgaaataacagttagtagccaaggtaaagcaatgaatttatcaaacttttttttaaaaaaatatatatatttttaaaataaggccacaaccaatcaaccgttgactagagctaaataaatgaattttcaagatgagagaaccaacaaagaataaattcaatatacattttcaacatacaaggatcatttcaggtcctaaaatgatccacattaccagtttaactcaatccgagatagccaaaaggaagaccatccccaaaccaaattgagaatccaatgaaaaacaaggcttagcgttgcgtgacagaacgtcaatgtcacaaaaggaaattctagggtttagagacgaagtagaaggagagaattgagtggcttatagtatgagcaaaatagctaatgcatcagatacgcggagtgaagaaaagcaaaagccctcgtctgtggtctttctggtttccctcttgtgagttctccctccattttcgttttatttatttttttctgaagcagagaaatactgtggctggtatttgaatgggctcgggcatctactgttttttcccaaattctaaatccacaattactgtcgttagttgtgatcagccgcgtgtgcttactcaacttattagggcataagtaatggtatatataggtgctcacatttagtatcaatataaaggagaagtatgatattttaacttcaaaattatttttctatttctattctctcaacaaattgatattttactattattttaataatttttttataaaaaaatataaatttacaaattaatattttactattattaagggcgcgttataataattaatttaaaattaaatannnnaattatagacaattgttattaattttatgaaggaatattatgataaaatataatttaaataatattttgaaatacttctttgtaaaaaatatttttttatgaaagttctatcttccatctcatcatcatcgtttagtatgatcaat

SEQ ID NO: 15021 - DNA, 2737 bp, Cannabis sativa
gctggtgatggttttgacactgtgatcaaagctaaggctgcagttgatgctgttccaagttgcaaaaacaaagtctcgtgtgctgatattctcaccatggccacccgtgatgttgttgctctggtactaattaattataattcatactacatccactacttaattaatttggttaattaattaattatatatatatatactttattaattcaggcaggtggaccttcttatgcggttgagttgggaagattcgatggaaaaacttcgactgcatcaagtgtgaatggaaagcttccaaagggttccttcaatgtggaccagctcaactccatgtttaaagctaatggtttgagccaggcagatatggttgctctatctggtacttatctctccctcatatcatttttgaacttttgtcaattttccttgagttgtttgggtcccatttttgcctaatcaattaaacccgcttttctttttcttcttacactatatatgtacatgataataattggaaaccttgcattttatagtctaaaggtcagttatttgggtaccgtattaatagcatatgcccccacaccacatagtacacatacaaaatgccttcttttcttttacacaatcttaatatccaatgacttttctcttctttcccatcatcgttattattatatgatagatagagagacacacatattgctgcttgattgtgcatgtttcatatttatcatttaagatgcttattattatttttcaagataagagcataccataatttgtacaatttatattatattataagtctttatatatatatatatttaactattactatagaaatcacaattgaagattgtttattcatttttcacgtgcacgtacaaaagtagaaaaagaaaaaaaaatagtaaccgttggatgatgacaactaattataagctgtgttgtgttgcagcggcgcacacccttggattctctcattgcagccagatcacaagcagaatatggggtagcaaagtggactccaccctaaacagcacatacgccaaacagctccaagcaatgtgtccaagaaatgtggaccccagaatagccatcaacatggacccaaacacccctagaacttttgacaacatgtattacaagaatcttcagcagaaaaagggtcttttcacttcggatcaagtcctatttgaggactcaagaactaggcctactgtcaatgcatgggctactaacacaaatgcctttaacaatgcatttatttctgcaatgactaagttgggccgagtcggagttaagaacagtcaaaatggtaatattcgtatcaactgtggtgctttcaattagactacactgaaaaaatttgtttgaggatggataatattggacatgtgaagacaaaggaataataatgaagaaaaacaaaaacaatggagagggaggcattcaattgtaatctatggaattttaaattatttcattaaaaagtaaaaataaatgtgtttcgtggggtacctatttgttgtacaatgaataattgaagaccagagtgaccatttgtcaagttcgtatatagaagtaaaggacacaataagttaagtgtttcttcttctatttttgttgttatcattaatttttaataaataagtctcttatctctatacataaattttttttagaatgaattgcggtaaatttctaaaatttttacttcactagtaattaattctcaaaacttaaattttagcgccaaaatcatgttttattagtaatttaccatttttgtgcatatttgactactaattgtcatgtttgattgttcatgtatactctatgtattattaacatgaacacaataaacacatgacaaaatttaattaatccacataaataaatatttcaaataaaataaatattaaaataaaaaatgaattgtaattattttttttctttctaaagcagattagatatattttttttataaaaattaaaacaaaaaaaaaaacatataattaaacaaaattaagaaaatgccaagtacctaaccctaaaacccatctttccatcctcttttccgcctctttctatatattttctgcaactcacgattgccacaccagcactattaaaaaaatgggttttcttgactgttttaaatagtcaagtaaagtattctcgtcgatctctaaggccgacacttatttgaccatcgcaaaactgggtagaatagatgtcggttaaaaaatgttcaaaaaagtctttcccgatagtgcaaaaccatcagcaatacgaagcaacactattaacgattttgtaccatcgcctatagcatcgacgacagtgaaaaatcgtcgggtttactcttaatgtatgccacaatcaccaaatttcggagcatggtgataagctcctttggctactgcattctgtactagaattcctagctaggagaaataattaaattggtttgaatgaggatgatatgaataatactaaacttaataatcttattgctttcaccatctctttctccttctcttatttattactttgtctctctctgtatatataaacaaacaaaattatagatctatatgggtttggttagattaataggagagatgcatatatgaatgtatacactttgatttaaatatatatagtataatgaaaatgtactaacattatacatgcaggggctcgtggtcgcgtgagagagagagagagagag

SEQ ID NO: 15022 - DNA, 7333 bp, Cannabis sativa
ggttgggatattaatgagacttaatccaagattcattgccataaagtttttggctatggagtttacaatatattttctcattttgagctctagaaagttctaaccctttgcaatggcatagagggataattccatatttataagtacttatctttgttgggtcgaactaatccaaacccattagggttatttgagtataaaagccctattgataggataaaatacaatataatttgagctattggaccaaataagtgaggcccaagttgaattgagttgttttccgtacatggttataatgttgacagtgacaggtaaggcgtgacccgttatggggaggaagaaatgtcataatagtgactatttgttcaaaaaggtaacttcatttttgttgtgtgcctttccaaggcctgacacaaggaacgggctgcctaatttctcaagagtgtgttaaagaagtgttacgtaggaaatttctaggacaccaagctatcccgaacaccttttcatatattgtttgtgaataatcctttagggtatactccttgagtttacattgtttgcttactaagtgttaaaggatgatccagaacttgatgtttggattcttcactaggaagtgacacgggaactggaccatctgtctaatttttgcccattcttgatgggttggttgagtaagttgtcctcattgggccaataaatgggtttgatatccgtaataggtctctgtgaagatcgatgtatcatttattcagaatcatgaatagcaattataatatgctacttgtgggtaacttgtctttcctgcccaactccaaatcaaacctaaatgcttggtggtaagaattagaaaagaaaaggaaaaaaaaaatgtgcatttactatgtacttaaaatcaaattatcactcaaaatgtaaaatttcattaattcttatatcagaaggaaagaaaatatttttattataggtgagaatataaaatgtggagttttctttttcttttttggtagcatttataaagggattattttataaatactcacaaaatataataaatttacaaaattgcgggtctatagtatttttaacttttttatgattataatttttttacaaaaattcaaaccgttatattactactgttgttctaaagaaaaatattttcacgttgctgttatatttttgcaaagtaaaaattactgttgtccgtaaaaatattaaaaaaaatctgtaaaaaagtgaaaaagataattcagattgtgggtgccattctaaattttcttaaataaatgtagagttagtgatgtagtgttcttactgaaatatggctaacgggatctagtaaggcccattagcaacccacaatgacgaatgagtacaggccattatcactttaggcccggtccatgccccaagtccaaaattatcaggaaatgatttctcccaaatcataaacatctttttttttgggaagaaaaaaatatccctaacgtcataatcataattttcaaaatttcaaagattcaaaaaccctaacgtcaaaatcccatttaccctccaaaaaattgaaatctcataacttgaattttcgcaaaagcctccgatctctctggtctctattcctttgggttcagattccgccagtcatggcttcgaaagatggccctgaagacctagagacggaggctggtgaaccccaagagttgggggagctggagtcggaggtcaaagaattgtccgcaaagattattcaatacagagccagtcttcccgacaagctcaaagacacgtttgtttctcttcttgcaactcagagacccattttaccagaaggctccgagcctggaacgtcaggtgatcgaaacacaggtatagtttcactttcttctgcttcggggtgtgggtttatcttggttttgtctcccagatcgaaaaaaaaaaaaaaactatgaaagtactttgtttttttttcgctcttgtttatatgggtttcttctaatttaacttcgtttctcatagattggtatagactacaagtaaatgaaagtaacctaaaaactattattttctggttaaaattcggtgaaatgaatatcgttgtgttgtgaaattcaaattttatagcttgtagttttcttaaatacaatggatcttttatttgcacttgacttgcgactgaaacactaagagaaatcccagttactaatgaagtaaatgatttagactcaaggacgggccttgttaaaatttgccttcagtctagcatcatcaccttaggctagagacaagagagattcatggaggaagcaagaaactctgaaacctaaattactaccctgtccatcaaataatgattggagagtaataagattactattgaatgctgattaataatgcttggtccttgtctgttgagtgaaaaaaagtctcatttaaagcagcatctttttctttttcattattatttttttaaaatttatctcaaactttacattccttaattgtgcttgctttcacagttcgtgtctatttccccaaaacgtttctttcatgaccttaataattatttagttgtgtgccagaaacgctaaatatatctgcactgtacagatacaggacaggggcaggttacttccagcatacctgcagatggagatcaagagactattgagaaaatacggttgctcaaggataagatttcaagtaatgcctctaaaatgcctattgttctaaagaggatgcgagagtgtatttcaaagattgacaaattagattctcaaaacagaaccatacatccagcttttaaaaggaagagaactagctaagctcaccacccttgactggtattgatttagctcttaactagtgaagaatgacattggtgattgaaactgatttctacagtgaaggcatgctccagcttctaaaggagaataactgatgaggtctggttttccatttttatgggttgtaaagttctcattgtgtacgataattatgcaaaaggaaaaaggagaaagatagtaactttcctcttgaaagtgtacaatagtaggatgatgacattacttcatatgtaactgatctccaaggcccaaccattcatgcattaattgtgaaaagaaagatgtagagaacagaatctcctcccctttctattatgtccctggcatataagctgtattcagattctaccctcatgtaccactagcacctttcatctttgttaattttttttctttctattttatgaataaatagggactataatgattagttttttgtttgggcaagtgttatgtaaattactacacgtgcctgcacaagtacttaaattgcttagttgattctagactaattgttatatttgagaaacaattagctaactatgaatatatgaagccaaatttatattgctataaagttgaaaagttgctgtgatagtatggaggatcacaacattaaagtcaatgggtatatgtgtaatgggtgttcttacagcaaaatgaataataagtaataagaaacagcacagcctaaagtatgaattgcagatgtttatgtacaatacgatacaacttacaagaaatagtcagtagatttataggaatcattaaaataagataatgtttcaaatggttaaacatttacagataattacatcatcatccgaattcaacttagggatagaggaactcaccataaccccttcaacatttacagctttgtcaacatcaagcatgacggtgcttagacctttccccacaacaaatatgctcttaccaacaactacaagccgacaaggtggtctagtgagcaagggagatagccttcccactggtacccatgtccttccctccttccacatcatcagcctggttcctgaagtctgatccaatacgtaaagagttccatccatgacaacagccggacctcgccaacctgatgccatgtcagcatcagcattctgccatgtgccacttgatggttcgtaaaccactgcatacacatgagaagttacagaggatatgccacagcggatatagatcttcccatccatgacaaaagaatcttcaatttcagaaacaatatttgggtctgaatgagatgtccaagtgtttgtgcacgggtcataagtatcccaagagtgtggatcacttgaatttgaacctaacccgccaatggcatatattttctcatccaaaacttcacaagaaagatagcacctgaacgcaagggatagacaaatgttgtgtaaattgtggtggcaatgatactactcgtaagtatcattattttagttatagttaatcacaaagacaaatactactttgtttaatcaagagtataatccttgccagaagaatgacatataatgaacaactaagcattgcatagacagatgatcctgaagtaaaaaaaaatgatagatttatgaaagagcattcaaaatcttttaaaaaaaaacaaccatactactggtactattcccaatcgacttagcaaagaacacaaatgaagaacagtacctagcagttgacaaggaagaaccttcggaccaagtgttagctaaagcatcatagcagtatacttcttcggtagcatcttcacaccaaccgcaaccacccaacaagtatatgtgttttcccaacacttcaattgacatgccttttctcttcaagctacgaggtggaagcctttcaattggcttccaacatcttcttgatgagttgggatccaaaacataacagcaatattgctctgatttgtctttgcacaaagcatagatccaagtttcaccaagtttttgttttctgcggtaggaataccactcttcactgcatgtcaagtctctccatcttcttgaaacacatttaagaattctatggtactttcgaggaactcttgctaaacaaaaaacagcaaggtcatctggtagcccacaaatgagtgccggctgagtcagttccatttgactcatagcatttgactcattgtctaactcttccatgaatttaggctaagagtcctgaaatgaaacattaatatataaaagacccaccaaagttgtattgctcaaaccataaggtatagaagttaacattataataattcatttggaattcacaagctgcaagatcaatcgaatgatctgggcaaactttctaacataagatttcagcatgatcaatctttcttcccaacaatgcatcaatttttcaccatatacataaagtctattacctatgaatctatgatcaaattcaaatcaaagccttgcaccgaaaatagacattttttttttcgttaacatcaactgtttgtccacaaatggaccagtctcaagaaatttgtgccataaagtatgactattaaatttctcaatgtgcccgaaaaatgaggaaaaacaatacacccaatatacaaattttatcatcaattttttccatttatacgaaaagctaatctaaacccaaaactaactaagaaaaattcactgcttgatatccaataatcgtatgaaagcaatcacaaagtaaaatccaataatttgaaccctaataaagataccagggagaagcttcgttcgatccaaaatgcaagaaaattctgggggaaatttgagaagatattaagttaggagagaaggattccatggaaatctgacctgtgatatttgaatcgtcgtgtggaagataacgatggagagaagaggagaggtgggttgcggtgacggcgaaggttatatgtacaaaatatttggagtaagcgtcaattatctaaattatctttgtagcggggaccaacctataaattcataaaatgtttgatatctgaatttgtaaaatatttagcgatgtcgattttattgaaaagtgtcttgaaaaaatgtcgttttcccagattcatatcgtttatcagaaatgatgtcgtttagaaaaatgtctttcttttccttttcttttttcgaaattttgttgttatttcgcttttgacctgatgtcgtttagaacaaaatttcattgaaaaataaaatgagacatcattaataaatgaaggataattcataaaaactagttcacaaaagatcgcataaagaatacaaaaaataaaattaaacagtcaatgttgaaaaaataaacagaaaaaccaaacattaaagaccaatccaacacctacaagctcgagtaactgtcaacatcccaattaaaaaacagcatgttttctattagtatgtctttttcttcttttttttttttcattttcgtttttgaaagatgccgtttttcaacaatttatgtgcaaaagtttgtccttaaagaaaatttttggattctttccttacaaaagactaatactcattgataaatattgttaattatatcaatcaaaatattacaataaaatattattctgccatgttaactgatattaggagactaaataattaggctaatggttttcctttactctccattaactttgaccataatttgactacaatgatatatttgtgcataaactgataaataaaacaagaatttattattattattattattaaaaatcaacggtaaatggtctaagatatactttcagaagttcatgtcatacaccaaaaaaagataaaatactaataacaatttggctctggtttttatgtatttgaatactgatgtaaaaatctccagatggctgcagtgcagagagaatatttacgccaaactagctagggcattaacaatcagaataatggtaggattattgacaatacactcaataaattcgtgccttgacctgaactaataataaatagcattgtttttgtttggacatacttcataactttgatccaatggccaactctggcctcctctcccttagtagcccttcttgagtcagtgacacaaccaactgccacaaaatagttgtcaaaactcaataaaagaaaacaagaaaagaacgccaagacacttggttgtacgcatcaataaaaatcatgttctcttacctctccttttcggttaaacatttggcctgtaacaaagccgcgggcgttgtatgcactgggactggaaatctgtacaacacttgcatattaacatttagccacaaaaatttgataagagagtcttcttttttctttctttcgaggaacttaccacaaataatatccagtcatccgctctaaggctgcgatgaaaccacatcctaagaaacaaaaacaattacccaaggaagaaagatctataaattatactgtttaaacatttctgaaattgaaatgaaaggtactagatttgagcttctctaattttgaatggaagat

SEQ ID NO: 15023 - DNA, 7229 bp, Cannabis sativa
  modified_base (249)..(252): a, c, t, g, unknown or other
atgcgctaaaaaattgtattcatattttgttataatatgaaatataatcatgcccactttgatcttcatgctatgcttgctttgctattgagtatttctagcaaagcaaagttaaaaaataccgaaatacagattgttttctatttgtgtgaatgaagctgacgacgcgtttgtctcaagttagatcttgcaataaacaaaataaaataagttaatccaaatacaacaaaatagagagagagagagagnnnnagagagagagagagagagattcgttttcattatttgtgagtcaaaattcccaagtctcaactttggagaagaagagtgacaaaaaagaactccttttactctctcatactcatacaccctttttaagggaatggcatggccttcttctccttctcaaactccattaaaacctttgctctctcactaaccctcttctccattctcctcttcttcttcctcacaatcccatcaaaccctcctgctccatctacacccctaattccccatagatcccttctcaacgataacacacaagagctttcttgctcctccgttaaatcacactccaatggccttttcaactatctctccttccatttctgcctctttaacaaaaactcatttctctccatccctttcctctccctccttctcgttctccacttctacatcctcatcaagacggcacaggatcacttctccgtcgtcaccaccaagctctctttccacctcaatttgtcgccgagcatggccggcgtgaccctcttggctctcggaaatggtgctcccgacgtgttcgcatccgtcgccgctgtccgccgaggccagtatcgaactgggttcggtgccatactctcggccggcactttcgtctcggctttggttgttgggtttgtggcgatttacgccgcaccattttctctcaagccagcgccgttcgttagggacgtgtcgttttacctgattgcggcgttgttcttgttctatgtgtatcttagtgccgagatttttttatggcaggctgttggattcgttttgttttatctgttttttgttgggtttgtgttttggatggatttgggaatgggcgcagagaaagagaagggtgggagtgaaatgcatttgattggagaaattgatgaacggaaagatctgatggttcatgattgcgagatcggcctagtcttacagaattcccgtggagaaaaaccaagttttgggctcaggcgagctcttagaatggtatgctatgtcctttaaatgttatgatcttgttctcttctttcttctctcatttggttatatgattataccaattgaaatttttgtagttagtagaaattcaaatcattgtgcaagtgttaaggaaacttacatcttggtttgtttaaacaatcccatcttgatgataattgatacaagctgagtttgtagaaatgacggctgtaatgcttgctaactattgttcttaagctttccttgagtgactttagaatttaaaattagcttgctatgtaccaatccattttcaatcacttgcattcgaatggtttggactctagctcataacagaaagttgctaacagcacctttccctagcataggaatatgaagttatgctttgttgttgttacttgttaatttgagctttggtgaagttgaccattagtgaagctcgaggaacataagaaactaaaacgtgtaacttaattaatgatttaataatatcactacactgatgatgcaagggaagtagaattgatcattagtcgtacagaataccagtgatctggctggaaatgtaggttttatttgaagatttttcttatgaagtcatatgcttaatctataagtaagtaagatataagatgattgtgtaaaagggttcctacttcctggttggtcattttcctatcacctttgtttccccattctcctaatttggtatttagttttcttcttatgcttggaactgaaaaaaaaaataatgtactttcttcataatcgatcaaattttcttttgttcttatttctactaatattgtatcctttttctatttacaataaaatctactaacttatgctctttattgtgtctgtagatctcaaaatcatgggagatcccagtttctgttcttttaaagcttacaattccgcagacttcacctaccaagtggagcagattctattcatcagccaatattgctctttgtccactagcacttctctatgcaggaaacacgtttgttccattcgatcatcccattcacttcctccttccacacacccgttttcccctttggcttgtagtattttttgggtgctccaaccttgcactcctccacttcattacagaaaaagaaccgccaaaaactgagcatataccagtagtgatcatagcatttgtaatgagcgttttctggatatctactgttgcaggagaactgctcaactgccttgcagctttaggttcacttctcgagttacccccttcgattctcggcctcactgtccttgcctgggggaactcagttggggatctggttgctgatgttgctgttgctaaggcaggacatccagcaatggccatggctgggtgctttgctgggccgatgtttaacatgctcatcggtctggggacggccttggtgatacagacaagcaacatttaccctgaagcttatgagcttcatttccacactggaattgtaatggcatttgtattcttgcttctcagcctgatgggttccctattggtgattacatggcacagatttcgagttcctaggttttggggattctgcctagttggtctctatgttgttttcacagctgttagcttagttattgccaagttctcaaggtgacattgttccatatgtatatagctaagtgctcagcttctacatgccccaatttccaagcctgatcaggacttcacattccaacttgaaatataatatttatatataaaaaatttaggtgtgacaaaaattacttgtattttactgctaggtcttgggtgattctgtgacacaaaattctgctgtaatagaaaataaattatatattcttggaaagtttacatcctaatacatatttgcttcttcaaggtcttttttaagcagctattaatttatttatttgacgagaaggagttctaagcattactttctctagcacttctttcatggagttggagtctattaattctaggatccctacactggacaatagcaccgccttcataaaattttgccttgttagtaaatattattttagaaaaaattatattatttagtatgaaataaatacaaatttcaatccattattggatacttagcaccctcagtaatcaatatgtatatttcttgagagaaccctcgaaatagttttacataccccattcatgaaaaatgaaaattaaaataatcaactacatcaaaaaagagaaaaatgaaataatcaaatctagaaaaataaatacttttaatttcttactaacatatttttctcatccagatataatattttgattatttttttgagtaatataaatggtcgtcaaatgtatattttgggattggagaatgttttacatagtatgaatcaatcaacagcgcaaaacattacataactatgtcagtggcatcaatagtagccaattatagtaattttaataaagggtaaactcgtcttcacaaaattcaaacttccataaaaattgaagcttctgttcaatgctttctgtttctcacaaataatacaagtcagaatcaaactctctctcaactttcctccatctcatataggtttgtactcataaacattattaattatcactaatgaaaaacaaagaacaatatagaaactacacaaattgtcttccttttttttattttaattttaatttggttttatagattagtcaagattcttccaaaaatatggatctttgatcctcttttcactgtatccattaacatacaataaaggaaacaactttacaaaccatgccttttttcgcccattggatctattgctgcaatttttttttttaattttcaggtttaattcatttataccatctcagaacatttaaaacaggtacataaaaatctctcttcattgttgtttttcacatgtttatgtatgtatgcttatatacatgacatttagttctttctaatttgaaacttgattctgtaaattgatttataatttttttgttctctttctttcttttggtgtttttttcctgcttcttcatgatttcttatgcttgattttgctaattatttggtgtacactgttactttctttctagttctctttccttttttgtgattgaattatcatcttggtctcaaggaatgatttgctgtcaattaaaagaatgcaagctgatttttcttcatatattgcaacaaatcagtagaacaaaattttcacttattaacttgtactgacattttacatatgatcattcattcagggaccttaactcaaatctgatccattcttaatttaagttaatgatgttcatgttttagagtttctagatgattcctttgatgtttcttattttttaacacttttatatcggttggatcagaatggatcaccaagggcataaccaacctcagtcaatgatgatgggaggtgggggtggtggtggagctcaaatggcttatggttaccagtccaatcagatgggtggcaacccaactcctggctcggttggaggcattcagtccaccagccagcctggtggagctcagcttgcgcaacaccaactcgcatatcagcacatccaccaccagcagcaacagcagcttcagcaacaactccaaaacttttgggcaaatcagtatcaagaaatcgagaaagtaagcgatttcaagaaccacagccttcccttagctaggatcaagaagatcatgaaggctgatgaggatgtgaggatgatatctgcagaggcacctgttatatttgccagggcgtgtgagatgtttatcttagaattgacattgagatcatggaatcacactgaggagaataaaaggagaacccttcagaagaatgacattgctgcagcaatcactagaactggtatctttgattttttggttgatattgtaccaagagaggatttgaaagatgaagtggttgcatcaattccaagaggcaatgtgcctgttggagggcctgctgattcactcccttattgctatatgccaccccaacatgcaccccctcaagttgggaccccagggatgattatgggtaagcctgttatggatctatccatgtatgcccagcagcctcaccacccatacatggctcagcaaatgtggcagcaacaacaacaacagcctgaccaacaacaatcgtcgtcggatcgttaatggggactatgtatggaaaataataagtgtaagtttgagttacttttgttggccattggtttggattgaacgctggaaaggatttggctattgtttcatcatgtcattgtagtggattatgcgacaagagctagcaatcttactcataccattatctataaatatccatatttttctttacaactacgtaataaaatacttgactcgatttatggttgtgcttctaatagaaatatgacattttgatttcatgaacataagaaccttctattctcctttcttttcatctagtgactgaaaatatgttgtttgatcacttaagtgtgtgtggtttgatgtattttcacatttttataatttgttctataaactttgatacaggaaatctcaaacagcgtgaagaaggtagagagaaccttagatcatcaataagtgtgactaaaatttgagtgaaggagacaggataactccatgtatagataataaccctgaaagaaatagtagatcagatctcaacagagccagcaaccattttctcttttgatagtttttacttttctcatttaatgtcagtgatgtgatgcgactttgaacaatgtaatgtaagatatcaacttataaagtttatccgtcctttctttcttgtatcttatcaacgagagtagctcttatgacccttagctgaaatagatgttttcacaaatatggcttatcaattattcaatattttggcctcttgattaatatattttcaatgtgaaagaaacacaaactgaaaatgggcttcatgaagaaaaaatacttggaaagtctcaagaaagaaagtgttgccttatctctcagacaatatttggtaaaattaacattttatacttgaaaaaaaaaatgacaaacaaacatcaaagtagtattcttgacactcaacacccaatactctgaacttacttgacatcccgtttgagaaactactaacaagaccattttgccaagtgaccttcaaaagaagataacaaatgtccaagttatttgttattatacaatacacaacttgtttcagtattaagaggcaatgttagatacaaagaataatttcattttatctgccaactttctttcaaaacaatgccttcgagaatcccatcaatgccaaatttatcagaaaattgatgaggatcaattggaccagggagtttaaaagagatggaaaactgccctggagggcataaattctgcgcttgcattttgaacatttgggagtactcgtatactgttttctctccagttgtagtagctccacgtattaatacttcgccctcacttgaaacttcacaactaaaatcacctgcaaccacaaaaagatacatcaacaaactactcaattggttaagaagcaacaatatagattaatattaagcttgaatataaactcataaaataaaaactaacgactataagggataagaatcaagtttctaatagaaaactaaaagcaaaaaggtacacataaaaacgaaggaacactaattagtaaatgggagaaatgtttccatagttcagagtgcaagggaaattaagaagacatggattaaactaatgttagccaaagtcaataaatgtgcacttaaagaatttttgtttatctgaattactgacatgtaaacatgagtaatttagccaatagtgatgaggcctaatgatacccttcaaaataagaagttatagggtattacaccgtattgtattatatagtattatattgaattatattttatgtaaaactatatgtggtattgacttgtatggacacat

SEQ ID NO: 15024 - DNA, 7927 bp, Cannabis sativa
aaggaaatttagtgcaaaatgaacatacctccctaacatcttcaagaaaagcttcatgcgaactgccataagccccagcagccaatctcaaatcgatagtcctgaagtccaatggcctggataccattgctggcaatcccaaaagtccctcgtcatcattatcggtagagtttatcagctttcttcccagcaaattgcagaagaattttgagtcatctgcagcagcagcacgacgtaatacaatgcggcactgtttcatgacaacatcagatatagagatgacagttttcctcttcttccgtttatcaggttttggtggcaacccttcaccaccaccacatacatctgctaaaactgacagaacagctttctgtgttcaatcagccacgagaaacatttaaacaggtgcataaagaaatcagtagataaaagttcaaaaacagttctaaattatcataaccatacaggaaaaactaacaagtcaatttataactgcaatttcctgtcaattattgatagtaccaaaaaatacactagtagcctaccaaaagaaaagattaacgcaaatagcacctttgttggtcctgatgcattgcctttatagacttccttactgatggagtgttccaatattttctttgcccactctggtggatccttcaacaaagcctcgttgacgcactttctaattcttgttcccacatttgtggggagctttctgacaggctctaggaccttggcccactctggaatattaccatcattcagcaaattcttctcagaagcactagttgcatcaggctcatcatcctcaaaagtaagaacgtcattttctctgtccaccgaaccaaaaatttgttttgaagcctcagcaagcaactgaagaaaaatggacacaattacattaatatgcatttaattacctttctattttcactacccctaatataagcaagaaaacagagagaaacaataacaaaatcaactcagcacccagcgttatcatctggaaaaacaacagagaaaactacataaaatgcaaacaagaatctggtgctgcaaaactataatcctctgatataattaagaaattattataccataagaatacatcaagctctcaataaggtaaattagatccccagtagcaaagctaaaatgtctaagcattatgatttcaaaagtaactcaaactttgtccaggtaagtagaaagtataataaggctacaaatggatattcattccaaaaaagtcttggaatccaacacaaaagatgagcatcttgttcaatcacttaacaaggccacattccatactgtattatgcacaactagccaatttccactaagaagatatgtataccaaaaaagaaaaaaaaaaaaagtatatatatatatacatatttgtaacaaaggaaaaagtccattagaaaaacaaaattaataaatcaaaacatgagatcgttataaattatttctacagctcattactcatgaatctaacactaacggtttatccaagaagactgccaaatccccttttagttgcaactctcttaacacagaattaatactatctaatcactctcaggccaggtgccaagtcagatagaatggttggacatggctgttgaatttcaagtaaactaccttctacatatatatggagactacggaaaaccttttgttgaattttaagcacttatacaatcttttgttaaacatgtcagtaaaggattaatctatggaaaacataaagaagtaagaaccaaacttacaagtgcatctgcttccatcccagcaacaccagtaagtgagccacaaagcaccccaccatcaccttgcaaacaccgaaacaccttgccactttcacgtgcgataatctcagcagagtcaaggttaccatccatggataagacagccaagatgtatctacgagctaattctggccaagtcaattcattaattggaagtatgttaagcttggtccttttgacaaaaagtgagctatcaacatctttcttccttcccctttttgatttagactctccagaatcaaaatttggatctacaagtgctgcaactttgaactgcagctcacccactagtacttggaggagtgaattgtgggcttttgttaaaaccacaccagaacatctactgtatgtaatagatgcatgtttagtctgagctgcttccttcattgctcctgtttccatttgaataaaggcaggggcatctgtacaatcagtgtcagttctcttagaattcaaatcttgattaccacgaatctcctgctcaaacttctctaaaagttctgagttatcaaaccaagggttactaagctcttgctcaagttcttctagagacaaaggcccttccaaacccaaaatatcataaaaacgccataatgattcccaaacctgaatacatagtaaaaaaggaataagaccccaaatccttactgagaaaaaagaaaaggcatctgaaatgataactatataattttaaaacacaactggcaagtacatgcatacctgataaacatcaccaacaagttctttaggaacctttgagcacaattgtttcccaggaggacgacaatgattatccatcatatcattttcaatcaacttggctttctttgatcttctaaataagccattcaaagtatcattttccttgcattctaagctacctctaatcttcggaaccaaaagcccattcccaattgttattgatgaagaatgagagctcctctcacaaagcatttgatattgtgaacaagcttgtaccccaggaagctgttctaatatatcttgcacaaaatccacatctaatccaaatctgtcttgattaagccatttttccactatatttttaagagagtcaatctctttatcagcgtgaattacagatgggatgtcaaaaccttgtgaactagagaatttctctaatgacaagaagttccctttgcttgtgtcattcttcataacatgactggggatgtcaccatcttttgcaacatgcttgcagaaaaatctaaatgaacctctccgtttgaggatttcagaacaagcattaacaagtttttctgaaatcattctccagaccgaagacaaggatttttcttctgctgagaactcgccaatttcatctatggaacccatctcgcatgaaccattttcagaattttcacgggtggaacaacaagcttcttgctgcgattcgatagatgtttgaagattgctaccaccacctgagcaatttctaagacaagacaagatatcattttccataggtgggcaaggatctgaaagaatcattcgaatactctcgatattatcacaagttccatcactttcatcatccattggactcaaaaactgcccagagctctgtctaaagaggacagttgaacaatatggcacaggtacagacgagcatgaaagccttttgactttaaaactaggtccaccttcaccaccatccaaaatttcacatacaaaaagagaaccagtaatcttatcgtgccaacaagacttaaaccctacaggccagagaaatctagcatcatgataagcaggtctagtgtcaatctttcccgtagaaagaaggaaaaaatcttcaaactgtagaggaagtccctcctgaaatgaaaaacaaacacaaatttaagagaaagcagaaataactgagggaaaagaatttcaacataactacattgccctcctaccacaactacgagaagcatagtaaacaaaataaaatttaataacctataacttacattatttttatcagactccaagcaaccaatttcacctgctccaacctccataaattgtgcattacagtcgaaagtcattgaacgaacttccatacttggaccattggatggaagatccttacaataaccaccaactgaggttcccttattttcagaaaagccattggacattgcaaatcttcttgcctttctttttctgggtaaattagttttttcagatatagaaaaaccaccctcaattcttctttcaggctccttagaattgtacttagagttagacatcaagccaaggtagcatgcaacttcataaactgaatcaaatgtcttcccatctggggaacaataaactgcacaaaattcacaactgcctatagattgtttaagctccacacgccaaccttcctctaattcaccatgcttttcagaaacaaaatccctaagagcctgcaaaaaaatatcacttgtactcggagatgataatttaaaacctgtattattcctacaccttcctaatggaaaacttaaatctacttcatcaaagcttttccccataacatttgtatgatgcaatatatcctcaaaccccactttaactgtgtgtgttagaagcccaggagccttctggaagccaaatccatttcccgtgcacaaaaagtttgaatatgtcactggtgcatcaaatggattgccgccaaaagaatcaccaccaagagtatgctttctaaaaccaaaaataaatgtcaacagtaagtaaaatgatgaaaaatgcaagactggcaggtttattactagcaactaaggtaaattcatagttcatgatagagaaaccaagatgcattatatacacatcctagaagcttgaatatctctcaatataaacaattactttcaatgcaatcgcttacttatttaacgatctacaacgcatgcagccattcatctcaataatcacatctacaatttcacttcaatcacctagggcaatgcccgaaattgaattctataggcaatgcctcaagaagaacattacaaaacaggcaaaagaggtttaaaaacaaataggtccaccggtgtgtgtataggtgacactcctatcctatgacactctcccttccataacaattacgagaggaacagtataatcacgtgtaaccaggcttaagagtgcaatatgcattaaaataatgccttgaagaaccttactttttaagatctggaaccacaatctccccctttttataatacaaagaattagtctgaaataagtaatgctcttgcaacatactattgcaacgacatgtataaaaaaactatgttgttgttttcattgtttctctacattaagaagatggtagatccttggatatttaggtttgtatttggctactaaacatgggcaagatgagcacaaatgacactaaagccaatatatgatctatgttcttgataaatattggtgtacaagtttggcctcttctctgccaagatattctgccataagagagtggaataagatcggaatcaagaagaaagcaaaagcttcagaacatatatgtagttgcaataccgtggactctttggttagaaagaaacaataacacttttcaagattgaaatttggattgtaaacaaatttaaaaacttgggaaaagaattgcctagtatattggattttcaacacttgtgactataatgttttcattttccgatatacttggtgtgtggcccacttggctcctatctaatttgaatatgatatcttaacttatagacccttgtatccaaatcatcgtaagtcactaaataagtgaaagtgaatgcagctaagaacaaatgttgccacagctttaatgcaactaagtaaatttgcaacagtatatataaatttccacgttttggcaccatggcccaatgcaatatcgtattattcatcaagcccaacaccagcataaactcatggcaacggcacatagaagttatgcaatgcaatgaatccagtagttaatttcactaactacccccatggcatggctgttaaaattttcataagtgaaaaacacaccaccaaggcaatttcctagcagcataggtttcatgactaaaggttactccaggcgctgccattctgttattcaagtttgaaaaaagttaccatctaaaaagtacacagtaatgggctactggtaattcaggcaagtgaaaccacgatgcatgcagcatcgtccctaaactaacgcatatcacttccatacacaatgcaagtattttaaagctaaataacaaagctactacaacttcatctttgttcaggaaaaccatacaaccatctataccaacaacgattggactcaagaaagttttattctttgcatatgtgattatgtgagtatctactattcaatcttcaaaatcaaatatcagaatgactgaagtaacatacctcgaatccaacaagtcctcagttccctcggcatctccgtctacatcgctcggcggcgaagcattcatatccaaaatccgcttagacttgccaagaggccaacgtttactcttcactccactacactcacactcaccacagacccactcctccataatcgaaaccagagggccccgcattctaacgcagccaagatggtacccacgctcgcaggcgtcacacacgacgacgtagtcgcgaccctccgccttgccacatacggagcaataagagccaaaagaagctaccggaacaccagcaggaccgccgggaggcggcgaagggttgtcgtgataagaccttacaacgtcaatggaatcaagaggaagggtttcagtcggtgaagggatctcattaagatcgatgccaagaaaggaacgagtcggttcggcgtcaccggcagtagaggtagaggcaagcttagggttgttgtctctgagttcgtcgctacttgaatcggcggtgagttccatcatccgagtcggcgagttgttggcgagttccgatgtaacgctcgtaccattgttttgggggtaccaaaactttgagaaatgtatcgatcggacggccaagatttaacgacgcccccaaaaaaaaaatagagccaaaaaagaggtttccttgcttctggttcgcgtttttgggtttgtttggccgtttgggttaaaaaaaaaaaattggttgggttaagaagaagagaatgggaccaaaagaggaccagtttattttccttttttaattaattactttatcagtaaaataaaatatttaatatttattattagggcaaatttaaattttaaaaaaagaagttgggtggagacgccacgggattgtagttgaaatgggctgttaaatgccacgtggcagaagtgtgttaagagtcgaaactgaagattggtgttgttgtttgtaaggcaactcccaaagtcccaaaagtacaaaatatctttacgtcaaaaagccgaaaaaacaacaacacccaaacacagccttaactaaagtgaatcataataatattcttaataaataaataaaatcaaaattaattaattaattaatttaaataactctgacctgttatttcttcttttgtattggccaaaatcttaattttcctttgtgattataattatggaaacatgtcaatgatatcacccaacttagaattataattcaaattttggtctaaaataaccaaataagattttgcggattttggggaacttataatatactaccgttagtaagaaaaataatttataattaatgcatttgaaatttatgttttgaattatatttggtaaaatggtataaacagaaagaatgagcaatggattaacatggatagatgcaatggatagagatgatagtgatttttctgtaatattttgtatattttatcttcactgtcactaataaattgggtattatatctatagagatgcatgtcattaaagatttcaataaattttttaaaattttgatgaaaataaaaggttattttatcaaattagattgaaaaaggaatttgtttagtagaatgtctatacacttaatcaggtctaaaaaatctagaaattgtagaagtactatataggaattatggtaaaacaaatacaaaagaatttgacttgattcaacataaaatgtctttt

SEQ ID NO: 15025 - DNA, 5036 bp, Cannabis sativa
caaggttacaaatttcacatttcaaggattatttttataaaactttttttagaaggacaaaaaatgaaactactaaaatttcaaatactctactagctagtaattaaaattgtacataaatcaattcaatctaattacaatcaactaactaatgacaagctattgcaaaatattaaaatatacaattatgattagatcaattcaaatattattttttaatatctaattaattctcagatcagatgttaaatgaggtgtctaaaaatttaatgcaatttaataaacaactgaattatttagtatgttttttaaggaaaaatacttgttattattaaacaaacagtgattcgtttacaataacgaagtatataggtggagggatagtcaccaatcgagtataagtctcgttcacccctaatacaaatttagtaagactatgggccgcgttatttagtattttttttttaatttgattaaataattagattttatattattatatatgaaaattaagtttcaaatttcaattgttttatttttgttttattgaatgaatccaatctaatttaataaatattcaatagatttcaatgcaagagaatgcgagtataaaacattatataaatttcaactaatctaataataatagaaataaatctaatccaacctccagtacatcaattcagatgatgaacttatttagatcggataagtgtaataccactactagtaacataacaaacacagcataaaaaaataaaataaaaaaactttgacagcgcaaatatgtaagcaaaatttagttgtgggatgagtttgagcccttatatggtccgtacgatctcagattaaataaattatctatctgacatctctaatcactatccaatagaattattacattttatttaaatcatatggtcaaagcgttggcactaatattataaagcttaattagacattgtgaaattatatacaatattatttatatatttatacatgaagggaccagatgatcttaaaaaacggaaggagtcacacaaaccgcccatagccaatgtcatgattattttaacagctaatgatgattagtatgaaggagccgatcttcacactaaattaattaattaaatagataagcatagctcgatatgtaccaagagaaaaatatcctagccaaagctggacagctgtcacgctttccaccacataattagttctcaacaacaaataagcatttaattaataagtagaatagtattttgtaaaaataaaataaaataaaaaactagaatagtaattaatttcaataattttatattggcgttgaagtgaagattaggccaagccaatgtaatgtgtttatttgaataagaaaaaatattagtttaatcttttatctttgtatttttcttttaaatttttattattttttgtctacatcagcgccacaagagcaccacccattcgctattcagtctattcacccatcctaaatttctctctctcattctttccgtcggcccattattaacaatttaatttaatattttattatttaaatcaacttcctacacataaggttccgcactcgtgccaagacttttattttttatttttcaattattttaagggtttcctaacaaatttataactcttgtgtgtttcaaaattctactatatttcctcaaattattatattttaaaaactgcttcgtattgattatcttaattttaaataattataattaagggcaaaatttttacatacaatgcacaagccacaactatacaaaaataatcaattttaactttgagcaaaattaaaaaaaagtattttatatcgaataataattatgaatcaaagaatgtaatatcaattttattttagtcactgaaaaataatatggttttttaatctggttatttaaaattgtaaacagtttttttttgaaagtaaaagcgtttataaatagcaaattagatcttatgatcgttacataaaatattgttcgagatagacgaatcactcaatctactaaacccgtagttcgtgaaagcccatttggtcacattatgagccataaaattacaacactaacaaaagagaaattacaaccatcaaacagccgagagagtcttaaacaaaaattagagtaattttcaatttcccaacgaacatccaaaccgttgattgaattgataaccactctagaattgctctctataatgataaatttccagcctgcctctttagccacctctaaagctagacaacaagcagccgcttctccacaaagcacatcagagaaagccaaactagaagactgaattcttacaaccacccccagatggttcagagccacaacagcagcacacatgctatccagtctcacttttacgtcacaattaagtttattccagccatgaggggagacttccaacaaatcacctcagaaggggagggagctggtaaaaggaaagctctgtaatctgcataagagttggaaatatagtcaacacactgagatatattggatactcttttattatgtaccttatcgttcctcatcctccagatagtcaatcacaattgaagcatagagaaagacttcatctgaattaatgcccattttgtcaagtccccatataaacttcacccagtcccagagacgatttcgagcattaggattaggagatattccctaccaggaagctctccataagtgagaagcccagttacaagtaagaaataagtgttccagtgtttcctcactaaccccacgtggacacgatcgtaaacagttaaaagttaaatattatatatggtaatggtgagaaattaataacaattatctgtaaaaaggtggaatacgttggtgcggccctttagactttaacgtactgcttgtttgttttccttggaatatccgggaccaccaccaactttcccctaactctctctctctaatggtcttcctatataagtaccgagtttccaacttgtattacccaagttgtattaactaagttctcaacttgtcttccaatttttctaagcttctagtttcttcttcttattctacaattttaattatcacctgatcttcacttaccttccacaagtataaaaacgtagagttcttgtttgtgttaattaccttgaaatcttaatcgttttgggattaatgacaaagatacatcctagctctgcctccgcttccatcaccgccgctccaaccccatctttggtctcagaatctccaaatgaggcggtcgtcttaactgtgtggacaaaatcccttctattcaattgtaatggctttacggtatatgactccaagggcaatcttgtctaccgtgttgataattacatcgccggtaacaagggagagatcgtcctcatggacgccgccggcaagtctattctcacaattcgacgcaaggtaattaaattactatctcataattttccttttgtgttattttatgcaggaagatccaaacagttctagtatttgatttaacacactaactaaaacttcgatatatgatttattattgacagaggttaagtcttggtgataattggatggtttacgacggagacacgaaggtgaatccgcgattcagcgtaaaaaaacacgtgaaaatcctaaacacgaggtgtttggcgcgcgtgatgagctctggcagaggtggaagtgaatcgccatcgccgaagagcagtagcccatcgtcaacattgtacgaaattgagggatcgtatgcccagcggtgctgtgtggtttacgaccacaagagacagagagtagcggagataaggcggaaggaggctgggatcggcggagtttctttgggaggggacgtcttccgcctcgtggtggagcctcatttcgatacctcagtcgccatggcccttgttattctgctagatcagatgtttggtcggtcatcttcttttaagcgttgatttttaaggggtcgatcttgatctccttctatacacaacacacacttttatttttaccataggaatcagtcacacgagaaaatcattaccctaatcatctggtttgactacctttactctttggtggccatgggatgcagaaagctgcgacttggttttctcaagttttttccttccgtaaattttgttgtatatacaaaatttgaaaaaaagaaaaaaaaatacagaataagttacgaggttttggctttgggtttgatctgatcgtctggaccgagactttgcactttttttctcccattttaacattcgatgtatgtcgatccagattttgttgaatgaaattagctacttacctccttttaatttagttcccaatatctggtataaattttggtgacctcaaaatcaatagaagatttagtaaagtcaactaattcatgtcccaacacgaaacatatcgtttcaaatttgttacttccacttcgactttgttacattttattaacgtaaacctatgaatgaattaaccacacaaaagtttgtcacgtatgttcacgcggtgattaccgcagagaaagaacgcgcataagtactctgcaagtgacggcatttatttccaacaattaaaaagccaaattagtagccacatgaggtgctacttcataagggtgttcacaaagtatccgattcaatctagctgctcaactagccaacaaatctgctagtaaattggttttcctagccacgtaattgaagctaatgaaataaaaattactgagtaaaacttaaaatattaataaaattagaccattccccttgagaatttgaactctgctcccaatggagacaacgttcacaccgatccaccactccgtcgccccaatcttcacaggtctaatcgacccactccagaagacccttcaagtcactactataaatataagaattcgcgacagtcctaaaaacgatttaattcgggaaccgtcactaaaaaaattaagtaactatttaaaaccgtcgggaaaaatttagtattcccgacggtttaaaatcatagtaa

SEQ ID NO: 15026 - DNA, 5888 bp, Cannabis sativa
  modified_base (46)..(48): a, c, t, g, unknown or other
  modified_base (1958)..(1959): a, c, t, g, unknown or other
aaaaaaaattgggccttagaaaaatgggggccttgtgcaatggccnnngctgcccaatgcttgggccggccctgcccctatgcaatgtcatctcaactattagaggtgtttattagaccatatttactgtttttatgtttatctaaatatatattgggtaataaattttatcatctaatatgatctaatattaatttcagttatccaattaatctaatattcattggatattagattagatcacttctatccattaaatgcatatttcttgtatatatgggttaataaaatattttaaaccaagtatatatttatttgatcaactcaaattcatccaataatttagatatattatgtattggattagattggatccatccaataaaaaatataatattttaatgttaattttaatatatccatattttatgtataacaacataaattgaattattcattcaaactaataaatgaaaatattaattagtttgattgaatgtaactataagatgtattagatttttagacacctcatccaacatccaatccaatatctaattggatattaattaaaaaacaaaatccaatctaatctgatcacaattgaatatatatcaaatgtttcagggtcagttctaattgaatcggtcaattatcattaaattaaatcgatttatacacaatcctaccaatcacatcttaagagtttccaaacatctcaaacataataacatcaaaaaacaacaaatgctctctagtctttcattgctatgattcgcacaccaaacaaagattatctctacaaacattcatgttcggaatgatcgaaacaatctgtcattggtctgcaacttgtttaacactgcaagtcacactcaggttcgattctggacataggcgagctaggcctgtgcttaggttccacttaggccaaggccctaaaaaaattttcttttcaaaattatagattttttttactaattttaaaaaatgctatatttttttttttctaagtgaaggcctaaaaatattttttttctataacccactatattacaaggtcatcacacactataaaacaatgtttagggactattgtttgtttaattttttcttttactttcattatttgtctcaaataccaattactgtttcttttggattcatataatcccacccatttcagttcttcaagtacacactatgaaccaaactaatataatattgagatatagtacttctataatatgtttgattgaataaaatgtaactgatgatgaattgagttttgtgaaagattgtagcataaatttggggttgttccgaattcgtaacttgtgaaacatcactatattaattaaactatgcaatcacgatattaaagtgtataaatttggagttacacgtcttaatttaattttcataagttattataacatttcataggaatgggagaggtgattttgacagccattatggaagttgcgaattcaattggggttaaattacaacatttttgtgcaacaaaagattcacgagttggccggaaaaactagaccacgcgaccagtatgggtatatatattgatgtgccaaatattagtatttttctatataaagaccttttaatcatatattttcaatacttctgataacctccaatcttctaaactaatctcataaacacctaatttaataagtgtagcgccgtaacaattatgagatttgtgggattttaaaaaatatcaaatgatcttcaaactctatcaaagaggaccaaatactcaagtactgtacaacacaagatttttatccgcaaaaatgacttgactaaaaaattttgatatgcttgataaatccgtggagttcctttgtttttggacaaaactgttgaacttttgtttgtttgttaatttttttttttgggaattacatcatatattattttttttttaattnntttttttcaaatttacgatttgagtttctaaagtggtttgcagcgcaagttggaataggagtttttatacgattttttgttacaatttaagttgcaatatgaattacaaaaaaaaaaaaaaaaccgttataaagtgtaaagataaccgttattttttttttattttaatcttggaactttgttttagtatttttcttaagtattgatacaaaatttttgtactatatataatttattaaaaagaaactgatgtttttttaattaatagaaaaaacaaatatcgatttatttaattggttattgattactaattttgaacatttttatttagtgtaaattaactattaatatcggttcttgggtggtatagacaccttatgtaccaacaaatgttcaacgtgtgaacaagaaaaacttaacaaaattacaatctttttttctttccgcatcaaatatgtatatatactttttccaattgaatatataatacataatattcatttcaaaaaacacataatatttaagatattcttgacaaaaaaaaatatatttatgatattaatttttgtcaaaaaaaaattaaaatatcaattatttgtataaaacctaggtagctatggcctgatcaacgatttatttaatatatatgtgattaacatcaagtactaactactgaaataattcataattttcgtgcatgtgtaatgcatattctgaatctaaaattctaaatatttgttttcaacatataacaacgtattgcaattcgcaggtctgaaaattgtcgatgtaacgtaagtaattaatattataattattttagctaaaagcagctgcgattaggatgcaaaataataaatgttcattattctaaaaattcaattcagcttaataatttaattaatgacaatatttgtccaagctcgcacatattaatgctactaattagtattaaataacaatattatgatcgaacataaatatatatataattaacaactaataataaggacaaccttttgctgggtagttagcgcaactgaccaagaaaagaaagaagctaacaatataattaataatagcaattaaataatttgatgagtaatttgatgtgtaaatattttagtttattttcggatacaaataaatatttaattaattttaacacttataaaagttctagaaatatatttatagtttttattattgttaaaaattaaatttaattaaacttaattatttataacataaattattctaataatatataataagttaggtattttttttttttatatatataatcaattacgtacttattaacacttggaatattgaaacagcatatactctcgctgtgtgtgttattttttttttagtatatagaacaaacaataagggagacaatatatcattcatttatgttcttggccctttgtatgcacaaaaggctagttttcacataaagtaattataaacacttaaattaataaaattttgcattatgattttgaccttatattatatattgttgaaaatttataatatgcatctcattaatatatagttaatgttgagaatatacagcagaggtcgtatcaggtatgaaaaagggatccaaatagaaatccaagattaataattatatgaattgtatgatgacagtcgtgaacaataagtaattaaatataattatggacccacaaatgataatgaaaatgaaatacactaacaaccttgattatattattaaaaagtgcaaaaagccactatattataatagcgtcttatataattaattaggtagagagagaacttttatgatccaattctttaaaagaagaaaatcatgtatagatagatagatagatatgctaccaaaatttaaaaatgaagtgatatattagatctcccacactagcaagtagtaggcgcttttgacaattccgttatcaatttttgtgtaaagtacaaagggccactaattagcgggttcgggtccacccgagaacccgaatacaccctataaatatggctatttaccttcatgtaaaggattaagaaaatttgataatattcttgtgttatttattttatagttaaagagcttaataatattaactcgtgaactaaattgattaacactctaatcctacttaaaagtatttatcttatttacttctaattacattttcttgttagttcaatttatttttaatttaatttttgaaaaacttaatgcggaattacattggtcaaattggattgtataaattctgttatatttaatacaaaaataattttgtaaaatgattttgtgaaatatttcttgatacaaatctaaatgtttacttaatgttttcataatatatatatatatatatataaagttattgattttactatgtaaaaggtttataatttaatgcattaactatatttaatataataaaatattaaaattaacataaaagtaaatataaaaataattcatttatttgtaatataaattttacatcaagtcatattattatttaaatttaaataaatttttgacacactattggattaaatattttacaaaatgaattatatttaaacaatacatcatgaataatttgcatttgaattacagatgcttataatcattataaacaaacatttacataaattttttaaaaatatttttatttttgattccataatttttttttcattatatatttttcattcctataaaatttctatttttaattttgtatgctcaaatatttttatttctataatttttatcttttatttttatttttccttacataaaattaatattttctatttttattcttactcttatatacattcattttatttcacatattattattttgtcactgtaaaatttatatttttttcaacaataaaaattgttttttttattaatgctcttatgtataaatatatatatatatatataattatataatatttaagttctttaccatgtagatgtgtatgtacatgtcatcacgaataggtgatcaattagagttataaatttcatccctgcccaaataaaatggttaacaatacacaacaatgtatacatatatagattactagtaaaaagctacgtgcgaggcacgtacactaacttttatgatagttattttctattttatttaaaagtgatacacttaaaaattaaagaaaaattattattagttattaggtgagattattattattacgtatataaatctaaataatataatttataattttgacaattaaaagtaaatactggatgcaatatattagtgtttaagaaagcttgataatttaaatatgttcttaagataatccaaaaataaattaaaaattgatgttaaaatcttaaggaaacacaacttaaatgtgtgtaagataaaaaagaaaattaaaaatcaatctctaaatggttgataattaaaaataacttatgtctaaaagttgtagataagaaaaataatgatactcatgggtggagtttaatctttttttgcttcgatagagacaatagtgtgatttttatattttacacttttcattctagctgagtccgcatataattgaattgtctattttttcgtggataaattgaatatggtagtgtcgacaaagcagcggtgttcctgcaaatgtatataaaaaaatgttattaatatatattaaaaaaacatttatttcttttatataaaaaaaataaaaacgttgcaaaaaatcgttaaattaaaatttgcagctgcaaaaaaaaaaatgtaaaatgactaatcttgttaatttcaattagtaattgaagaagattcacgagcactaattcaatcatttaaataattattataactccaatgactttataactcaaataactgagatggtggcaaaaagag

SEQ ID NO: 15027 - DNA, 5236 bp, Cannabis sativa
agagagagagaaaccacgaggacaggaattgaaagtttccctctctatgtttggaaataaaattataggaaggaaaacaaaaattctaaacaattttatttcctattttggattcaaacacaaagttagagagcaaatttttagaaaaagtatagttaaataattttgtaaaatattcttattttgtctagcagccttcatgtatttttcatatgaaggtttctcagctgcagcatctgaaattggaactagcctcttccttttcaaagctaaaaatgtcaatggtaagcaaatataagttaaaactcaaaaacatcattattctaatctaatctgttaattattccttcaaaataacaaataatctttctaaaagatatgacaagtctccacaattttagagtatgattttttattttttttttcttcatttccaaaatctttttcaatgtacaagtaaatatttctctgttttttctttccttcttttttacttcttaatattgaatcctcacatacattttcaccgatttttttaaaaaatattgtaagaagataaatgtgacagtaataagaagattttagatgagaaccagatctcttgcggtttgaaatagctccctgacatttgatgcactttgcccaacccataatcctgcttccaactcttgagctttcacttcaacaacaggaaccttagcttctgctgctatagccaatgctagagatgtctttcctgtgcctctctcaccaacaataagaactccctgcaatataagcgacaaccatcttagatgctcatcacatcagtcaccgcttccttgaacacctgtgctaaaactagtaaaaacaaatgcatgtacttaagctgaacttatattttttttttaatttttttatttctaattcttagaccaaacactattaaataaagaactagaagaagagaaatgtcagcatgagcttccaatggtaggaaacatttcgaaaccatgcaaactatataaacaataagctcaccaaatatttatatgtatatatatatatatatatattataaacacactcctatctttactcatcataggagacagaccagtgaaagatatgttttatcatgatgcatgctatataggaggacaatgtgtatacagtgaagtttctgcaaatatcttaagaagaatatacccgaggtgcacgagcacccatctcctgaaatgcacgaggattctgaagaaattttacaacttcattcatttcctctctcatactctcaatacttgcaaagtctttcaaaggtattggtggattttttaccctctgcaaaccagaaaagatttttcagaccataaaataaaacaatatcggcactataatcaaaagaacctttatgtggcaacaatataccttcatttgatcaaaagctcgagttataggatcaaacccagcctttttcctttgtttaactctcctctttctatatttgagataatatttctgcataatagcaggtaaacagtaggataatgggatcagaacaaagatgcccaagcacttgatcaagcatagtagccaataacaatcttcagatctactaatgtttcctttgttgcacaatgacaaaaaaaaaaatagcagggtaagggtagtaaaacagttattttgcagttacttaagttagtgtttaactatgacgggttaaatgtaagaaccttagtacggcttgaacttaaattagtcatgcaggaacttacaatcaaatcatacggaatgacgaagaacaggtcatacacaatattgtgaatttataccataaataaatatttatataaattggggtaaggaatgaagcaataccattctccctaatttccgaaagtttggatcttttctatatggcccaaaaccaagaactactgggattcttcttttcagaaataggaggacatgaaacaacatatatccatatataacagttcttatagtaaacaagaaaaaccattggaagtcatctctctttctggatttgtaactcttttctgcctcagattgccatttcaagtaccatgttgagtcaacagcttgatcgatttcctcaggccatgccatccccagcttgattcttacctggaatgaaccaatcaacaatttcagaactttaaaatagagttagtaagtataacagaaaaaataatatgcaaagatgaaaaacaaaaccctacagggtaagggatcacaagctccagtataggaaacacaattgccatcattatgtcatcatttgcttctgtaaagttcataataacccaatctcttgcatatgaaacaatttctgtcttccataaagcattgaagcattgttgagacagccttagtgtcaagagaaactgttgctgaagattcaattctgagaaagggatccacatcaggtgaacagtagttggaataccattggcaagcattttcatatacaggccatcaaaccctccgaaatcttcatatagcatatcaaattcctggaataggaatgtaagtgtatgagcatatataagtacagaaattaactcatagtgagaaaattaactatggaacttacctttatgtcaacaaaataatctttgtcatccccctttattgcaacatacattactgcccaatcatgcctaatccgcgcatgctctacaagtttctttgacacagcaaaaggaacagcaagtggatccatctcccacctctttttctcctcattgtaccaagtcttcgacattactctatctcgatccagaagaatatgttcctgtcattaaagtacagtgaaaaaaaaaaacaattgtaaataagcacatcaattttcttaaatttatataaaggcaagaattgtaaaggaaaattttacctgtttttcagctacatagtctttaccaaactcaatattttctaacaacttttttttaagttctgccttggcttcctcacgccatttcttccacccatgatacaaatgaaggctaacagctttaggaaccattacttctttgtctccaaacatccacttcatctcgatttcaggaaaacccttcaccacctcatcttctggggtaagcacaacaaaacgtttttcatcaccaaacttcttcatatcttttcttatacgagcctctacatacttctgcatctctcttgactctctaagtctttgttttatacgttgagcgaaatcactagcattgttgtcaaaatatgagccaagatcattatcttccaagacactaggcaaaataatttgttccaaatgatttctttgcacactttctaactctttctgaatatcagttttagaaagtttggtgactgggcgctttggcacactgcaacgaaataacaatagatactgagaaaagaccaacaaaacttcatcaacctcttttaaaaatgatattgcaaggtaattcaaatcatgcagcattcaaaaagacaattgaatcaacaagaaacatcatctgtaattgttcacagtatttttctcaagagccatgagtctggaaagcttgatgaagttttaagtttgtttttgttatataatttcggtataaatgcctacactgtcagagctgaccagcttcaaatccaaatggcccagatgagtgccaatgaaagagaataacaatcacaatatgagataaatatcaaaagaagcattataatgcaagttttaatcaagaagacagtgagctagcaaaagaaccgtgagtcaccagagtcctattgagcaagcaaataagaacatcaaaccaaaccatattcctcagccagcagcaccatagtgctgcagaacaaaaatgcattcttttcataaaaagctgaacttggcaaatgcattcttcgttttaaatttagactcctgaaggggtaagaacaccaaaaatgctttcttttcatactacaaaatacaacctctcgtacctatccataccctttcgtctcatttcccgattaaaaccttgaaccaactgctcacactccctctcaatgaaacaaagctctctcaccccaaaactcattgccgctgtctctttcctcagaataacatcctcaatctccccaattctttcccacatagaactatactcttgctccagccgtttcaagctcgcctccaacctctccttcatatcccccaattctttatccacattccccagcgacttctcgtattctctcctcgtgttcaccacagcatccacaatctcctccgaccgattctccaacttctccttatctctcttcaattccattaactccacatgaagcccattcatgattccgtcctgcaactcctccttcttcgccttcaccgccttccacgccgcctcgacttgtttcacatccccatttcctttcctcgcctcttctatactcctcaacagaaacgacaccgtttctagtaatctccgcgtgcaatctgcatactcatgactcctcgaactcccttcatttcctttctctttctccttctcattctccttcacccttctgcccaaaacctccgcaaccggagccgcaatggcagacacacgaatccctcgaattggagcgaaaccgattgcgaaacaaaacaaagccaaaactattttatttgccacacatttaagcagtcttccctctggctccggagaattcaggctagaagaagcaacacgttcctctttcactacttgttcggagcacagtgagctacagcaaggccctatggagctaaatgcagcaaatttatacacatgtgggaataaaattagttgacgtttctgtaatttggaagcgagagactgagttctgatacggcgagttcttgaaaatggctggagtgatgagtttggatgcggagatgagaatagaggagggaagtgagtgggaagaagacgagaggcgatgatggcatccatgagattggaaaaacaggaaactaaccatccgccatttctaggttttgaaggtcaatttcatcttgattctaatgctatgttagtcctctctatccttggaaagaaagatttagaatgtgagagagcactgagcagaggtttaagagttttttgacgacgacggagactgatgaggaaggttttcttcaacggataaatcattagttggctgtgttaatgggctggactcagtttctattattgggcctaccttctccggcccgttagaatttattcaaaaaatacctcacttt

SEQ ID NO: 15028 - DNA, 4565 bp, Cannabis sativa
ggtgttttttatatgcatgggattttgattcaatattgcccttttgcttatagtcttttcaatcacttgggctttggtcattttgtttgactgatatgatagagtgatgtatttgctaagattggatttttctatctggttttgttattaggtataattttttgtttatatgatcaaggatcgattttggtattttggtattgtcactatactttttgtcaaatcagatttctttcttgttgttgtgttaaatgaatgtaatttaaaactcagaaaggtaacaaaacaaaattgatatatggatattgatggttcatggcatataattacaaaccatgcataataagattgatctctgaattatcttgctttggttgatacaaaataataataattataataaatgagttacaaaatggtatatgttatgctttatgcttggtgaaactcttaagctttaattccctaattagtcttaagtcattgatgttgaaaagtgttgctaattgggtcatttctttctattttcagattctagttagattatgagacttaattctaataagtgggagaaaaagtttgaagcttgataagaagaaatatggcaacttattactcaagctcaaacaatcaaagagataatactcaaatgatgtattcaagggaacacttgcccacttcatatcctgaagcttcagttatcccaagcaatatgatgatgtatatgaacactggatcatactcagatgccttggctgggaattcacagcagcaaagtaattgtatggagatgccaccaatgggggggccttctgattccgccacacagcagcaggacatcttatcgaatctcggtggaacaagaatgggagaacatgatttcaatgagtggagatcatcagatgggaaaaatgatatgttggtgaatgctcactcaatggctggtggtgctccaagtatttttcatggtggacagaatttgcagggtcaaggattatctcttagtcttggtacacaaatctcatcaggaattcaaatgccttctatctcatttaggaatcccaacatggggttttcgtctttcttgagcccgaatccatcagattcgggtgagggtggtggtgggtgcagaaatggctcttcaagagatgaacaacaacagcagccaaggaatactaatgttgaatatttgggacctggttttgttggaggagttaatcaagattcaagtaaaggagaattgtctccatatgggatgtcaagtattgcaagagctgttcctagctctaaatatctcaaggcaacacaacaactgcttgatgaagttgttaatgttcgaaaagcattgaaacaacatgacggcgaaaaggctcaaggtacacaagagcaaggattgaaaagccccagggaaggtgatgatggatcaaagaatgaatctacacctggtggtggggagtcagctagtaactcccaacctgagctttcacattctgaaaaacaagatctacagaacaaattgactaaacttctttccatgttagatgaggtatgcacaatgttttctagtttatgagtctcattatgaggttatagcttgtgtttttttcttaactcattttttcatgtctaaccatcaattggatatgataattaagaggatgaaagattaagtctttgccccccttaacccattttttatcatcattgatcgttgtatgtcaaatatgtttgctaccctctagaattgaccaatagaaaattattgataaaactaaaattttagatgattaacttgttgaaaatgactattttgaacattatttgactattatactaatactagttttaaccgatatttgttgcataactacctaattttttgagtttgtaaccgacggggacccattgacttgttttagcagcaaattcttaagagtgtaattttgttcagctttgtcccaacatgttccgtttgtgagtttgtgtgcacacatataaggacacgattagtacttgtttaatcatgtttttaataaatatgtattaatcacgtcgttacacatgtccagacaaactcacaaatttgttgggacaaaattagacaaaattacacttttaataagattgggtagttttgccgctaaaaaaaaatcaatggggtctgtgatatttgtggcataactatgacataactactcaatgttttgagtttgtaactgacggggacccattgacttttgtagcagcaaaactaccaaatgttcctgaaaatgtaattttgttcaattccgtcccaacatgtttcgtatatgagttttgcatggacacaattaatacccgtttaattatttagtaataaatttgtattaatcatgtccttacacgagtctagacaaactcacaaacataatttgttgggacggaataacgcttttagtaatattaggtagttttaccgctaaaaaaaataatgtctcttccaattacaaacctcaaacattaggtagttatgtcgcaaatcttcttagttttactagagaaaaagttcaatcatgcttacctgaagaaaaatcctggctccgcccctgaccatactcatcaatctaattctttgatggaaaatatttatctaatgaactcatacaacaacaaagttattgatcacatcattagcaatctcaccttcctataagagtgattaggtgtagtatagtcacttccagttttggaagctttagtatgtgtgcaatcacatattggagtttctttctttgtttctattccattttcatatcctttcaaaatggcattgtgatgattatttactcacaggttgatagaaggtacaagcaatattatcatcagatgcagattgttgtatcatcatttgatgcaattgcaggatgtggatcagctaaaccatacactgcacttgcccttcagacaatttcacgccactttcggtgtctacatgatgcgatcgttggccaaataaaggtgactcgcaaaagccttggcgagcaagatgcttcaggaaatattaaaggagttggaatatctcgtcttcggtatgtagaccagcagctgaggcaacagagagctcttcagcagcttggtatgatgcaacaacatgcatggagacctcaaaggggattgccagagagttctgtttcgattcttcgtgcttggctgttcgagcattttcttcacccgtaaatcatctagctttttaaccccatttttattttcaattattcactcttttggtgcccaactagattaatcttatattgaatatattccaggtatccaaaggattctgataagatcatgctagcaaggcagacaggcctcactagaagtcaggtaatgataattgtgagcttagccttttctagagattaactcttacaagcatgatgtttagaaagctttgggtaatctttgaaaggctaaagaacccaattatacatttattattaacatgggataaatatgattagaataagaaatattaaagaaaaaaacatactaggtggattaaaagtttgattaagtttttaatatactctccattttcataacaaagccaatcatgtgataaaaatgatcccattttgaatttaagattaatagaatacaaaatcgtgaactttgacatataccaaatcgtgcttctcaaattttttcggactgttagaagttttttctgaactattgagattgttggtacatatcaaagttcagaggaaaaaatcctaatcgtatatgcatcttcttatatatgtcaaaatttctctgcacaggtctcaaactggtttataaatgcaagagtgcgtctctggaagccaatggttgaggaaatgtacaaagaagagattggtgatgctgagatggactcaaattcatcatccgaaaacgctgcaaccaaagcaacaacaaaaggcgacattatgacctctgatgacaacaacagaggtggtgaagacttgcagcaaagcgcaagctcaacaggaaccgccgagagatgtagcactggccatttcatggattcttcgaaaacagaccatatcactgatgttgaaatgggggcaggatcagttggttctgctgctgccactttccaccaaagcctaactagacgcgaagttgaggctgctgaagctgtctttcctgatcatggcattgttcaatcagatggaagcaatgaaaggtttatggctgcagccgctgcagcataccatatgtcggagttggggaggttcgggagtggaacaggggtatcacttacactaggattgcagcattgtgatggcggtggtggtaacatgtcgtctatgaatggcgcgtcacaccaccatggctttgtggctatgagaggagatcatgacttgtataatcccgcaacctcttcggttggagctgaggctgcggattttgaatgcttaaattcagggaatccgcagcctcggtatgcttcttcccatttgttacatgattttgtagtgtgaatgtttggttttgggattagagataatcaactttccatttctcaagaagaagaa

SEQ ID NO: 15029 - DNA, 2071 bp, Cannabis sativa
  modified_base (1303)..(1307): a, c, t, g, unknown or other
tgttagagagaatggggggaaagtgaaaggatggggataattttggaagaaaattgaaaaattagcatatttttactatgtgtaaattttgggtataattaaacaacatttatcaattttttagcataatatatcaaatttcccttttttattccactttaaacaatactattttcgatgcatatgtttacaaattttggtcttgctcaaacaaaattaaactccaaacaaagagtaaagagctatagaaataatcccacattaaaaatgtatgagaaacattatagctttaatatagagattgaactactccacttagtaacaatgagttttaagttggaacgtttattttctatcaaaatactttctatttgaatttatgaaatggtatcaaactaataaaagtttctgataattccacatcgaaaatgtatgggaacattataacttaatataaagattgaactacttcacttaatatcaattagttttaagttgatacatccatccctcaccaaaataccttctctctcaatttgtaaaaacagcagcctactttattgaatttcatttttcaaaaaagaaaaaaattattaaatactaaaaacctatgttgatttatcattgaatcatgcggttactggcatgcttcactactgaaatcaattttttttaaaaaaataaataaacaatcccagtctaaagttgtggcccttatccaaaccttttttatttttctcactttcctttttaattcatgtaattaaaccaaatcaatagcttttaacagttaaagtatcgaataataaaagcaatatcatatcaatctgcatcacccttctataaattgagatggaattccaagtccaaatgcagcactcattaactcttccccttctccctcactcatcactcactttttttttcacacacacaatctcacattctctctttctcttaacttataagagaaaatgaaggcagcataccttatgatggtatgcactgtactggtgcttctggtagccaaaccacaagtcacaatggctgtaacttgcagcccggtgcagctcagcgcatgcgtgagcgcgattacctcatcaactccgccatctcagctttgctgcagtaaaattaaggagcaaaagccctgcctctgcgcataccttaagaatccaaaccttaagaagttcgtggactcacctaatgccaggaaagttgccaacacctgcaaaactccctatcccaagtgctaaactcaaattattactctttcaagagcctctctctctctctctctctnnnnntctctctctctctcatatatatatggataatgctagcttaactttgtgtgttttttggtgtcttttttatatgtctgttgctatggctaatgcacttagttgtgatgagaaataatatgttggggactcgttcagatgtcttgttcagttttttttctcttcttcattggtgtgtttgtaaaagatagtagtttgttgcggatggattatatatcatatatttataagaaatgttggatcatgtccacatgacttagttctctattaactaatagtcattgcttaactatcatttagaaaaaggtcatgaattaaataatttcttttcattttaagatttgattcttgcttatatgacaataacataagcaagaattcgttcaataaaagcaatcaggtgtagtagctctggaaaacgaaggacacgtgcataattgcattggcactacctcccacactcttccgatcataattttataattttactcgcaaaattgttatgatacattgtcataatttccaaaaaatggcaacggttaaaggattttttttaaaaagctaaaaattaaaatttactacttagtgttagaatatggaataagttgaatgacgttctatctcaaaactaattggctatgggaggagtagttcattcctcttatatattctattatttttccacacgtttgcaatgcgagactctctaatatcccctcaagatggtagctattttatttgcacaccatcttagataactcgatcat

SEQ ID NO: 15030 - DNA, 18106 bp, Cannabis sativa
  modified_base (7394)..(7395): a, c, t, g, unknown or other
  modified_base (16432)..(16432): a, c, t, g, unknown or other
aacatatcttgggctaacaattcacattaactatcgtatgccccaaccctttgtgacatctatggtgagaataattctgactgtagatggcttaatcacatgactaaatgtctcaacaaagtcaattctaggtctttgattaaagccctttgcaactagttgtgctttcggtctttcaacactcccatttaaatttctcttaaccttatacacccatttatttccaatgatgttcatccaagcttgtctttgaacaagaactcaagtgccatttttcttcaaggctatcatttcattatccacggctcttgaccatcctttgtgtttaagtgcttcttcagctgtgatgggctcttcactatcatcacaccaattttcctttcccacataagcttttggtttaaagataccatattttgctcttgtcatcataagattagtaggagctaatattacttctctgtcttgttgtgtttctattacacggctgctggtgtgagaaccaggcttggtagcctcattctgttcaaatttaggagcattagacaagctatgatgagaaaaatcaggttcagagttaaatactagatgttgattggatgagctttcttcaagtgattgatcttgatgttcataaccagttggtttgtcttgagttcttcacgtgacattattttgtgtgtcatttaagtgatcttgttgttgatttaaagaaaaaaagactgaccaagaaggaacactgactaagatttcttgttctggtttatgagtgttaaagaaaccagttttacatgaaaaatcattttcattaaaaatcacatttctggagatatataatctgtctgtggtactcaggcacttatatcccttgtgtgagtcactatagcctaagttgatgcacttcacagaatggtactgaaatttatgaccttgataaggtcaaatacaaggatagcatgttgtaccaaaaactctaagacatttataatctggtttcttagaatggtactgaaatttatgacatttataaggtcaaatacatggatagcatgttgtaccaaaaactctaaaacacttgtaatctagtttcttagaataaagaactttaaacaagcgctggtttttaaggacaatggtgggaaatcaatttatgagatatactgcattttggagagcatcccaccaaaaccttagaggcatggaggcttgggctaacaaagttaatcccatttcaactatgtgtcgatgttttctttcagctttttcattttgaggagaggagtgtgggcaagagtgttgaaaatctatgccctttttaatgacacactttgaaaaagcctgaaattcccccccaccccaatcagttctaagagctttgattttcctatcaaactgattttctacaatgactttgaattgagtgaaagcattaacaacttcagccttagttttcaagggatagatccatgtaaatctactataatcatcgacaaagtggatataaaattgaaaatttgtgttagacatcacaggggcaggtccccacacatatgtatgaacaagatctagtggatgttgttctctactattgctcaaagaataggataaggcatgagattttccgaattgacaagctccacaaaagaattctttttcattctttggtgattttacattaacatgacttaacacataatgtaaaactctactagagggatgaccaagtctcctatgccacttgtccttaattcaaaaagagggaggatcaacaacatgttgtctctcctttgattttgacactaatctagaaaataaaaaactttcaacagactgtgggaaattgtgatggtgtaattgacttctcttgtgactttccaactagtacaaaccttccttaagtgtcccttgaagaagagccctccttgttgccaggtccttcacaacataatgaaaagaaaagaattcaacagagacattattgtctcgagtcagtttagatatattgatcaaatttttagtaatatttggagcatgtaacacatcgctgagcaaaagtttactgttagcagaacataaagtattgcttcccacaggatgtataggaattttattaccatttccaataataagatttccttaccacgatactcagacttctgtatcatatttccagcatcagatgtgacatgattcgtagccccgctgtctgcataccaagctgcatcatttaccatgtctggtgtagcaacaaaagcagcagctccttgtgcactcttgtttgagttttgagatccaaaaccttgaggtggagaccctataaaagtctcatcatacctattgtaataataaacagatgaatgaccataacggccataatcttgacatgttggcttcgagtttgctccactgcaatctccacgacctttgcctttatttccatcttgtccaccacctctttaattaccacgattttcagatccattgtggttatggttaggtcctcttccaccttgaaaaccaaatggttgagttgtggcaagatttgcagatggagatggtgaggagttagcagctgcaatcttgtttgtgccttaaataacacttaatcttttgactttgctatcaaaacttagtagtatatccggcaattcttgctaagaggtttagggacgagcttctatcattagtacaataggtaaatattcaatatccaagctagaaagagcattagagacaagaagtttttctggataagggtctccagccaatgctagaacatttactcattggtttttttgtttgagataatcaaccatagtcatgctccattttcgaacagtttggattttggtacgacactcatccatttttgccttggaatgagatccaaacagattttcaagagcagtccataatgtagcagaggaatcacaccccatagcctatgttgcaatgcctttagacattaatccatacacccagtagcagttggtcgtgtactatccaagcctcaaaagctagattcactatgagagtttgaactcctgcatctgtcttagtgggtataaactcatctggtttagctcttcaaccagtgagatatccatctagacggtgaccacgaacgaaactataatttttcatagagagtagttattccaatcaagttttgaaacaaaagatttggttaaggtacttcctacctaaggtatgagtatatttggagtctttgagtctgtatgatccgacttggggcagcagttgaagattagccttcgacaccattgttaccaatggaggcttgagtgctgtgagcaaggttttgggtgttatcagccattgcaaagccacacgtccatttggctctgataccaagtttgaaaacaagaaaaatgtaacagagaaaatgtagtagagagatacagagagaactgtaaaagttcaactcaaaaaaatttgtgactggctgattatattatatattagtaaatggtacattttagaaaatacaataatacactaatgattacatactgaaatatatacaaaatattctaacaaattctgacatcagaatagaatattagagttgcgaccactctctaacggctctatttgacaggaaggcagaggacacaaagggaataatcccattccctatcagttttcctctattccctttttctacctaccatcggcttgattcttcttcttaaatttcccatacagttaataaattagatattataatgcattatttcccataagactccatctaattggtgaaagcagaaaagtcatcttttttaaaaaaaaataataataattaaaaactaaataaaagattgaaatttcttcattaaattaggattgcgatggtggtggtgttgtgttgaaatagaactattaaggagtcgttgtacttgtaccacaaaaccaagaatgaaatagtactaccaagagtttgtgtagtacatatttttggtttgattatggtgtcatgagctgtggttttgcttttgcatttcgcaatttagtagtacgcaaaagagagcggtagtagtgtagtactagtactctttacacaaggagctttaagtcataattgggatgtggatagaagagaatgctagtacacaaacgtacaattcttctctttgggccttcttttgggctctcttctcaagtgcattattataaaaacacaacattaagactcttctaatccacaaatcaccaccacaggacaattttggattgcaatctttgtttagatttaaggtgcagcacaaatgatatggtgtgtcaaaaaatggtgaggtaaatgcacaagtttttacttattaatatataatgtaattaagatgaaaagaggggatgtgaaacagaacaagacagggaacagacagagcatggatggagctttcgacagaaagtgaaacctgttgtggctctactcatgcactgcctcttccctggctcaccctgtgcccccttcccccttctctttcattttctcattgtttttgttctttttataatgatagctgtctttcaatcttttatatgcatgttattattattattgttgttgttgttttgcttagatgcatttgtttgttagtatatactagatacgtagagttcttcacaaaggggatattcactataagccaaattagccattgaaatgcaaagaatgatagtataagaaaaccatgagagagggatagacaaaggctaatctatattcgaatttcgcttcttcattacataatgatccgtcgttctaattgatattcgttattttggctgagaatcatcaatatatgcttcttctctggatatactagatcgataaagcagattattccaattcaaatgaagcagaattctgcaagtaaaatcacatttcatgagaatcagatttcaaaatttggatgaacaaagtcaacatcacaagtctttgacatgttagtttttgcttttatactattttcacatccttcctaaacatgaagaggtcataagaaacctattttaatatttgttttctctgttttccataagaaaccaagtcaatgtaaactaaccaatatgcatagtcaaagcaagcaaataaagaaatggttacttgttattttggtcagtccagcagagaggagggcagtgagtattgagtttgtgatccaatttaccagaatcaatgacctgcacatcctccaaaaggataacataatggttgagcacctcctgtgcgctcttctgccctccaatcatggcagccactagttcccagcgacgcgggtgttgttcgtcaacgacggccagagccagctcaaacaacttgttctcctcccaactccaacaaccctttggtatatcttccataattgagagaaaatccaagtaagaataatgacaaatattcatgaacactcggatctaggatccgaattccattgcaggctaagtcaatacaagaatcttttcaggtgggctttgtttgattctcttcggcagattctcagttggttttttcggagacaactcaagagtcaggtggtatctgttatgggcagactaacatttggctacacttataaacaacacgtttcaaaatatatatataaaatataaatagacagcataatttaaatctagtaaactacaatctccatttgttttggccaaaacaggaaactatttaccaaaacagtaagataataagagactcttcatttaccatttcttgcaacaccgaggatctctctctttttcaagttataaaataccccaattctgtcattggattccaactagtgttaataaccaaagtctacggcatgaatagacatgatatgatatgatatgattattattttattattatttttgtttttgggagaggaggctaagagatatcatattttatgaatcgtgtactgttatgttacttaaaccatgggattagattgtcatttcttttaaccaaccaataatggaaagggacctaaccattttgatccataattattcaacaaataataataaaatatcataatcacttacgtttcatgtttgcaaaaatagaaagagacttgggaagcccacgtaatacacacttaaggatatgattatttttaatgactttgattaggtgaaaggggtggaaaaggagatatgatatcaatgaaagaagggccacaaatgggtaggtaaaaccaaaattaacaattatttgtctattttagaaaatgaaataatataaatttaaatatttactatgttatggtggcggggcaaaattaataagaccctacttcatctttttttaatagggtggtatagactgcggttatgttgatcgattttttgtttagataagtttatatgtccccttcagtccagacacgactggactctataagatttacacaatttcacttttggctagtcatcacacattttatatatgatttatactattactaatactcatatcctcacgcaatgcaatgccactgattttcttctggttactgcccttggatagtgttataataaaataggaatgatattatcgaatgaaatttttgggattgattcgcacactaggttgctctccttaagacgcttgcaacactgcccaagaatgtgcaaagtgcaaacaatggaaaaattttagtcgtccctaaataaaacagcccaatcgaaataccactgtataggagctctactgcacgatagaaaaccgtcgaaacaccacacccaaaaattactgctcggactacttatataatgtaatcgtaaataataaacagtaaatgatttttctatgaaaaagatgtgtttctcctattagttttgatgcattatataggaaatgcacaaaaggtcataacaagaagaaaggcgttgagtgagatcgtgagaacgatgccgaaaataagaacacgtctcattttaccaattaatttaaacatgtttaaaaactgttgaaattaattaaataaaaataataattaaattttatccaaaaagtaaagtatcacaccacaccaactgacctagtcggacaatgcgcgtcgtgcgtgcaatgggtaagtgtgagtcctcacccatttgcacaaaattgggtaccctatggggccctatcccaagtggtagggaaggttttgatgcattatgtcctcacccgtaatgttttgatgcattatataaggaatgcacagaggtagtaatgggaagaaagacgttgagtaagatggctttagtatatctaaatagaaaaatcatagataagaaactatactagtgattgtggttcattcatctggccatagactagagccactttcaattcggtaatattttgttcattaattacgccnnattctttcatttccatgtaaagataatttccttcacgggtatgttcacctactccgccaaatatagatacgctcccataaactttggcaatgttgttgatcaattccataatgagtactacttggtttgtttggttgttggcctgaccaaatttgttgatggaaagtccttactgctttgtcatccagagcatgggtccccaagggtgttgattaataggctccaatagtcttattggaagaaaaaggtcctcccaaaataccatgcaagacagttgaataaagtgagtgaaaaaagttatacatttttaaaaatgaaaaatcgttttaccaattaatttaaacatgtttaaaaactgttttgattaattaaataaaaataatatattaaatttttttcaaaaaacaaagtgtcacaccacaccaaccggctcgtggtgggtcaagtatatatccacacccattcgcacaaaactaagtaccccttagagccctatcccaagtgtcaaaattacattttatatatacccttataaacaaaaactcatatccactcatgtcaaaaacactaaaacactatcattttgttaaaaattcattaactctatgaaaaagttccaacagatcaaccgattatggaattttctgcttcaaacttcacgccttcaaacgtttttaatttgaatttgaagtaatccaaaaggctggcattgaagctaacaaaagaagctatttctgtccctaccttaggacttaggagttagcttgctataataataaacaactaatcttgattattactatgttgctatttgtttattttatcggaagataattagtcatgatgttatcatccacttgttcatgtggagcacaaaagtaacactttttttgataaggaatgaagataattattcttcatacgacttgctaagaagaagtaaagatcgtttctaaatgtcttttagtttttcattcaactagcagaaggctaacattcctctccacttacttttttttaacactaaacttgattagtatagaaattcattattagaatccaccaataatgaaaaaaaaaaaggtgtttactaatagcctggtacacaatattctaacctgaaaccagactccctgtaaaagacatttctaacccattttcattctgggacaagacatgagaaagaccgatattcttaataaaggtaagtttagcatcaagcaaagaagctacaagaataggacctaaatttcaatgaaagccaacagtaatggatcattattattcagcaaacaaaattgggtaaaacgctactgcacctgtccatacaccatgtagaacgtcgtctctcttccacaacatgtataatgatgcggctacttacctttagagaagataataaaaaaatgtaccaatgagtatatcatacaaattatgatgccaaagattgataaacttagtagatgtgtattaactactcttagcgggcaacctgggtataatagcttcactgggaagagctgaaatgggcaattgcatccatttcctgctgcaatagtagagcatcaataaagatatccagatcatccccctgcattacatcatctattgcatgacaagttatgctgacacggtgatcagtgactcgcccttgaggaaagttgtatgttcggattcgttcggatctgtccccagtaccaatctgcttaaagtgatgagtgtacaacaatcaccaaaatcagaagcaagatttaaccaagtttttttatcaactttagtctctgttgtttgttacctgttctgaccgaagttttgacctattgctatgaactctagacctctctatttcatatagcttcgcacatagaaccttgagagccttggccttgttctataaagagaacattacattatattaggaaaacataccagttagaaagtggagttaaggagccactaggcatagtgataaacaattgtaggattttgaagaggtgcagagacataatgtgtaaatcttagtgtggatggtgtggtttggtattgaatataagattctgtataaacgtatgaagaaaataaaaccagttgcaaagttcagaatgatctaccatgtgttgggaccgttcatcttgtatgttcacagtcaaaccggatggaatatgagttatcctaacagcactgttagtggtattagcgtgctgtccacctgcaccaccagacctgtatgtatcaattttcaaatcttcattcttcagctgcacatctacctgcaagtcccaaggtacgcacactaaatataacgaaaaataatgataaaattatcaaatagtcacacttcgagtgcatatggtgaagagaagaattattgaaatagtaatggccaaaagtttagtacttcatcagcctgaggtagtatagcaacagaaacagcacttgtgtgaacacgtccagacttctcggttacaggaactcgctgtgaaaaggaaatatgagtatttcaaaatagaactcataaatttggagcgaagagaggcgagatgatacctgtaccctgtgaattccactctcaaatttaagtttcccatagacatcagcccctgagatagccgcactagcttcctgatgataagtaacaattacagacctttcacaaatgaaattatgacagcaaaattttgatttcaataaaccaaccatttagaacagaaatagaattcagggtcagaccttataacctttaagatctgattctgtaacatctaccacttcaaacttccaacctttcttctgcgagaatctctcgtacctgatgaaacaaattgagaaagtttcaaaatttgaaatcattattaaatgaaatagtatacaaaagctaaaaaggcagtgctttaacatacattttgaaaatgtccatggcaaacaaagaggcctcgtccccaccagtgcctgtaaaaattgatcattttttataatagagaatcaaactaagagaatgacacttagccatgaaacacttagagtaaaatcaacgagtttattttgttattttcaagctttcaaattgttattttttgtttagcaaattacgtacctgctctgacctccaaaatgcagtccctctcatcagcatcatctttaggaaggagtaacttcaacaataaattgtgaagtgttttctcttcttccaaggcctgattcagttcatcattggccacagtaagcatttctttatcatcagaagattcagaaatgagtgacctcaaactacaaatctccttctgcttggaccttaagtgagaaatgaggtccatacaaggtctgagcttgcgaagctccttattagctctagcaaactcagttggggaagcttctggctgtcttttcagtaaaacaaactcagaataactacaaattaaattgaataggataggagatgagtggggtggtggcttgacctacctggttcacagccttttgaagaaaagcagttcggtattcaatggccgaaaacctctgttccatgatcctaattagattgggcgatatgtgagcctcagcttgggattctgatatgcaaatcactgagaatccatgatccataaaaattgtacaaagaaataaaaaaaaaaactaaatgagaaggcgacgcaccggttgacgatgaataattaagtgtagccattgatactgccggtgttctcttgacagtggtagagaagctcccgttgccgaagcgcaggcatttgagctgaagcagaagttgatgattccttctcattctttgaacctcgtgagtcgccactgacgagccgactcacaatcgcagaataccaaacaatttatttatttatttttttgcttaaacaaccaagaatgaccaacggaatggtcatatttctaatattattatttgtgtaatttaatattaaatttaatttattttattttaataagtattataaaaaattgctaactaattataaaattaccacataatcttgactctcttcatcagctggaactgggatcttctcccacaaagagtactttagaactttacagtcacaagtgaactcgtccgagccaagaaggccaactgtcctcagatttgcctcgtttaataagaaattagctgatcgcaaaccaaagggaagacctagtaagattttacggcattcaaccatttcagcggtggggattggtcttctggaaactactgttaacgcgataaagtaataagtaagcgaccttaaagtcatagaactcaaaaccaagtttttgagcgaaatgttgttgtgttgatgggggaaagacccgtagtccaaaagaactcattcttgaactcggtcttgtttggcagtctcacaatgatccttcgatcatttgtgtgggtaccgagataataaacgccccctgaacatctcttcctcgcaggaacgactttgacagagtaaaaataaactaactctaggggagtgggacactcccatcctaggatgtgatacagaacatttaaacttgcaagaattctgtaaggactttgaatcagttgaaaggggcaattccaagataattacaaaattctttgtagtactctctcagggggagaactgctccaaccctaatgtgctcgaggctccaagcgcttatcccagacgagccagtagtactagcatcaccgcactcctcgcggataactcttttaaagaatacatagaatttttactcgttgattatgacacttgtaggatttttttctttcgaattattttttgtaaattttcccttcaaactttggaaataattgtaaatttttctttttggttgcattaaatttatttttctagatattctttttaatgtaagactaattcagggttaatctactgtaatttaagaacctatgtgaatttatttttgcataaatagtactttgacggtaaaatctgagattgcatgtgtctgtattattagagttaacgtttaaatatttaatattattatacttatttccaactagtttaagtttgttaaataagtctttgtattataattataacgctcgtggtcatattaataatctgtcttaaaaaaaataaataaaatgcaactaaaggggtacatttgtaattattttcataattcagaatgaatgttttacaaaaaaaattaatttagggtaaaaatcctttctattttaaatcaaaataaactcaaaacattagatatttctaaaatgtttttaaataatataagagagcttagttatttaaaaaaggaaaaaaaaatgaaaatgcattgcatgaaccaaatcaagattttttagccccacgtgtatacattgtaatttatacaatggaatagttatctcatctcaatttttattttcccataaaatttataaaaaaataaatcagataaatattaatgtctctctctactctatacatataaaaaaattaataataaaaaaaaatctcaaccaaaatgaagcaatgaattagtgaatcaaggcagcctggaaagggactccagtgctcttgatccacttatctgcatctaaaaatgggccaggtgtgaattgcgcagcttcattcttagttatcacatggaagcccttccatttaactctttggtctgtcttggcacctggtccagtattcccgtattcagcgtagtataatgtgtctagcccaaatgtcccttcccaagctgaccatccagcaggagcaatagcgtcactaatggtgctctcaataactacagtcctcgagaactctctccatggcctgcccaagtaggattttatggttaacttatcaggaatcaacttctcctctggaacaatactacagttgtggagcacgatgccagaaggttgatgttgctctttcctcccttgagctgtgacagcattagcttgaccatccaagggtcgtctcaatatgagttgcgagttttggataacacaagggctatctccaaaaatgaaatcaactgttcctgaaatgacacactggctgtagaattggcgaccagagagcacatacaatgtgtcttggtagccatccatttggcagttatggaacaatgccatctctcccattactctaagtgccactgcttggtgtccctctggtcctgccgtgttctcaaatcccatgtccttacaaatgaatcctgatgcttccacagctgtaaggaatatgcatgtaagaatgataatttaagaaaattgttaacttggatgtcactttaagtggtgttacatttaaagtataaaacgtcaatgtttttttttttttatttgaacaatcaagcttcattgcttcagatattaaaatttatgcatatcaatatatcatattattacttaccaaaggaggctgatcgtaaggtagttgaccctttggcaaaacttttgctcccagtgacaacggtggcttttggaccatctccatacatgaacacgttaggcatgctcttatccactgtgatgtactcgtcatacactccagccttgacgtgaatgatatattttcctgtgagaccagatttagggtaggcagccaaagcagcagctattgtcttaaattgaccgctaccatcctttgccacaacagcttgaggtacgattttctcggtgcttgcttgtaaaagcttcctatctgaagcagaaacccaggttggaaaaccatcattattggacaaaagacgacgactgttaaggggtttcacatcgattttcaagccaaaggcatcaagaatatcagacagcccagaaacaatggctaaggcgttgtcggtgagagcagatgcatttcgtaaagtgtctttcatgtgattttgaactttgggctctggtactccatcgatgcatgtctcagcataggtgatgacagagctcaaccaactcttaagctcggctgagcgttctttgagggtatgtgttgcactttcaccaaccatggagaatgaggcttgaagttgatcaacagcgaagctcaacaaatcgttacagtcctcaagggacatcttcaattttggattgttggtgctgttggcctcgaccaacaaagaactagtcaagttcaaggacttgctaacttggtccatggtggctaacatggcagccttgagataatccttgaactcagcgctggaattagtggcgacaggtttaaggctatccacgcaagagttcttgtagttggtagcagagcaaatcaattccaatgtctttgtttgcgaggagatgctattgccatcaccaacttcctcctttttttgattttgaacgtttactatggcgactacagctagggcaactcccactaccaatacaatagatagtgctgacacaactactttccccagtgccatgaaaataaatagaaaaacctatatataaatatatgtatctctctccgacctcttatcgaaagaaatcaaaaactcgtaaaaattattaaatttaccaagtacgtatatacgagatggtcggagagagaccagagagagagcaaaagataaaattagtgctaatgctagaaagagaggagggatatattcacccttcctctctttgtaaaggagtactttattaatttattactgtttgaatatatttgcttgcaaatgaatgttcttatatatatataaaaattgagttatcttaaaatagcaaggctatatataatataactgaattattccagatctgatttgactcttccaccaaataatattatatgtccttatatttttttggtaagccgatatttaagcaacttaattaagtcttgctttgaaatagtatgtctacatatatacaattaggattaatatgtattatagatacaaaaattaagaaggtaaacatttggataaacttacactggataacagggatggatatcattcaactttgtacctaaatttaggtgttgtcttgcctatttattattatttataattttaatttgagaatataaccccgagtctcataaatcataataataattgaacctatatattaatttattttattttttgatgtatatttattttataaatatataattaatattaatattattcataatattaacttctaattaattaattttattatctaattaccaaataaaaaataaaaataacaaaatatcatatataatatacatttataagtgtatatttatagagataataatgtgtacattacttggaagtctactaatacttttttgcatttgttttttttttttttcagttaaagaagttatgccttttttggctcctaattgactggttgtttttgattttctagtttaatgaagttttcttttatcaaaaaacaaaataataatatgtacgttacatatttctcttttcatttttattataataaacattacataatcattaaatataaaattattaaaagaaatgttgctatatatatatattaaggatgtacacgtaataatatatagatattataaatacgggttataaaatgaaaaaaacaacataaatttttcacacataatacaataaatatcataaatgagaattataaatagaaaaaatatcatctcttattattagctagatttattatttattgtatgattacaaattaaataaaaaaaattcatataaacttatgtaaaagaaacaaatatcaaataaaacaaacaatatataatgtagctatattaaaattatgaaattttctataaaaactcatataactaaatctaaaactaatttatcatatactacaaaatattttacttttagtcacaataaaacttatgactaaaagtaaaaaatttgtagctaattataaatcaacatttatttgtgactaaaatattcgtgggtaaaagtattagttataaaaattacaatttgttgtggctaaatatatttttagtcacaatacttgttgtgactaaaactaaattagtaataacttgtatgtaaattaaatactatgttttagtcacaagtaactttttattgngactaaaagtcacatttaatcatataaaatttatgttgtgactaaaaagttatttttagtattatttttttgtagtgataatacataattatttagtacttataaataaatatccatacataaatatatatttatatatatattgactttgatatgagactatgagaggtggggagaatccttgcaatataaaaacataagagcatagaataaaaaataagactcttaacaaaattgtggtatatatatatgttaagaaattaaagtaaaattagcaagatgtgatcaatatatatagataccttaaattaatatttttacggatcgatgattaattgtgataattaactctatttgtttgacactcttctcctttcatcataatgagttgcttgattcttttttctatcatcactatgttataaataatttgtccacctagataaaaaaaaaaaaataataaattttatgttaagtattttctactttatttaaaagttaaccattaaaaattaaaaaaaaatatattataagttattaagtgagattattattatgtatatctaaataatttggtagtgacagagtagttcaactatatgaggttgaaactgataggctttgagccctttacatgtttaatgccattgttaatttcaccaattgagttatgaataatcgttagaacatagattaatctcatggttcaattgtaaatcaaaatataaagaatttctatgagggataagtcgaaaagtctagccataaatgtttcccattgttttggtttgatttgaatattctacagttctgcctctctcaaccatgaatctattcaattacaataaagtaaaatcaacaatttaaatatccacttaccacaatcacagagttatcctaattgattcttcttccacctcttcaaaataatgcttaaacacctgcaaatgaaaagcaactattgttgttggacatcaaatgtgataagtgaaacatatagtttggtgattcaatgtgcttatatttcgacaaaaaaaaaaaagaaaaaaaaaatctggtatatatatatgtgctcttgaattctaacatataaagtctggtatatatatatatgtatgctcttgattcagtagatcggatgctatcatatatgaatacctatgaaacaaaaagggtgggtgggtagagatggaaattgggcggttaatgtacgggaaacgcaatccccgcccccatcctcgctgcctatttatacccccatccccgccccatccccgtctaataaccattggattcggggcaggggaatacccatcggttatagggaacccatcgggtatccattaaggtaaaatgaaaaaaaaaataatttaaaataattgaaaaaaataaatcaaaccaatattctcacaaatattttttatgcattcataattcatagaagataaaagataaacctacttaaaaaaagcataacctagtagaaaataaaaactaaatatgtcttaaagtttgaaaaaaaaaacaaaaaaatcataaccaaagtataggaacatagtctcatacctctcaagcttcccaacaaattaaaaagtaaacaaagatgaaattaagaatcgagaagaaaacatatttacacatgtaatccacaatgatcatcagttcactatcgtc

SEQ ID NO: 15031 - DNA, 10149 bp, Cannabis sativa
attctgtaaacagtgatatttaattatagcattgaaatttatataagctaatcattgaactgaaaaccataaaagggggacccacatctatagatctacaaaattaggcccattaacaaatgagatgcagctgtattcgaattctaggaatctagagctggtttgaagtgcataatctctaacccctttgataaagccaaatcatatctattttttttttattattattactaaatgagaaatgaaactaaaaccaaccagcaaagataacttcaacacagaagcatagacatcaaagagagcaacatattcaacgaacatcgaaggatcctagaacacaaaattccacatagaccatggtatttacaagaagacaaacgtaagctcaaaacatttattaattgagtaccgtgcacatttgtctagttgccacagggtggtggtgataaaaggaaaaaaaaatgtgaacgtaatttgatataaaaaaattgtatacttaaaaatgtaacaaaggcctagaaaaaattgcaaacaaaaaacatcagatgagtgtgagtatgagaatgagcagaaattggaaaaaaaagaaaaagacaatacctgcaacttgtatctctacaatggtaagcagacccgccaaatatgtgaaaaggaacagagaagaactcattgtaaatcaaaccacagtatattgaaaatagcgacatcaacagaagtacatatcgtccaccaaacagcatctccataaagctcccaagtttctgagataagatatgtgtgaagattacatgaagaagataaattctaataaaagcattttatccaacagaagtaatcaacatctttactgaaagttattatatccattcccaagcatgtggacctgtaatttttcttaggtgaaaacagctgaccatcacctttaagtcgttttcttcctctctcaaatcaacattcctttcaaatgaaagctaatagggaagatgttatattcaatttctattactcgaataaaatcttaattttattcttgctcctactgaagtataaattattaaagatgttttgatacatcctctaggtttctagcatgtcatctttaaagtaagaagttcctgaataaaagaacttaggagatgcaactcagaaaataaatgttgcacccacttcaaagaccaaaatgcaactgatgcctgcattattatgtttcttggatgattggatcacactttttgaggctctccttgtgtatagcaagtccagaatgggaaagaaaatataatagtactataaatggtaatcgaagttcagtgccagccaagaggttctatgattctcatagctggtataataggtcagatttttcgagagcttataagccctcttctttcttttacactatgtttcgtagaagggagaagtaggcggatggagagttgagtagggatagaggtgggaggagatgacaaatcccttcgttcgacaagagagcttgaaggagagaaaggagatatgagaggatagcaaatccactcaaacctcacatttagaatccttaggggaggattggcactctcacacttcaattattgtaaattactaatatacccacctaaaatattattaaaaaataatcataaggatactaatgtaatttcataaataatcatccaaccttctactactctatccctcataccaaacaagttagaaggttattacttttctttctttcccttatattcttcgtcctacatcaagtattcatcctccctattcttccatcctaccaaacatagccttaatattttctcagccagcacatatgaacatgtataagattaaacaacctgcagcttgtttgagaggttattattgtttgttctaagctgcatcgagagataatcgtttcaatgagaaaataattcactatcaagaacaggccctacgaaaaacatttttattcttttaacaatggtccagccactcggtaaaaaagaccgcacctgtgtactgagcgtactttcacgagctataagaactaatgctcccagcaacaagcatattccatgaccccaatccccaaacatcaccgcaaaaagaaatggaaatgtgataacagtgtatacagcaggatttgcttcttgatatttagcaacactgcacggaaaatgttttgtcagcctctgatcagcttaaaagattgatagaatcacaggctttacatctactcttttttctttcttaatgtaaaagttaaatgaaaggaaaagaagaaaagaacacttgacgataaagaattttttaatagctcaacataacttcgaacaattattgcttgagaaggagcacaatgcaggaaaaagaattatgagacggcaacaaaaggaacagatacataagggaaaatttgactgaggaagcaggaaaaaaaataacgagacttcatcatccacaatatttaccttctcattcaaaaaatttacttacaaactgccactaaaaataattgtgtataaaggtagccaatttatttcttgcaaagactattatcttctctaccgtacttgcaggacgtggttagtttgcttttcttactcacaaaaaatagtagaagcaataacaattacatctgcataagcattctagaatattatcaagattttgtaattgtaaatgatatgtcagaactaaactcacccataagcatcaacaatttcctgaaaagcatttgtgaacttgttggttctaaaatatgtaggaggtgattctatagcatccatcacgtgaaaaattgtgccgacttgcgacttgctatcaaatgttgcacgttgcagttcttcgctaatctacataagattacttaatttaatataatcttgccatcgtcatcaaaggttattatacacacacatatgtactgaagtaccaaataaagactggtataaaattaccttatcttgtgcgaagataggacaccatccctctccaacaagacatttttttgttacatcaaaatttagcatatttaatgtatcatagacagctttctctctccgtacctatggaaacaatgggatcaaaaaatgaatgtccttgtcttcatagtgcaaaatcacacccatgcagttcaaataggtcataccattttcatccattttgttatatggacacttaaggatgacagagcctcatttcgatgtcggatccctgcttctaatgttgcttccagttccacgaggcgggatgatacctacaggggattaaaaataaaaacttaattttaaactaggtattatgtggtcctgacacaatcataaatttaaaaagacaatgagagggatgtggtgaatagttggaggcttggaacatcaggttcaattaaaccacgtgaattatcaaaattttgcaatcctttaattaaaattgaagtgaattaaaagaaaaaacttcaaagtcaataaagtttcagaaaagaaaatgcaaactcacttctctagttatttgtgtctgcttagtaatatcttcaggcacaggataacaacttgctccaaatgcgtcacaaattttcaaaatctttgttcttgcctgctctcctgagaaaaacacaacgaataccattttctcgacctgcaaatattataagatacaagtaaagtgtctgtcagatggcaaaatactagtgccaataataataataatgcccagtgtacaaagttggacagcaatctgaaaagagacagctaaataaaagagggggaaattacattctgaagattaaataaaaaatgactaaatagatttggtcataaataccatgtcattggataaaggatccatgatatcttcatcagctggagcctggttgaaaagcatatttccccttgtagcacgaaacaacatcctctcaaaactaagccctttagacttgcaaacaatcccacagataaatctcaaaccagattggcctgaccgtccaggcctcacctcctataaaggaagcagagaaaattgaaatcatggcattcagttcaatcttcatccgaaacagaagcaaagaaaaatagggataatgtcttagtaaatgattacctgttcgagcaatgatgctgtttcaacatagctatcatttgaatagatgttctcatctagttctctttcctctggaactgtatgtgttttatttgatacaagaaagccacttgcctgatattaccacaaaaaggtccaaaataatagttactacactaaaaaataaaaaaggtgaaattcaaatctctcatacaaagaaaagacacaaaaaaaatgtataagagagctacagattggataaagaaaaaatcaagacatgaaaataaattttaaatacttgactactgaacaattctaatatagttgggaagcaaaagattatctgatttgtaagactgaaactaagaacttaccaaagatatccttgacataccacattaccccttggaaccagggctaaggtgggacctaaatggcttaacgcccctgaattttgtaaacataagagctgaccaatgtgacagaaggtaagcaacctaatgctattgctacaatcatctacaggtgaagttgagcaatcaggcatttgttttacaaaccaaaaaaaaggggttggaagcaaaataaaaatcaagcatagcatgtctctacagaaagtcactcattgttggagtgcagtgtttctggtcaaatttgaacaagggctctgatttcggatttccttaaatttttcattaaaaaaaaatcatcattatcccatcatgttctcagaatatgatctccaaaatttgtcttctgttgttctactgccctccttaaagcataagttcaaataaagattgagtactacttaatgcaaacataaagacaagttcaagtaccttttgcaataccatcttgaactccaagagctcattatatgattgttgaagtttatcactatttgagttaatttccatcagctcatgttcatgttcagcaagttgtacctgggattaagagaaaaaaaaagaatgtaacaaaatatgtataacatgatctattcagatattctttattttaatacaaatgtgagtgtatgaggggatagcagaataggcactcatcaaaaaaggaaagcagtgacatagtactgtacctctaattgctccaacccaatatctggtggtgtgacaggacgtgtggaaaatagaccggctttactgatttgctctttgaaaaagcgtagcttccttgacatttctgcacatcgctttacctgtgaaggagaaactcatagaaattcatcaatgtgctcactgctaacgaataatgaaatccccagtcaacgtataaagataaaagcaaccatagaagggtgagagcagtataatcataattggagagagccacgagagacgattgacatgaacaattagggaatacaaatggcacagcagggttaaaagtaaaagttatgtgttcatcttggccaataatttaacgtacaaagagaatgtagaattatgtcggaatgtcaggtaataatacgttagtctgttacaactgaaacaccaagctatattatgacataacacaagggcataactggataaaacgtgacaatgctccaacatatatactatactatggaactcaaatttaacagttggactgcaataacccgttagtagtcatcatcaaactcaaatagataccccctcttccctccccactctcccatcccctctcctacataaacacaaaaaaaaatttagagtatacctgattaacaaacgtcctttgaaaagggcttttatcactgtttaactgcaaaggaaaagaaaaattaactgtgagtacaaatgtgaagttcattaaataaatttatcgggaaaaaattatcacaagctaagtcgcatgcttatattagatatatatatatttatatatgtgtatatatgactatcaagctatacatatcaagcagtactgtctaaaatatgtaagagttatgttggtgtgggcgtgactcattaacgatctttttttatgaacaatgaatcccaagcttcataaaaatatgtgaaaattagttccccaagtcaatgtactagtctagttatgagatgtagtaatatagcttggataagatattgataaccttgaaacatgcataccaaacatccagatttggaaagaatcgtcaaccacttacagaaacttaaccataacagcaatacttaaattaaggtatcggaatattaccggcaaaacaaggaccaattcaacagcaaacagatatattatcctaatcttatcattatattaattatatatgtaaatgtgtacgtatataattccaaataaaatatgtcttaactaacaatttatcaaacagttacgagaactaaaacaaaaatctccaaattacaaataaattcaaattccaacataattacaaacacaacagctgacattgtttaacccattcaaaacaaactacaaatcttgtatgaataagatcacgccaagaatgcggagtcctcatttctcaatttttaaaatcaaatgccgaatctaacagtattccaagaaaaaaaagaaacagagtcggatctgatagagaaacttacgtctcggaattgtaaaaggccgagttcgccgagataagagatgacgcgatgagcagattcaaccggaataatgagttgaacgaaggtcatcttctcagagcgcatcagatccatgggcggaagattctcaatgaaatcttccattttggagagaaccatagagaaaatgtttgattcgtttcggatcgaaaatctttgctcagatctgaaacccacacacacatacacatacactctctctctctatatagctttctctctctaaatttctcaatgcgtagaagaaggtatcacttgtcggtttattttatttttgaatttatttttatttttttccaaattttctgtttgacaactaccattagagaattcttattattctcatagttcgatgggaagatggaattgaataaaatatttaaaataattaaattttatataaaaaaaaaatataataataataaattaaaggggaagaaggctttaattttaaggttggtggagatttagcattaaattatagtatgttttaagaaagggaaattgttttttttttttttttcctttgtggggagtaaaacattaaagaaaattgtattagctaatagccatagtaaaatatgatgtaattatccttatccaaacaaagaaatataagattgaaaaaaacaaattggacaaatatatttaggtttcatattttgggtgtgaatgaaaagttagaaatataagagataaagagaatattgtggcataagtattaaaaaaatttattttgatgcacataagttttcgattttaaaaattacggtaatagttttcaagcttgagatttttatgtctttattttaatagatttattagttacttcccaaaatactagattttaatttaaattgcagcataagtctttcaatttcaaaaaattacggtaataaattttaagtattataatttgttttacttttagtcacaataaaaattgtgactaaaagtataaaagattgtgactaattataaatcattattcatatgttgtaactaaaaattatggggctaaaagtattaatcacaaaaattacaatttgttgtgaataaatatatttttagtcacgatatattttgtgactaaaactaaattagtgataatttgtatctaaataatatgttttagtcacaagtaactttttattgtgatacttgtgactaaaagtcacatctagtcacatctagtcacaaaaaaattatgttgtgactaaaagttgtcaataaagatagttttttttttgtagtgaagtttgagattatcgttagtctgaggtacccaatttaacaactctctttgtagttcttaaaattgtcacatgtaaacaatttattagtcacatcattacaattgtttaaataataaacaaatatttaaaaatcatttagataattaaataattattaagagctttaataattttttttatattcttttattaaaatttaaaaatattatacataaaaaaataacaaacttctacgatattccacccacccttctcggggtggagaccaatatcatcttttcaaattgccaccgacgacaagcattgcccttttagatcgtcgtcgacaagattttaccccaccatcaccttcctcacacgcgaggcttgcatcaacaactctgatctttgttgttaacctacagaaagaaagagaacttgagaaccaaaaagaagaaaaaaaaaatatgtagtcgggattgagattttttagagaaatgaagccttttgtttatttttttcttcttattttcccataaattaaccgagatatatggagagaatatgcggtagagaaagaaagatgtgggtagtggtgggtggtgagttttggtggtcgatacagtagatcagggttgggtaggttgagttgggagtgaagaagaagaatgaggaggaggaaaaaaatagttgattaattagttttttaaataatttatttatgagcaaatatcattttgagtcttatattgtataaagttatagattggactctctattttgttaaatactaattcagatcctgtttttttttttaaaggttaaataccattttagatcctgtattttgcaaaagttacagattggaccttctgttttgttaaatgacaaaattgaccatatattttccaaaatggtaaaaataagactcttagcttcatttttgataacttgtttttttaatataaccaacttgaagataattcctaataagaacatatatagaaaatataaacagttttgttataacacatttagatcagattattattaaattttattttgacaaaaaattagtttatagtcctataccattttggaaaatataaggtccattttgtcatttaataaaacagagagtccaattagtaacttttgcaaaacacacggtccaaaataatatttactctttttaaaattgtataaaatagatcctgaactttcgtcaatttttattgtaacaatttaaaaccagtttttagtatgaatatatgcaaaaaaatatattcttgtcataacacattcaagtctaagtaattattaaattttaatttgataaacattaaggtcaaagtctattttgtaccattttgaaaaatagaatgttcaatcagtaacttttgcaaaatacatggtccaaaattatatttaccttttatttatttatttatttttaattaaaattatgatttagacaaataatattttaacacataacatttttaaaataaattaacgaatcaattaagttagggactaacagactaacgaaaatggtgaccttaaggactattatcgcaaatttttgaggttgaagataaatctgcatcaactctaagttttttgagacttttgccgcaattatccctagatatatataatgagtttctatagagggacttttttttttttcctttttggccttcgagagaattttttttatattttggtataaaaattataattaatttatttatataataatatgtatattgtaagtatttaagatattttactaaattttttaaaaaaattataataatttatagtgtcaaaaatacgtttccaaataaactgaattcatgtttgtacatgaaagacccaagttgttatggttatcaagtttaattatcaattatgattttacttgttgattcaattggattatagtatttaaatgtaaagatataaagttaaagtaatataaacacagtcgaatttactgaaaataaattctagttgaatattgtttgggcaaacaaaagtaacttaattataatttgcaagtttacaacaatcagatcgtacaaattgcaaatttccttacaataagcaattaccccgtggctagtgggggtaaaaaaggatgccctacactaaaaaaaatcaaataaaaatatttataaattaattttatacttggaacgttgattgtgatctcattcatg

SEQ ID NO: 15032 - DNA, 4224 bp, Cannabis sativa
attggttacatagtgtaaattttgatcgattgctataccaaacatggttattttgctaataaaatttttcataatgacttattaattacaaaacactcatcataatacgaccataaatttacactgtgcagttgtaaatttaatgtctttattttgcaaatcttacaatttcaagttgttagtttggttaattttcctccacacacttttttcacttaacctttgtatttgtcatgattggttctatgtatttttgcataaaactttctgcttgttaggtacaatagttaatcattttagttatggtgtaggttaggggcacctgctttttcttcttaaaaaagctttagttttttgttatcttccattcgtggcaagaatcagatgatctgccctgcccccatgaaatctgtgagcataaatctttatatccatttctcaatctaaaaagccaggtcaaacttgttctcttatgacatggattgggcaacttttgacataagagtaggccttgatctcatcattctttactaacatttcctggaaagttcacctccatttttcttgtttaagaaacccaacaacaacatcttctttaagaaggtattggatttgagaaaaaaagtgtcttgtcatcaaggatttgataacacctcattatgaggccaaagggccaaacattcaaaatcttgtcttttaagctggggcctatatgtgactctaccaaatatttagtggggaatatatgactaaggaaaaagcatttctttgtagataatgtcctttactcattttttttttctcaatatccccacaaatgagaaagtgacatctaaaattatatgaggctccctcaagtgggatggagctaatccacacatctacttatacacttaaagatttcattagttttcccacttctgatatcagtcctctctaaaaaaacacagctcaaaatgaaagtttcaaactttgggaagataagtagtaccaactctagttctgcagtaactctagttggtcatcaaagaagaccatcttatggctgctcttgctacaatgcaccatatctactgaggcaactgatttggaggttaaagtcacactggagacgaactttgggatcccgaagaagcggtgttcggtacagctatgatattcggagctattctcttaactttgatgatggttttctatgatgagttttgcccccccattttcttcttttctaatgtgaagttcttgaaataagaaacagatcattattttgttatgatatttgtttcacataacccattttgaggggtataaatatggtactcttgtaaatattatatttgtgaatgaatcacttatatatgtcatgaaacaatattttcagtccaaaaatgtaatatttcatcattggtaactatgacaatgcaaaagcaagaatgtttttgatcaaataaaaagcagatttcttgagaatcttagtaaaaagaaagaaagttaaaaaggaaaaggggtaaaaagatttgaacttgttttatctcatctgctattttggttttaggttccttaaatcatggtatgaatgaatgaactgtaaagcaaagaatacttttttacttgtttttttttcttcttcttcttcttcatcacattttattgtcaaaagataaatgaatgacccacaattggccagttgggcatctttgtttgggtctctctttatgggattctcaaccaatattattggcatattccatttgttttccaagcaaagaccaaaatagtcatcatatagtagtagtgtactagtggggctcatattaataatatcatttaacacatgacattcttaggtaaagtaaagagaggagggtgtcaatcaatttaagcttaaaagtgtctctattaacctaaaacctaacacattttgtcaaataaaaacttacttcatgcatatgaacacatattaatgagtcatagaagaagaaaaaaagaaaagtaacatactacaagtttgaaaattaaaaattgtttacaacttcaaaggggacaatcttcatagttgtaaaacacaataaatacatgagcaaatactcatggtatgtgtagcataaaatatgtactaaaacgctaaacttgtactgccatgttactgagtgtagtgttttagtggatattttgtgtgcacatatcattgctctaaatatatcgtaaaaaattgtcattgtaataaatgtattctatagtccatttgtgttacctacattatgtactacccactaactttattgattattaccatgtgaaatccaagaccccacatataatcatacaccccatactcatactctattattccctttaaccactcttattaaacccatcaaatctctattcatttccacctccattcccatagctccaaaccatggaaaaactcatacttttctcactcataatctcaaacatcttcataggcttaacacttgcatcatcaaatcattggagcattttgagcccaaaattcaaaaatggactcatcaatgacagcttaaaaaggtattgtgagagttggaggatcaatgttgaggtgaaaaacattatgggatttgaagttgttccacaagaatgtgtagaatacattcaacaatacatgacatcttctcaatacaaggctgattctgaaatggccttagaagaggtcaaactttacttaagtggctcttgtactactttggaaaatgatggtaaagatgcttggatttttgatgttgatgatactatgatttccactattccttactataaaaggcatggttttgggtaagtcaatattcaaattatgcttgttcctttcaacccttttttgttgtttagatcaaattagattgttcattcttattagactatattagtagtcttttgtgtttggatataatggttcataactttgagatctacacttacactactttgtgtttggattttggttcattagaaaaatagagatcttagttgcactttgtttgataatgcagtgcttaagattttttgttttgggggatatttttataaataccaaaaaaacactaaaagtttacaaacatacggatctacaatttttttaatacttttataaatataggtaaaaaaacttagatattttatgtattttttttttttttggcaatatttaaactttgtaaactttttgtgtttagcaattaagtttctattgtttatttttacacaaaattttcagctttaattttttttcttttttgatgctgaaaatatttagaaaatgttaaattatgcacaaaacttaaaattttgttacaataatgaactaaagaacttaattgttactgttttttaaaactcaagggtattatgcaagagatctttatgagaagtatatattttatgcttttatcccaattaagtaacaagttactctttttatttttttggaactaagaggggagaaacgtaatacaacctctttggaaacatggatgaaaaagagaaaagcaccagctcttaaacacacactcaacatttttcatgacatcaaagataaagggcttaagatctttttgatctcctcaagaagcgaaagtcttcgatctcacaccgttgataatctcgtcagtgttggataccacggatggactaaactctcgttaaggtacatatacaaactcttacatacttacctgaaagggtttctgcgtaaaatttatgtgttcaaaatttatgtcattttaggggtttggaagatgaacaacttgatgcgaaagagtacaaatcgaagactagacaacgattggttgatgaagggtatcgcatatggggcatcgttggtgatcagtggagtagcctcgaaggttatccaagtgcaaaaagaaccttcaaactccccaactccatttattatttgtcttaaaagctttaacaactctcttgtttgtgttactatcacaagattgttgccccccacttttgtcttgtgaaaagaaaatttgccttttggctttggttttggttgtgttctctaaatgaaatccactctaatatgttgtcactttcttaagaaataccatatgattatgcaccaactcaaaggaattttattagaaataaagtcctacacatatggaaagcactaattggttttgagttttgatactattccttaaaaaatgtctttccttttttttttttttt

SEQ ID NO: 15033 - DNA, 4581 bp, Cannabis sativa
ttatgtgtttattttcattatttttcatattaggatgttaaaaacatacttgttggtaaatctagatcctggtaaaaaaatattccaacactaggagctcaggttcctctcggagccatacaagcaactccgacagtagtcttgctggcacctgatcctagacaacctattagacaactcggttttcctcctaggacaaacaagcatatagccatgatatatggaggtccctatatcagaggaacaactcgaggagagcaaaaacggtatgtccaagacttggatcacgatgatgaggtgtaggaattaaatcatttgcctatctgaagacccagactcatggaccaagccatgactttcacaaaagaggatgcaagatctgtacactttcctcaccacatcccttagtcatatagactccaattgtcaacaaaatagtagctcacattattgtagataatggaagttcagtcaacattttgttcaaggttgcattcttggaaattcatcttactgaccaagacctggccccatgtagttcccaactcactgtttcaacggggatactttcatctccataggaaaagtgtgtctcccaatcacattctatcgtaatacttctcagagaacctttaagcattgtaattttgtggtcattgactatctgatagcatacaacactacatttggttgtttgacactagtagacttcagagccataacttccattcgacacttgtgctaaaattaccatcccactatgttagggtaggaatagtcagaggagatcaaaaagaaggcagaaggtgctatgatgtagcttcccaacaaccagtcctcatggtctgggaagtaggaggcgtgaacaagcaacatggagaagatgtcttagacccctatgtgggtgtcgagaagatcttgaaatcaatggaagatgtggaagaagtccaagttttcatcaaatgaaattaacccaaatgaaatttaccacatcttaaatgtgaacccagatgtaccgaccgtgcaacagaaaatgaggctcttagacccaataaaggcagaagttctgaagaaagaggtaaaaaaaaattcttgtctaacatatttattagggatgtgtactatcccaagtggctagccaatccggtcatagtgcctaaacctaacagaacctacaggttttgtgttgacttcaccgacctaaacaaggaatgcccaaaagattgtttcccactgctcagaatagaccaaatggttgatgccacatccgagtatgagcttttgtcctttatcgatgcttaatccgaacacaaccagatcaaaatgcatgtcgtggattaagagcacacaagcttccagattgacaagggagtgtattgctacttattgatgacttttggtctaaagaatgatgaggccacttatcagagattcgtgaattgtatgttctaggaccagttagggagaaacatgaaaatgtatgttaatgatatgttggtcaaatcaaaaacctctaggagtcactcaaatgatttataggaatattttgcagtaatacacaagtacgggatgaaattgaacctaaaaaagtgtacttttggggtagggtcaggaaagtttatgagatttatcgtcagccaatgaagaatagaagctaatccaataaagatccatgccctattggatacgccttctccctcaaagcataaggatgtgcaaatgtggtttcttttcaggtctatggacaaatgtatcccattcttttacattaaaatgttatacataattttttaaaaatatatataaatatgtataaattagattagaccggttactttcacatgtcaatcaatttctaatcagcacaagtgcagattttaaatttttttaattcaatctaatctgccgaaatgcgtatatccccactttacagattggtttagaacacccctaattgtaagatgaatagaagagaacaaatgtatatactagttgttagttgacatataatatatattactaaggaaataggtccgagattcaggtcgagcccagggtcgaaattcgggtttaagtggggtccaaagtcgagatcaaagtttaaaatattgaggaaagaaatacaaagactacaattaaaaaaaaaaaaggtaaacactattttagaccctttattttgtaaaagttaaccctctatttatgacaaaatggatcctatatttttcaaaatagtaaaaataagaccttgagctcaatttttaacatttttttttaatataaccaagttaaatacaattcttaacacgaatagatacaaaaaatataaccaattttattataacatctctaaatcgaattcttattaagttttatttcaataaaaaattagttcaaaatcttatttgtaccatttgaaaaaaaaatacaaaatccatttatcatataacaaacaaaaaattcaattagtaacttttacaaaacacaacctatttatttatttatttatttttgaaattgacttgtttttattttcaaattttgataaaaattagaaagtgaaaacaatttatttttatctagttttctaaattctaattaaaaaagtataacacaacacaccctaaattaaccaaaactaatataacagaatcttaccaataacaattagttgaaacttgttgtaccctactttctccactttacacatttaagttttatcaaaatacaaaacactatcttatgtcagaaacaataatctaagttagtcggcacatccatgaatcagcttcacagccatatagtttctgcccctttctctttcttttctatgttttaataaagataaattgatcaaagcttctagaaactagcattttctaatctccacaaacattctttcctcagaggtgaatccgcaaatatggctttgataaagtcttgaacctaaaaacaaacagaatgaaataatataagcgaaaaagccaatggaattaaagtattaaaaccaaataataagaaaatttcaacagaaaaataaattacaaaatattgtatgtaagaaaattatgtgcttagatccgtatagccatacctctttgattgtaaaaccactgctcagcaaatctccactttcccaagctgctgtaatggattttagaggcatgtctaataattctgtacagaagcgaaaacaaacattaggttatcataacatgaattttttcttttttttttatatagggaaactctagagaaaagcatgcctgctaatctacgcatcttgcataatgatggaatgagatcatcaagtgtctgtgtcatgcactcttgtaaattctctgtttggttgatagcggccaaggacgccaatagagaagatagattttccagcatcaaatgaattaatctttgaagctatgaacagagtatcagaagaaattagatagaatgaaatatagacattatttcaagccaaaaaaataaataaataaaattgcaagtataatgatagttttttataaaactatacctgtaatgtttcctctgctgccatgtcatcgataagtagtatgtctcttgtaattctagaaaataccgactctagaaccatagacatgcttctcctgtatgtcgaaggcatcaagagtggttcccatataatatgcactttctcaagaatgaaaataacctggtcaaacatattatatccacattaacaccatcagcaaaaactcactgaggagagattcagcaaaaaaagaaaaaaaaaactcagtgaggaaaagaacgagaatgccaatgcaagaataatcaaatgataaataaatatctataaaatttaaggtggtcacgctacctgatcgatgctaaattttgaagattcatatgcgtgattcaaatgggtgttctgaaatccatcagcactgtctatagcctaaaataaatacagtaaatcattcagtggcctatcacagaagatgtcaaaacagacaacctgatcggttatacaacttttattagtacatttcaatatgacttcacctctttcaaattataaataactaattgaatttgtctctgcagtatctgctctgccattacatgaaatcttggagataaatcaacaaacacggcatgttccttgattgaacatgggaaatctgggcgatactggcaaaataaaataaaaaaaaaaagaaacacataaattggattcaataaatttatttaagattgcatccacaaatctagacaggtcaaaaaattgaactccataaaaatagttaaccgtgaatccaacattatattagcatctgttgcgcagcttcattaaatagttacatacaataaataagagtgcatggatgaatgagcaaggtgaaagactccaagatcatacactgtcaaacatgaaagtaaatacctcatatgcaagcccaagaatctcctgtgatagatataggcaatcattatgcatgagaacagctacctggttgatgccatcaagctgtctttctagcttcagaagtcaaacaagaaggttacactataaccattattcaatatgctaaactgtagttg

SEQ ID NO: 15034 - DNA, 4031 bp, Cannabis sativa
  modified_base (1751)..(1771): a, c, t, g, unknown or other
ttggaaacacaaacttggtcattaaaatttaatttactaaacatgagttacgtttaacattcacatcaagtttaacccttgtaccaaataccccaaaagagttacatacacacataatttacacacacccatgtcgcgagttagttttgattagtgggatctatctttaataaagatgttcggttgaaattacttgtcacataagtgtgtgtcaaatttgtgtgtgaattatgtgtatacatatcgttactttttggtttcatactgtggcgatggttgagcaatataagctcgagttccctcttctttggtgactgtctttggcgagcatagttgtcacgaaagacaatgtgttatctttctcgtctatgctccctaagttggggcccatgagaagcttggttttctcgcaagttctcgcctttcctttcttggagcttgatattgtgtatgaaagccatgagaagcaacccttcttgtcattggtgtgtgcctcttcttgcctttgcaagtcacgagaggcatctcttcttggctccacgccatcagcccgtctgtcacaagcaagatggtctcttgaggaggtttgacgaggttcttgaaatagctcttggcttcgcccttgagttggttgtacattctttcctcgagacccacttctttgctcttgatcccgaagtgatggaacattgctcttgataggtgatgggtgtgaaagcactaaatgataagggtgtttgtgttgcgagtggtacaaatattgactaattttttggactgcaccacacttgcaggctgcaccacatagagctcaaaactgcataaattgcaccacaaaaaaagtgtggtacagtgtgatgtgggcagtttgcaataatcactaactaatttaataattaaacactacaataaaaatgcacaaaattctgaaaatgtttgaacaaaacaataaaaatatatatatataaagctatcatacaaaatacataaatgagctcaataattaatgtagtataaactaagatatacactatatattttttaaaacatgctattttttgtcatccatcaatataaatgtatataattgataaatataagcttaaataaactaacacttctaattagataaaacaaaaccaataattaaatctcatttatgaaacctaaatcgcaactgtacattgcgtaatttcaaaccacaaccgcacagcagatcctaaaaccacactgcatgtatagtagtatagtgcagacgagatatgtatgatgtgagtagtttaatgaacaccactatcaaattaatacattaaagagaagagggtaaaatgataatttattgtataacataactacaaaatagtagtgattcagtgaacaataaaaatggtatttgcatttaaaccttttcttcaattataaaaacaaaaataaacaaataaataatggcaaccaaccaaccaccccaaaaaaataaatataaatacaaaaaaagtcaatagtttttatggtgttgttggcaaacaaaatctacaacaacagagctctgaatcttcccttacattaatgactctttgcttcttattatatctaacagcttacctggaaaatcttctttcttcttctcttctcccaaagcccccaaacacttctctaacacagaaaaaaataataataattaaaaaaaaaataatagaaaaaagtgaattttggtatctgtgcttcttcattgcaataataataataataannnnnnnnnnnnnnnnnnnnntaataataataataataatcaactttcgctttctctgatttttttattttttttattttcgggtaagcatttaatgccatggccaaacctccaaaatccattaaattggcaaagacagagctttaaagcttcttcttctctcttactgtgactcacagacagagctttttcaaaccccattaataaaagcggtccgacctcattactactcataatcttggggttttcaaatctcccaccctcaccgcccggtatgcttacggtaacctctttactttatacattcaccaatcatcttcttccacgtgtcccgactaatttttgctttatttaattttgttatctgcggttgaatctctccggtgataaaagtgcctcgggatcaccgcaccggagccggctagacgagtgtaacgacgacgaagatggtctcatgaacatcggactcgtcattgattttgttcttcgtgatgatcctcctcctcctcctccattggagaatcttgagcttgattctgataaaccgaaaaagcctctgtttcgacggaagaaaggtgatttcattcctctgtagtaacggaatgagaaaaccctaggtttgcttaaggaaccgaatggcgatggtcttttgctccagaagttgtttcctcgtctgtatctccacggcgatgctgtagcgggctctgttaccatcattcgttccgatgctccactccgctcgaatccgaacgagtacgatcttttcagtatgaaatctctgttgttgatgattcggtgatcttcggaatgattagcgttgaagttgtaactatttctcctcggcgattgttcctcgatgcaaggcgtgatttccgttactgtagacgatgcatattccggtgctagtgtttcgttaagcggctcgagtgcgatgctcctaaaaatggcgtcgtcaagactcggtctgatcctagccgccatgagcggaataaacggcgattccggacgaaatatcacggcgcgacatagaggacagttagcgtgggaacgaagccacatatcaatacaatccacatgaaaagcgtgggaacaaacaggaagagtacggacgtaatcgtcttcttcaaattcgattaaacaaacagcgcaatcgcgatgaggtccgccgcctttgttgaccaccgtataaatagaaagaggaatagtcttgattatcgaatcatcgagtccataaggtgagaaaacatgaaaaccatcactggtttcaaacggcgatgaatcgtacggcaacgagtctaaatcgccagccgaggaaggaagatacgatcgtctactactacgtcgacggcgtcttctccaacgacgcaaaaccctgagaacaggagggatgacgtggcgggagaataatcgagagtaggtgacgaccaagaaagcagtggctacaacaactaccatggctatcaatggcggactaaaatcaacaggtaaccttgtcggtggcggagaagattggtctacttgggttgttgttgttgttattgggtttgtagtgggcccaacaattggttgagttgggcttggagtaggcgatggtgttgggctgggtgatgaggcccacgaattgaggttggtgaagggagacggagcaggagatagtaaagccatggatggattcatggttgagtttgaatattgtaaagtaaaaagaaaaggatagtggtgaagagtgaggagaaggagtggagtcatgttttaatggaaaccaaaatatgtttttttttttaatttatttttaatttaattttgactgggtttttgacacgtcaacgtttctgaatttaatgtcgtctgctactattgtttatcagcacagcagctactctagtctactatttctctttctgacttagtgagtgcttcttatatttgaagaagaaataagaaagaaaggagttgctttttggagttaataataataataatatcagaagagaagaaaaagtactaataatattttgctttgtttgatttctctctctctctctctctcttgtctttttagagagaaaagagagaatatggtagatagtgagaatgaaggagatctctgaattggatctagtaataatattgggcatttgtattttgaggctaggatgaaaattggttgggtaataatgggataagttgaaaatatctatttataggggaattactttatatattattttttttttaatttacagtttgagtttctaaagtggttgcagctctaattgca

SEQ ID NO: 15035 - DNA, 14030 bp, Cannabis sativa
atggcttaactcttgaagagacaaatacaacttggagaaaactagctatagataccttctcctacaaaggtttagagaaataaaatataagcttttgtctacataggattgagaaatacgagagagatagtgaggttgagagctactttggctttttgagtgagtaaaatctgttttattaaggatcattacttctaattgcatgttttctttctttagtgtgtttgtatgtatatataacttagatttgtatcttacgataaaaacacattaatttaaaaatggcctgtttcacaatattgtttccaatatgagtattttaaaggactgaattagacaatttgcttctgccatagatgaaccaattacaatatgccaaatgctgcaaaattaggttcgaaggttgttcacttttttgcttgaaattcagaagaaaaaaagggttgtatgagaagatattagagagaagaaatattagaatattaatttattacattgagaaagatgtttttgattgatgatttgtggaagagtaatttctatctaacccttttttttttcttgttgtcttcaattgtagaaacacattccttttaatgtatcattattagcatgaagccaatttcatagcaaggaattcatgttctgtccttgaattcaaaaacaaaagtggccactttaaagttattcttcacaagatctatcgataatactttaaatttctgcatttattttggatagttaatcacaagaatttcaggaatataaaaataaatgcagaggtgcataatatgattagatgtatcaattaatgaaaaaagaaaaaaaaaaatatttacatcatttgatcaaatcgtattctgttccaaaaccatgaagtgcaattcacaatattaatatatgtagattaagcagcaatgctaccagaaactgaatgaagaaaattaatgaactaacaatactaagtaaaatctcaaaccatttacatgaagaagaagaaaaaaagtgtactggagctataagccaaattaaatcaaaagtaaagtaaccccattttttcaaatgttagccacaccctacagctagctattaacatatacaagtttctttatagggctacacttagattgcaccttatctggaccatgatacttggttaatctcatccctggccgacttgtacaactcaagccgctttgcgcattccaccctcctttccattaattccgaatcttcatccaacagtcgagcaagttcgttaccctataaaagtacacaagaataaccaaatgagacccgaagaataaacaatctaccagtattaccccataaacatctattttatacctcttttctgcccagttgggcgtaaaagtgatcaagtagagaccgcttagcctctctgacttggcagtgaacaacagcctttggaatagaattcctcagtgtctctgaaaccatcccaatataggaggaaacattggatccaatcctgcggaagtgcccctctgaatatcggtctccagaagaagacgaagcaacttggtttcccacattccctacttcctgttcctgaggaagtctacggaagaattctacagttaggtatgatgattccatgtccaccaatcgtaaagttgtcttcttgctatcctcacgaaacctctccagtgcttcatttgccgccgttgataatgcagtttgaagagttggaaaccgtttcagctcctgctccattaacagaaaggtcagtctatatcacaactgctatgaagtattaaatgaatttaatgtaaataaattatgaaccttagtttctccaattgacatcctcacaagttcctttaaaacaaagtgaacctgcaatgccaaaatactgattaacaatataagaatttaaagctgcaaagacatgtaaaatgccagagtatgttaaactgatagacgttgatcataatcattaatcaagtctagccctcagaaatcacccagaaaaaagaagagcagtacttacagcatctacagagcatttggctgggtctcggaaataattaagtgcactatcaataaggcgcctataaccttgctcgggtgcaactagatgaggttggtagccatctgcctcagaaaccactttccttacattttgaaaagaaagatgacgttcgaaagggagcttcctcaaagcagaagggagctggtggtcaaatacagcataaatgcgatccccaccaggtcgtctgagacaaaagagaatgtataagatactgccatatacaaatgaaacaagattgaataagaatctaaaatctactaaacaaagatctgcatgaaatcatgatcacattataagacagattataatatgaactaacagctgcaggtcatgggacaagctgctagttagtgtgtgaaatttaggtaaatatataacattttgaagttccagaacaaaaaaccaaaaggtgagaaaatattaccctccatccaaatgctccttaaatacccgatcaaatgcacgacatagctctaggatagtatataactgtgcctaatcaacataagcaatacaatttcacacaattaagataattatctaaaactggaattcctataagaagtaatcaaatagctaactgagagttcctcaccccagcatctacagcaacaggccgaccaagatagtccatctctctttcaatttcatcaatgcttttgttaatcaaagacaaaattcctgggaggcgagctttaattgcagattctaaatgctgaaaccatatgacattaataagactactatatatatgacactagggaccctgctagattttaaataatgtaaaaagattataacaaataaaacaagtagaacctttgagagaagtttcgcaagatatacagatcccattttgtttgccaagtgcccgtaatcatgactactagcaaaaaagtcacgctccctaatccgagcagaaatcatatccacatttttgtttatatcagattgtgaacggttcactataccaacccaagggtgttggagacgataggatttcccttcgagaacctagcaaatacaataaaaagttgtcgtaaataatgtgttcccatatatagcacacatgaaaagcccagttattatctttaagcgttgaaattacgttgcttgttcaatgcatatttgcttcaaaatgaaataccaagttttggatcacacattggccccattgcaagtaagcagtctatatcctaaattttgaacttccaaagattgtactaggaaaaagaaaaacaaaagaaaatttcttacatccaaggcatttgttcctttatccatcaagtcaagctttgtcaacacaccaaatgtcctgtcaccttgataagaaataagtccagagtaagaaaaacaggaaactatgttcatgtcttcctccatataaaggtggtacagtttaatcataataaagtaggaaattaggaatatgtgtagaaagatacctgtggggtcaacttctctagcaagcttgatagcatcagatgttgctatatcctgattagctggagttatggccagaatgatacaatttggctgcaatcaaggatcaaaaaaatcattcataaaacataaggcaaatatgtgaacataaataatggacattccataaaaatacatattgcaatgggaagatacacttgattttacaatagtaattcactagattaaatgaatatacttgattttacttcagtagttcagtatatttgcatattaagaatacaatttacttaagatcaagacatttcagtccagctcactaagatagaagatcagcaaaacaacatgcttagcagcaatggcggaacttgaaccaaatcaaggaggggccaaataatatttttgaagaataaaggaatatggacccctccatctaatgagttccgccaaagcttagcagcatcaacttaactcaacaagagtaaaagatttcctcaaaaaaaataccttctcgacataggatcgaaccatgttttcaatgtctttaacaatactctctggttgtccttctgttaaaaacaaacatttcttgcttagtattttgcaaaggaaatgaacataaagtgtacatccaattaacaccagtgaaaacaaaaacaaaaaaagcaacagtgaagccaatatacctacagcaaccttcgttaaaccaggcaaatctatcaaagtcaaattgacaactgccaaaagataaacatggactgtcagatgatagaaacattaagaccaactcacacgtcaagaaaaatgaaaatgtaacttttcatcctaagaagatgtggcattgaatcatttcccacatataactatataacacatagaaataaaatgcaataacaaataagatacttggcacagaagcaagatccagtttgcttaccatttggagagaaaatactgagttgaatggggactggagaaatctgttttgaccgcccagtcattttgtcagtttcatcctgaatttccttccgaaccatggctgtgcaagagtgcaaaataacgaaattgcattttattaaaaaaaatgtaagacagattatttagaagttttgcaaactcagcttatttatactaagaccacacaaaccaatcaacaaaatgcaagaacaataagaaaacaagatttatttgttgaatgtattcaaggtgagctgcccacatccaaaacatctgtctttataaatacactacacagtctaaaactctcacaacagtaatcaagatcatctcaaataaaaatccaatcacctaagagcaatcccaattgaaacaactctttgccccacccacacaaatttctcacatccctttaaaactttagagagaatttccaaagtgagtattataatttaaccatagttacaaatcatatgccacaacacagccaagagaaataaaagagcataccaaaatcaatgaatcttttattttgcaaatgaaggaactctgcatactcttgtacaccttgttctgttttgtgcaactgcaaaactaacggtctcctagtgacaattcctgtaaaaccttttattataagaactcatgtaaagaaaaaaataaataaattaaacttctcttatacagttgcatgaaaaataagatattgtaaattattaatataaaattcatgcaagcccaattgtgcaagctaaaatcttctaaagcttttcccatctctttttctcttttccttgtattttcccagaaaccaagcataatcatttcttcccatcttttctcttgaatatatttcttaaaccaaatgattataaaatagcatttgggacccctcacccaaaaagaagtgttcatgcttttctttttttttaaaaaaaaataaaaaataaacaaatcggccccaataagatttgaaaaaagtagtttgaccctgctgactctcctcccttttaattcttctccaaacatgacattgacagacaaggataaacagttgactataaacttcaattgtttaatattgaaattccgaccaaataaataaattgcagataactcgaaatagattagtataatataaatacatatatatacataaactattaacgtttatttaaaaatatttaaatacatatatagaaacaggaaacctgatcctctgggaagaaaatcacggccaacaatactctccaaaacggacgattttccagaacttctgcgcatgcaaaaaaaaaaaaacactcaaaacctcaaactcaataaaaagccaaaaagaaaaaagtaataaaagttttcttcaaacctggccgccaacgacggcaacagaaggaagagcttcccaaagagtaggcaaagtagaatcaccgccatgatcaccgagcatagtacaagccctctgaatacgattaacaagttcaatcaagctttccatagtcgcagtcattctgctttccacaatgccgccacgtggcaggcgagtgaagaggagcgagggtttttttccggtaggaacgaggttgaggaagaagatgaagaaggtgagtgtgatgatgatgagagagaccagaaaaagatataggaaagctattttgccgtttttaaaattaaattaattaattaattaattaatacagagtcggttagtttctggttacttgtttttgtttttgaaaatttgagtagttacttgttcatatatagagttgttaaaagagtgggtttgggagagaaaatgaatgctctcctctctcactctcacctcacttttcaataaaaaaaaattacaatggacctaccaatgcaaatgttttagaggaaattacactctatactctttttatattgtcctcttttatttttaccttaatctttaaagtctatcatttttactttttttttaaatattgtaccaattttgcctctgtcacttcaaaatactctccatgtgactctcttatgttagggtattttgggtacaatacatataaaaagaggtatgtttcaaatacatataaaattagaggtaaatttgattaattgattaataaaaggagtatttttcaacttaccctaatattttagcatttagtaaaatattttattgtaatttttttttagagaaatgctaaaaggtactagtggtgcctagcacttttctatgtgtcaatatcgctattgattcaattaagtatcgggtctcatataatttaatataatagctcgcaacgtgatatgtcaagaaggtgctaggtaacactggtgtctaatagcaatattcattttttaatcatcatttacgaggtagatatttaagaaattaaatttacaaaaaatttagaacaaattatttaaattttctttttttgacatattaaattttttacaattttataaaatatcttaaataattataatgtaaacgattataaaaaaaaaattgaactaattttttttcttaaatatcaaaatatatcaacggacaacaatatgaactatttactcatatcagatagttttgagttgtaatcatttcttgagagattgccttgtagaagtatgatatagtaagtgtttaaatcttttggttttatgggaggtttttttttatttatgtttattattcttgattggcttgtagtttacgagtgtgggagtgaagaaagggtgttttgaatgtatttgaatttggtattttgggcgggctttaatgttatatttttgtcattactacaaaatccaaataatatttgccaaatcacatatcatgtgatatctctcctttttaatttttaacttaatctggttggttctaccagtaaatttggtgtgttttatatcttgagaacaagtcatttttgagcaattactctataaaattaaattagtgtataatccttttttaaaattagtgtaaattcttcatatcgttttactttaaggtacttataatgtctagcactaagataaaatgtcattttataattagttaatgatttttaataatatttgttaaagtaaaataagtaagactcgatattaaattacaccaataacaatattataccttccaaaaatactagagtagatactataaataacctttaacatttgtcttaaaaaaatacaaatcttaacaaaagaagaaaaaggaaaacagttcaaaaactttaaatacaatttgttttaatgctaatattcttatgtttgtcaaaacattcatataataagtaacaaatataatttgattcaaaaaaacaaagaaacatgttttgatcctatttacctattatatgatgtggaaagtattacatgtatcaattatttttttttgaatgaaaaataatgtatcaattaatttgagtaaatttatatatgttaatattatattaatagaggagatgtgagtagatcatcttatatttttagaattaaatttatcataacaacttttttaaaataattaattttaatttaaatatttaataaaactctttttgcaattaatatttaataattttatttttatatttaagtctctattataatatttttaacatttaaaccatttaattataatatttacaataaaatttgattggtgattgcaacttgtttttcgccgcttattcttacctaggtcatggctatgatggagagtttgtccctactacattttaagctattttagtagataatttgtccgataataaataagatgtatttttttttgtcaaaaaaaaatattatttaagagtaatacttaacaatcatttatttatttatatatatagatattaatatttttttttccttggatagaaattaacattctatttactttgcattaaaaaaaaacattctatttactatcgctctcattcaggcagtgaagaaagaaagaaagaaagaaaagtagctcacattgagtaataatgcaaaaaatatatgactttttttgctgaaacaaaattatatccaaagtaaacctattaattatgtcaaattttggtaagtgtatacttttctaccacttgtataaataccagtaacactagtacaaacaaaacaataactttgaagtttgtctataatcaaacccctaaaaagagtcaagagtaaaagttgaaatctctagatttgacaattttgcatcaacaaacttcaactattctcctagaaataatctcactactctcacttttgtgtgccttgtgtttcaagtcatcaagataatgttgatagatataagaaagaaaaccccatatggccaacaccatagctatgactttcaacccattcatcttatcatgaaagaaaatcacagcaagaatgggaattacaggcaaagccaaggtacttataacattggagaacagagaagacacttcaaaaatcaaacccaacaaccccacagaacaaatctgccatgtcaaagcagtccaaaccaatgtcataacataagacaccttactctcttggtaatattcattcatctctttccccaagcctcgccattccccgctcgcgaaaagccccacaatgcaaccacatgttgctacaaaagaagggtaaatttgcatattcaacacactagaaaatgtctctgccttcaaaatcttttgaaaagatagttgcaataaggaaaggtacaatgcataggctgcagaggccccgagggtagttaagaagcctatcgcgtattttctcttagagaatttagtactactactcgagtcttgttcgtctgagtctgcattgagtgcaagaagggaaacagaggtggtgagaaggacaagagagttgagtataaaaggagtgaacttttgcgagttgagaaagaacgaaaacaaggcattgaaagccaattgagtggcacatagtaaggagtaagtggatacaggcaagtagaggagtccatatgagtacatcaaattatctgctgtcaaaattaagccaaaaaagaagtaaaggagagctagagaaggtagttttttcttgagttgtgttgttgtgttgttgggttttattggtgatgaaaagaagaataaaagaggtatcaaaattgggaagccagctgattgaactagtgttgctatccatttactgttcccacctttgtcatagtacaatcttcccaagagagtggctgcagattggcccgcgattataaaaacgatgtagatcatcacccgaagccaccacttgtagtgaatgagcttgggaagcgaaaatcgattagtgacagaagaaggtgtagcagaggtgtctgtgtttggattttggccatggtgatcatcatcatcagctgtggtgtagtgacataagtaaattgatccaacattagtatttctctcttttgtttttcatttgcaaaatgatcaaatagtaaatagatagaatatagcttatggattgtttagttttaagtaataacttcatagtaaaactaaaattgatgcaaaacaacatgttttttcactaaaactactaaaagatacatataaaataaaaatatttttttagccttttttagttaggtgggctctaagcgcaaccataacctgttctgacaaaatttatgtcatgatatagtgttaaaatattaatttttttaatttttaaaaattctaaaaatagtttttaaaaatttatgtcaaacaccattaaaattttaaaataacaaaaaaaaaatatattctattctgactttcaaaaacataatctaaaaactaaaatctgaaaacacagttgagtcttacaaattttatgagttttgatactatcagagcaaaaaccatgaatatggattggaacatattttctactacagttatggcatagaatagaatgaattgcagatttttatgtcatatttgcacatgtgaaagtgaattgtttttccccactatctataaagaataataaaactgaaaagtactaataaagcttacatagaaaacatgtttaaaaaaaaaaaaaaaattaaagaaagaataattgtaggtaagtttctaacctctggtttgaagttgaagctctcttacaggaggctccatgaagctcctcagattaaattaaatgagaataattaattgaaaaagtttgtaatgataaggaatctaaagaaagaaaacaaaccctctcatcttaagtcaattttttacaacctgcactcctctgtatttggcagttgcaaagtcaaactcaacttccttagacttagacttaagccacttgaaatccatttgtatttatctttctgtgttttattttgttttatttatatattttctatgtaaaaatctgggtttttctttctttactaagaatatatgtacaccatcctactaaattagtagtggaattttcatactatttaagtttaaggatgcactatattatatattaaatttcatactattaatagtattttaaatttaataatttggtgcataactttttttatggagtttttttaatactatatttaaaattaattttatttacaaaaatatctttaagaaaattatttacacaaatacatgtgccacgtcagaatatataccaaaattaaaaacaattaccgaatgtccggattcgatctcgagttcgggtttggatccagtcctaaatttgggtcaagattcgggtcccaaagggtttgggtctggagtctgagtcttgaataaaatttttttaatatattgaaatcgaatcggatcagatccgatctaaaaaaaaatattagtcggggcagagcgaatctgggatctaataagaatctgaatgtttcagattataagtgatctaccatatcagagctccgacccgctccaactatatagatctttttgacatgcattgagaaaaataactaaatataaatcaaaacataatagaaatatacaagaggagagtaacagcaatggatacctttttattgatgattgagataactacaagagattatatggaatcaatggagggatcaccctctgaattacacagaaaagctcacactaggtattgagatcaaacacactcaaacaccttttacaaccctccaatacacagaaaagctcacacgtaccttagttttgcatagtacaactaagtacatttactctaacaaaacacaaacctgagcacaaacaagttattttttctctctctaacagtaacaacaaaggaagagagaagagttacaatagataaactccacacccaactggaactcagaaatttttcgaccactatagacataaacttgaaatctttcaaaccacaatactaaagataaagatccaaaataaataatgacattccaatagagcaatcagtctaaatattaaaaagaattaataagcaaaatacacatcaatttaaaatcctatataaaatttgtacaaaataagactaaaaaataaataaatacataccttctatttacagagcacaaataagtatgagcagcctgttcaattatgacgacgattgtgtcctctgtaaagatgaagaaaactaatcaataaacataaaatgaaacccaaaaaggaagagagattcaaaagagaaaagaccaacaattattctaacttgcatctgtgtcaaacgcactaagatgagtacaccagattttcttcaacaaagatttaattttttttgagtagattttcttcaacacaaaaatgagttttggcgtgcgaagacaactggttctctctcgatgagaaggaaacggtcgactcgaaagccagcaacaggggtgcgatttgatgcttttctagcgaatcttgaacggacggagaatgaacagtcaccggcgataggtggagaagagctttgcaaggagatgggcgatttgaaaaccctcattgtcgaagaaaccctagacttgaatctagcttctacaatggtggacgaaccagatggggcaaagataatgaaggaagaaggcggggacgaggtaacgaaggatgaagggaatgacgattttcaagcttcggcaaggaatcactgggcgaagcttcaagatgggtagaagctgaatgttacagcaaggttgcattatgctgaaccagtcattcaggcaggtttcaaggttgctaaattagatcttgtggaggtggctgaacaagcttcagagtggaactcagcagttgtttgtatggttatgggggctaatcctccatttgctgtgttcgaaggttttgtaaaacggatttggggttacctgagtattgagcgagtggtcaggatgaaccagggacttactattgtgaagttcaaggatgaggccaccaaagacttggttcttgagttagggaatgtgcagtttgacaagaagccgatgatagtcagaccatggatctcgacactctgaggttagttcgatctgttcctctctggattaggttgcctaatttaggattgcaatattggggattaaactgtttgagtgcccttgttagcatgattggtaaaccgattatgattgataaagtaacatgggagaaatctatgattaaacttgcaagggttctagttgagatggacattactgatgatccgccatttgttatacattttgaaaatgaaaaagggcagattcaagagcagtttgttgagtatgaatggctccccattaaatgtaacaattgcaagggatatggccataacatggcggaatgtaggaagaatggtccgaaggtttggaccaagaaaaaccagcaacaagaaaagaaagtggaggatactcaacctactgttgtggttgattcgggggaagaaaatttagttactgctgaagctaatgactatatagggactgtgaagaagattgatgctaaggatggaaaaaagggtgttgaatctggaattactactccaaaccgtgattgtgttaatgagtggaagaccccaaagagagttggcaattcaaaagtgataagatctcttgaagtggttgagtaagcttcggttcaaaacacattcaagattctgcaggaacaggggaaggatgttgaaaagtgtaacttatctttcgagggtgaagatggattgcaccaacatacttagctggcatgttcggggtatgaataaaagggataagcagggtgatatacttagtttgttgaagcttaataaagtaagggttagtgctcttattaagaataaactaaagaacaataaagtggatgagatgatggtaaaggtgtttcatagatgggattatcatcggggtgatcaatgtgaaagaagaattctggttgcgtggcttaagtcgtttgttcaagttaaagtgttgaaggatcataagcaacttgttcactgtcttgtgaagtttattggttctcaactagaagtgtttgttacatttgtgtatggtttcaacaccattgatgagagagtagatttgtggaaggagctctctttgattaactgtcagggggttccttggttgatagcaggagatttcaatgcagttttctgttatggtgatcgtactggctat

SEQ ID NO: 15036 - DNA, 9504 bp, Cannabis sativa
actaattctctcattctttattttagtacatatcattctcattccaagtacgtactaagttaaacatgctaatgcataaagagaaaaataaaaataaaaataaaaaataatatagtccaactatttcagggtttcctttttcctggttgtgcgtacgccccattgccaacatttcaagctctaataatataacttaaattgttaattgagttggcatattagtacaacaaatattcatttttactaaaactaaaagcactgtacagtgagtgtacacttacttgcggagaaatgggaactaaccctatctcaactagtcaacttcctaatcaaatccatactctcttattgtcatacctaaggaaactttgcctggccattgacacacgccaaaatcattattactactggccatggacgcaggtcaaatcattattactactggccatggacgcaggtcaaatcattattactactggccatggacagaccaaatcactattactaagtaactaatcaatttaaattaaatcagtaattatctggcccccgaggcagagttaccacaggggctttgttagttttcctggatttgaaatcaaaattctaaacagcatctcagcatcgagaagaatttactttaggcatgttaatttgaccaagtgccgatattttctcaggcgtcaacatcagcttaccattacttaagtagtgtcgatcaacccacctcctgttttaagacatcatgcaactacatcaattattgcacagggttgtagatagtgcaagtatatttattagaaagactagaggagaaaaaaaaaacaatttgaaatcacaagtacacacctgcgtttccttggtttcacagagttctctgataagcgagaagcttctgatttcgaaatgcaacgcagtgaagaaagatactcataacatgctgcacctttcagtgtcatgaaagatttcgaaggaacaatggactgaactacatcaacaagacgtgatttgttttcactgcattgtaggcatttagtgttaataattatgttagttgtaaacatgcaaaatattcttgataacttaaagaggctttctgttctttcataataaaatataagatctaggctttatgcaggttttattcgaaaaagtcaaataccaggctccgaactaagtatggacatataggaaaaattgctttcagtgtacacatgaatttacttttgaaattaatttatatttttatgaggggaaaaaacatatatgtacatatatgtgtataatatattttattcttacaaataattaatcaatcaaatattgcaggtcatacatatttgatgtttttgaatttattttctattaatgctcattacatactatactggttaccacgcatgaatgtatagttaactaatgcgcctaaaagaaagtcaagtttgatacctttcaaaagaaacatcagtatctgggaggttcagttctgaatttcttcgagtcaatgtagttctactagctgacatatcctgctcagctaatttagccaaagctagctgaccagttgcacagcccagcattgaggtgaaatcaacagtgcagactgaacccattgttgatccaacagcagcaatatcttttgcaaacaagaaaaatccatgctgtgcagttgtggaagcgaaccgacttttattaagaaagctgtatgcatctgactcctcagatgtgatccatgatggttccaaagaatcctgaagtgttataaaaaattccatcattaattaaactgtataatttggatataaaggagtgcttttaattttcagctttaaagttaaatgatacttacacttgttagtagttcatggttgggtagcaaaacatctgtgtctgagattagattagtcattttatgagtgagctgtacaacttggagagcatgccgctcttctgaactcacatactgtgacaaatctgcatagcgcctacgaagttcgctccatgaatgttgtaccgaatcaggtgtcaaaaaggatttaggcttctcttcacattttaaagttctgctacagtccatttggctgcactgatccaaaatctgactgttctgatacactattccagcagcctctacatgctccttttgagaatcttccacctcttcttggaaaagtttggccattacattgcgattacttaacaaggtatgtgattctcttaatatttctggttttgtcatatcaacttcttcatcttcaactggtaacctgttgctcatcgaaacttcttccaatgtatccctaacaaaaccacaggatactgttacatcttgctccctaccattgttaaattccgtttctggaacaaatgatgactctgcaacacatgacacatcaactgacttgccttcatcatttactgggatgcagccaggagagtgtgaagggtgataaagtctttcatctatatttgctgtaattgaaccatgttgctccttaaacaataggctccttccaaataatggttcattgtgagtgtctccatctaaaaatatgggacacccattactcactaatgcatcttcagaatcagaagacactacatcatgttttttccgaacattctgccgtatgcatgaaaatggggtgtctaaattatcagaaacctcattagtatcaagttgacctctaaactcctcatagtcataaacagagcaactgaggttcaacattgcttccttgtttgcctctatagattctatttgaacattattactaaatggtatttcctgcttgtcctcaaatatatcctcaattatatacattaatttagaattttcttccctggaaaatgactcggcaatctctttctcaactagttctgataactcagaacgtaagtcccatgttattaattttggaaggatctgatggccagcctccaggttaaatagcagtgatccatctgcccttttatttttcttacctgtacagtcaaatgaacacaattattaaaaaagaaaagaaaccttcagtagagtggtagtaagcagatgacagagcacatgcaaggcagatatattcagccaagcaggccaattattacgtacaggcagtggttcgaatgctttaaacgaaaccctcttactcagtttcccatatcctataacccaagaacgggattaggtcaaagtcaccaaacttactaaatttatgttattaatcgaagaattagttctatataatggtcaataaattattacaaatgttttgctatcctgaaactaatatgagcagtagtgtcttaatttggtaattgtttttaccgtgaagcccctttaatatttcacattgaatcttaaatagaaaattaagaaaacgagacttcagtcaaagttagaggaaaagagtacattaactgacttgtagtatatataaatttaacgaataaattgctaattacttaaacaactatattatcaagcattttcgtttttggtagcaagttgaacttctaaatcataatctcttgttgccatacatgatacattaaacagtgtaacctcaatgttctagctatgtgctctacaagcattaattgcagaatattagaaagtgacccaaccaaatgcatatgaacagttaatcctttgaatatctcttaaaaaattgaaacttgttaatccatttacaaccacagtacacgcaatgctacttacctttcttagagctattaccctggcaccagaactgaagatgcataatcattttacgtatatctccctgacaagaatcaattacttgctctatgacatgagggtggatgttggctctctctgcagcacaaacctgagacacagtagcaggttgaatttaaaatagatattcaagtacctacacatgaagggcaagttgaacagggaaaaagaactccaacacatacgctatatgcatggcaaagcagcatctccattgatggcggtgtaaaacagatctctaatctgtctaaattatctggcaggaaaggcttgtgacctagaagtttgcaccaatgatgattaattcaaagaaactacagagctgactcaaagtttgaagaatgagcaaaacaacttataaataaaactttcttactattgctagtcagtattatgggtcctttggcagtgttagcaatctgttgcactgcggcaataaaaccccgatcttcaaaaaaaatgatatccacatcctcaaaaagaattaaaggtttaatttcactcttataagagcaactttcagcctcctcgtgataaaaaattccagcatctccagtttctttatgaaaatcttcatctgataatgctatcacttcagcactgccaacgtcatattcttgacttgcagagccattagccagagctgcagaggatttcagaacatgatcatttgaagaaccatcagcatttttcagtgacctgtacaaattataaggatgtcaaaaaatagacgtatttctgttataaatgtagctagtcaatgcttaagaggctgatgccagccaatacacttgagaaaaacagttcctcaacaagaggcgaattctaatcttaaaaatactgttgcaaagaatgtattgatatgattacaatggttacacatattaacatataagcagtaacaagaatagagattggaacaaattaattgccaccattgcccaccacagttatattactacagttattcacaaatagtcacatattcccccaagtcatatagatcaaatcagaataatatccaagtcacaaggtccccccaattattcgccaataggctacaaccatgttttttacaacagtacattttgaccaagcttaacaaggtttaatacatgactttgccccatatttagataccaatattgccaggcccaaaactaaataattgattaaaaactaaagatggtacaatacaagaaataaaactatcaaccactgcatcacctatgaattccattatatgcataaaagtataacatagtattattgggagggatcaatgctctcaaaagcttggaaccttattttatttgcgtacgttcatgacttactaaatgactggtaacagcaatcattttgtcttgttttctttctttatgtaaagaaatgatgactatcatctagtgtatttttatctttatatcccccatttctttaccactaagagacaaacctccttaaaagttacaacttcaaaatttgaaggaaataaaaaaatgtatttcagagtgttattatatgagaaaagagtctacttagtaaactatcaagtatggagagccacaaagatcacacagcttgaaaaagtaaaagaattatgactaactaccattaagaacgaaccttataactcggcgcgattgaagagcctctccaaacttctgcctcacaagagctccatttcgacattcagatgcattgacctgaaaagacatagccataaggtgaatgaaagaatgatttaaagcctcttctaagcatttctattcaaatccaaagcataaaaaaaaatgaaaaactcaatagccacataaaataagaatctggccactgcttgaagcaaacatgttgatgacgtctgctaacatcagtccataaaacattcatgagttgcttggatttgttcgtggtggaactaccaaaaatttgtagtgggggcaaaacagtggggaaaatgagaataataataggaatgttgttgaaaaataatctttaatatgccactgcatctgcaattaacttttattctacttttattatttttttaataaaaagataataataattgtaagttcgtttttgcttttaaaattgttagcaaaattttcaagacaagtagtatccaaaaatttatatatataaaataaacaacgacataaagtttgtcaataacaatttccatagatatacacatttgtataaacgcataatcaaaaaattcatatatatcaatgaaataaagatttccaagcatgcttttcatttatgaaaactgagccaaaacaacctttttatttttatatttgaatttattgaaaccaaacataaaattcagtacaattaagccctcattattccatctatatacatatataaatagtacatacacacaggcacaccatagtacaaaaattaactgctgttaagtgttctactcatttacatgcatacctacattatattttcaagtaaaccgtatatattaaaggtcaatctaatacacatttgttcaaactcaagacaataaaattcaaatataactttaaatatgccaacataagtatcatcattttagtacctccaaaacctcatatccttgctcttgcgcacaagcataaatagcagcagattttccactctgcaatgtgttagactgtcttaatataggaaattgtaaaccatctaagagttgtatttcacagaaaaaagctattgaaattgcaaacactgaaaaacttccccatgcactaactataaagattaataagaaagtcagagctgtgtaaattaattgaatacttccaagtacttatttaatcagtttctaaaatgtatgatggtgcaagcatatctataaatatatatatatataaatatatattatatttgtagatagtacaagcatatataaatacacgtgtttaaatgagaaagaacaaaaaatatgatagtgtactgaaatcatttgatggtaaaaccctgtataaatgggggtttctacaagatgaactgtttttctgcactaccattaggaatctttttttatttttggcacatagacaatttgtaactctaattattttatatgagaatctacattctagatatatggaaaaacttaaaaggcaaagatctgtttttctcaatcattttataagcatgcagttaattacattcaacttttgccagcaatataaatgcataaaagaaaacaaaatcctcaatataaggcttcagaaagagccgcctccatctgtaagctttatttctccacagttctagctacttatcatctcaagtaaagataaaaacaagtaaatgacatgtaacatgtgtagtttccattcttcaataaaactacttatgaaaaattctaaatattttttcattttagaatcttgaacaagcatataggtttgcgcaaaacaaattccctccaaaaccaagtaccatcactcatcatagttgtaaaaagatgatgtttttgtagttaccccaactggtcctgtaactaagaggacatttttaagcctatcctcctcatattggctttctgaatcagagtcattttcggaacagatataatcatctttgtccctatcatttgtatcacaatcaataagatccttgccgatttgaaagtttctttcacgccatttttgtagccactcgctcaaaaacttcacagattcaacattaccacatacctgcaggattttttttacagaaaattattttttctccagtttaagaggctgaaggaacttctaaaagtactactcaaaggaagaaatagtccataatatctaacctccgtggcagtttttggctggtaactgtaagtccataagctattccttggttgactgcaacacccaaaacagtatgacttcaatttgcaataaaatacagctatagacttaataaaatctatcgatagactgaaaaattagaaactacgattaatgcataaatattcaaacgcattatacgatcagttcaacaatattggagctaactaagataaaaagtacacacataacgatatcatatgattgaaaagataatggttgaaaacaattaattgaaacatatttaataatgagtctactaaaaaacaatgtaaaaattaacagctatagaaaattttgttattttttttggaaactagcctccccgcctaattctacaatctttggggaccaagaaactatgacaattgttatataggtaccaaggagggactcaaacctcaaaccttgtgggagcaaaccaaatgcctgaccatttgaactgtcctcaacaaatctacttccctccctagtgtttggatttcttaccgctccagtaggtccaccaaaggaatgaacattattcatctcactatcctgccaataattaatttgtattgagaatcagaggatgacaattaccaaaaaaaaatcacttagagcaccagcatcctagcatacctctatttcattatctgttggcaatgtttcatagatgcaatcttcttggataacacagtctgacgaaaccttagcctgaaaacttgatgcgttgttggggtgtaaaataacaggaaacttttgaaaacttaaggactcggtggagccttcaaaaataaattggcatgtgctttctgggtcacaaaggcttttcataacggtctcctcagaaaatttccaggttccccagtcaaggggcatgtcagtgtcctgtagcagaaagttttagcagaactcagaacaatcaataactgcagtctcaattcctgcaactcaaaaattactatctttattttgagctagcctaactgagataagcttttacctggcttctttcaaatacatgaatcggggcacaagtcttctctttattttgcctaccaactacaaacttattgccctcaacatcaatcacctctcgatttttcttgtcttccttccatgatgaaaaaaaaggatgtaatttttttcctgcaaacatccgtgaattttcctgttcaaagtgaatgaaggaaaactcagctccacaacatcaataggtaatgccaaaatcaaagctaataagtcaagtaaaaatcatgcaatcttcaaaccaatatcactgtaccagacattaaatttgagaagcatgagcaagtaaacaacaacattgactaaaaaaaactgattaagagactagttagttacaaagtgaagatatcacattgactaacctgggctgtgagtcttgcctctaaccgcaaatcaggcataacaacagctacaccttccgtctgtgaatttttcttcggagtactatttgcagatccttttcttctcctctgccaaaattacaataataataaatatataaataaaaaggttcaaattcgcatatctgtttgcataattctgaagaagaagaagaagacagaagtagcattgatttgaatttacctgtcgagaagctgatccctgagtaggtgattttcgcttaggggttgtcattggtgcttctttatcagggctagcaacagctacatctttgctctgtatatttgttgagtttttcttccgagctttcggcattattcgaagatcgttttcctttcgcctccaaaaaaacaactgttgttgatgatataatataagtataaccgtaacccaatgcatcaaccaggtgattactttttataataaactgattatgatatattatttaattaaaaatatacataaatcataaatcatcta

SEQ ID NO: 15037 - DNA, 1402 bp, Cannabis sativa
tcaaaagactaaacgtcttcttctttgctagggttttatcctttttttctcttctctcggctagggcgctactgctattcttgcaactcaaaagatataatatataagtgaatattattacagaaaactaatgatacctaacaccactgaataaaatatattgtaacaataaattaaattaaaatatatagaattcgatattaaattttatattagcaccatacaacatctcgtaacaatattaatatgtgtaactagatagttggcttaatttaggtcaagataaggcgaagaacaaatcaatgatattattatcgcgattttgggtgtgtacttggatccaacttattgtgatgagtttagggttgtgtctattcccaatagcatctcataaatcattgcacaatctatatagtcaagagtaaattttcacaaatgtatttgaagataatgtcaacaaaataaatataaaagggcccttttgtctcaataataccccaaaagatataaaggataaattagggccctttgtgttccattttgtaggaccttttgtttggattgaaaagaagagtagaggaagaaatggctttgcagctaccttggctatatagttggtggggtattagttgtaatgtcattcttgtcgacctaactaatatatatttataaaatcttttaagtcttaattctcctttgatttttgtttttcaaatcttaagtttcatgcctcttatttttcttcttatgtgttctaagagaagtgacattaatgcttcatcattttgagaagttcttatatattacatgaatagttttattcaaaagcaatgttaattaaataattaacttttaactgaaataattagaaaatgctataggatatgtcagtatcggctttgaaatttagtgggtcatagaaaaaaaaaaaattgagcccttagaactaaatgtgatattttttaaaattagtaaaaaaaatatataattttaaatggagaaattttatttttggtccctggactaggtgtgccctagacataggccttgctcgcctatacctagggctggacctggatattctaatgctttccaatagtttaagtaatattaagtatttaggtatctagatctcacttaatgatatggagctcccacaaaattatacatagtttttcagactattaactacttaaactaatgttcccaaaaactaacctacttatattatcaagacaatttagttcgttacctttaaaatacatagtattgtcctttttgagagcgatcataatcaggctcggtcctagacacaaatggattaggtctgtgcctaaggcctccacttaatgatgccctaattttttttaaaaaacataaaagaaaactaattaaattttat

SEQ ID NO: 15038 - DNA, 4093 bp, Cannabis sativa
  modified_base (4045)..(4053): a, c, t, g, unknown or other
actaagtaaaaattattttaataagctaaaaaatacttgagaacaaaactaatttaatggacaaaaagagccaaataactctataatcatagagttatcagtagacccctatctgttttggtatgcaggagagttttttagtctactttttaatcatgatcgtgtacgttgtagttatttagaattatcaattttttaaaaattctaaataatttgtaatactaaaaacaaagtttaaatattttgctacacacataattttttttatacacaaaataaataattgtttgatttttaacacgataagttatttaattttttttaaaatttatatataattttaaatagttacaagtacataattatgaaaaaaaaataaagtaaaattgttcagttagcaaaatagataaaagatctatccaaacgttatagaggtgtattatctttttgtggacaaattaaatgcttctttctcaactaggccaaacatttactaatttcattcataacacaaataatgaaaataataataacaataaagaagagagtcgttttttttttcgtataagtggaagagttttcttatgagattgcgttgtcaagtgtcgatactaattcaaacccaccaaaagtaaagtacatttctcacacttgtcaggtatcataattctcttctcttttgtctaccattaaaagaaaaaaaacccacagaaatagtcaatttctttttcccaagaaaaaaaaccactgcccatccctggtttttctacgcccacaacatacatctaatctttccccaatattagttccaacctccatctgacccttttattttcaaaattacttcactacccttaactctaaaccaattattattattaattcttttactatgggcaatggcagtttgagtaattaaaccataaaccaaggttgaatctaaaatcattctccttataaaaataacaaagccactgctcactgattgtgctgactaaactaaaaacaccattaaaaagcttccattccttcttcttcccctagccatgcacgcaggagcctcctcttcttaccttagaaatcttcaatgggcccaacccaacggcccaataagcccaaaaacactcccactgaacccctacgtcagtttccgagtctccgccgtggcagccccaccgccgcagctaaagtttcagagaacgcattcgatgccgccagagaaagttgaaatctttaagtcgttagaaggttgggcctccaaatctgttctgccattgttgaagcccgtggaccaatgctggcagcctcaagattttttacccgacccggctaagactagagaagagttctttgatcaggtccgtcaattgcgtgatcggacggtcgagattccagatgagtatttcgttgtgttagttggggatatgatcacggaggacgcattgcctacgtaccagaccatgataaataccctggacggcgttaaggacgagaccggagctagctcaagcccatgggcccaatggactcgggcctggaccgccgaagagaatcgccacggtgatttgcttcgaacttatctgtatttaacgggtcgggtcgatatgaccatgatcgaaagaaccgtccagtacctgattggagctggcatggtgagaagagtttggtgttttcgtgtcgttgttcttgtttgttgtcgttttagtgtttgattgtcgttttttgtttttattacaggatccgggaacagagaacagtccgtacttgggatttgtgtacacgtcattccaagaacgtgccacgtttgtgtcacatggcaacacagcacgcatggcaaaggagagcggggatccagtgttggcgcgtatatgcgggaccattgcatccgacgagaaacgccacgagaatgcctattccaagatcgttgagaagcttctagaagtggaccccaacaatgccatgctggcaatcgctgatatgatgaggaagaaaataacaatgccggctcaccttatgtacgatggacgcgaccctatgatatttgagcacttctcggctgtggctcagcgtctcggtgtgtatacggctgatgattacgctgatatcttggaattcttgatcgggcggtggaggttggagaagatggtggggttgtcggctgaggctcagcgagctcagaactatgtttgtgggttggcgcccaggattaggaagctgcaggagcgagccgatgatcgggcgcgtaagatggagccacaaagtgtcaagtttagctggatatttaataaggaagtcctcttgtaaaaaaaatggaaaaatgagaaaaaaagaaagttttgtttttgtttttggcccaccaaaaaaaagtttataaatactatttaaatctgaacttctttttttttttttttgaatagtttgagttttggttaatttttttttttttgatcaactactagttttggttaattaataatagaaatttatgtaaaagtagtgctaaaaatagagttgtttttttcctcataggagtgtgaagtacctttgtcaattttccattgtgctcctttattttatttattaggaaacaagtcgtgctctgtgtgcttctaatcaattcaacatatttaaagacaagatgagattgaaagatatttacagtccaaggggagtattaaacttgattagtgaattgattagttaattaggttgttaattgtcggttaattagttggttagtgtgtttgtttctctaataatctcagctggtatataagttgttgaacactttgtatcgttttagttttgataaataaagttctgttgattcaattctctctttcttccttcctctgtttcaaagctcatttgagctaataacttatgtaaaaaaaattattaatcataaaaatatttaaaatttcatacattaaaaaattaagaaagataattatgatcaaatatactatcaagaccaaattaaggctgcggagtgataatcttagaaagaaatagtttaatctcatttggaacatgcaaagtaatccaaagcatcatttcattacttggttagcctggaagaggcttcaaactttgaaaggctgcttaattttagttacatccacacagctaattgtttgttttgtaagtttgaaaaggaaaactcatcagcacctattcttcaactgtaggagcaacaaacaggttcattcttaaatgtgtaactgggctagtatgaatatcaatcgaaatgagcttgagcacagtctaaattgggtgaaaaagtgtaggcggtccaagcttaaaagatacatttatactgctctgataaataccttggtgtactatatttggaatgcccaaaataatacacttagcaatgataatgtatatgtcacgagataaaattcacaggggcactttagtcattgtttctccacctccaattatgttggaatgtagcaatccctagaatgattttctcaccggctgtcaaatcttttttcattagaatagaatctcttttattcccttttgattgtatttcattgaccacgtgtcaatcattggttgtgtaatatcattgtaccctgtactggtttgctgctatatataaaaattattctcatcagctacaattgagttgatttcatttaataccctgttcattaataaaatttacttggtatcacagcaaatttaggcttgcgccatgtctacaccccaagatcaaacttcccaaacacagcctcaaactacaactcatggacgaaatcaatcagctccaaaaactacagtggttactacaccaccagcacctttctctgctccgattgcaaatccttttagcaatacgtagagccagccattctccttgaaactcgactgcaacaaattcccattatggaagacaatggttgccactattattcgtggtcatcgacaggaagggtatttcaacggtactcgcgcgccacctccagagttcagaccagttgctcctgcaacaaatggagacacagatgatgttgggttttatgccctnnnnnnnnntccatttcaatgtaatccattttattcaacatcaataaag

SEQ ID NO: 15039 - DNA, 4584 bp, Cannabis sativa
aagttgaggcgtttaaagagtgcaccaaggcgtgcgccttgctgaggagaaaagaggcctacgccttaatgggtgaggcgctgaaatgaggcatgaggcgttgagaggtaagaggcgtgcgcctcaaattttgaagtgagggctatttgagccctaaaaaaaaaggcccaaattgttattttatttttctgctgcccaaccttataatccttaaaaatatcccataaacattaataaaaaagtctaataaaatatttaagtaagccaaaataaaacttaaaaataaaaacccctgattctatcttcttcctatctctctctcttcttcacagcagctgtgcagctgctaatttcttcaaccaacaaaaaaaaaaatcgctgctttgtgcagctgctaatttcttcaaccaacaaaaaaaaaatcgctgctttgtgcagctgtgttctaggatagtagaatttaggattctaattctaaaaatataattatctttgttttagtttgatttttatgagatatatctttttgtatgtttgaattttatgagacattttatgttattatttttatgagatattttatggtgtgtgtaatttatgtgaccgtttattcatttttaagtgctctaaaagtattgattccattaatttttgaggcttacgcctcatacgcctcgaggcttacgcctcgccttacaagaagaaaaaaaatgcctcaaggctcatttgcgtttttttaaacattgaccccatgaatcccaccctctcatccaatcaaatgccagaaaaaatgctcctactagtgagagctaaagtgatgctctcacttaagaattttatcagaatgatgataatttggaattatggagtttcagcatttcagaacaaggatctacactatttggtaatggataaaaaatttgggttttgaattggctttaaagtgtgaaagatgagaagttcttttctgatctattgcgaataggatgttggatgcaaattcataacttaccttgagatgcttaaattcaggttgcattttttatgtgtgtttttgttctcacaaactctcgtagacattaatgttgcgtttggttggaagtaatgaaatggaatagaatggaaaagaattaattttcattccattcttttgtttggatcaatttaaagtattggaatgtcatcccaatggaatgactttttcaccatttttgtgaaatgactattccattttgaaatgggaaaagatcattccgatacaattatcaaattttctttttaaattttaaatttgttatgatagaaaaaaaataataaaagaagattacaaagttctttagtaatttaatacctcatacatgcacaagtctgacattcctccaagattctttatcctccaccgagaacacatgcaagagtttgatctgaagtcatcttttatgactgtatgattagttagctatctgcacttatgctttctacagcagaaaagagcagaaataattaaatgaaaaaaaatgactgaagaaaacaaagaaaaagataataagaagacataaattggtcatagttagaaatgcaataagctaactatgtaaaatgttgtaagaaggacaaataaatcaaaattaataaaatctcattactttaattttatttaaaatgtctgatatgttctatcacctgcacatgctttttgttttgcattaaatttttctttcctttaaaattgcaaatctcacacgacctttgacagatcagtgtgcaccatatatgtatactcacttacttagagatgggactcctaggcctgccactgttcacctcttgttcctccaacaacccttaattttacatttgcgttgattgttatcctaattgaatctgaatcgtgcaattcattgtataccttccaatcttacaaataatgacgctggaaagctaaccacttttctgaacaattgacttccagtaaacgaaaaagattttctcatgggttgttttcaaggccaagaaactgccctgttgtcggcttgtgcctgtgcctctaaactagtgctttgctatccaatggttcaaaccctatttattatagcacaaaagagccaaagtgcttgacatcattatgagcttttcttacaaagacttcattaaaaacacacacacacacacaaaaaagttatctagttcccattaatttacttaattattctttgtattcttgcttttttcatatttttatttaaaaaattgtttctgaaaaatgagatgaattcagtttaaatggaaagctgttccatgattcttctctccttaatcttattgtgtaaagcgggtttcttttagaaattaattccactgaaagtctttcaccttctgtctgatacagtttgaagttcaaaataaaatatatctgatctttcccccactaccgtttgcagtgaaaaagaaggttgtgctaaatcctaatggtgttgtctgcttaatggggatggtgctaacttggctaaagtagtcttaataatattttagaaggctagaaattgcaaattgatctattaaaagttcatcaaaccattaatagttacttcctacagtaaacattttgctatttaactagtttagagtctacttttatctattgtttttacttttctgctgtaaaatgttttaggtattttcagtcagtttgaaatatacaattccactaattaactaagccaagaaacaactcaatctaaacaagtaaaacaagaaacactccaagccttgatttaaaaggaaaagaagctaatcttacccacatttctaaaagtaattacataagcaattacccaggtgggtagctcaaatgttcagacatgtagtttcctcaacagagtcacaggttcgtgtccctcccaagtacctacatagcaattgctaccgttttatcgtgttaggaggggaggctagtttcaaaaaaattaaaataaattaaaaaaaaaaaaaaggttacaaaagcaatttcttttaagctcccccaatcgaaattctaattctcataccatttcttttccccttaaagtcttatacgagttaaaacttatacaaataacttcaaacataacaaaagtcaaatcaaaatctctacaaggaggaacaagttcaagtaatcctatttgccaaagaaagctaaaagtaaattcgcagtttttatctcagcaaacttaatccaataaaatataacactaagctcagatttctattggatcgttccagaataatataagttttttgttttacaaaaaaaaaataataaaaatcaatcctaacctatttattacaacattttctcagcaaccaaacagaatacaaaccaaaacaacaaggataattacgaaacaacatcatttgtaaacgaaattggaatctgaagaaaccagacctaaatatcaactcaaaaaaataaatattaaatatgaataaaaaggaaacgaactgacctgaatattaacaaattctcataaacagcagaaattcctgagaaaaccagaaagaaaataaaaggaaaacgaaacagattagccctaatccaacccgggaaatcgaaccgagatttctgcgagattcctcgagcttttttctctctctaacaagctctctgcgctgaagaataattttttttttgttgttgaaaaaataataaaaaattattaatatttttcttaggttatataaaaaagagtcacgaaatgatcgacacgtggcaatgagatcgatacaaggaagagtgtatcaaaattcgtggacgaaaggaaagcgagtagatccgatctgtttcgacctcctaattggccgagtagaaggcagtaggttctcgaaattcgacacgtgtccttctggaccccaccctcacctgggttgctgacgtgtcctttgctttgcttgtcatttactcatttaagttttatttattttttcagtaaagaagataataaaatattaataataaattaattcttggcactttgctgccgaccttggtgtggacttttgtttatggttttatttaaagtttctttaagtaatggagaactgacctaattaatttttgcttaacaatttcgtttaggggaactagatggatgcacgtgctccacagtgcaacatttttgagataaacaaaatgagaaattattttttgttttttttttttgagaagaacaaaaatgttgttaattccttcaaaatttcaaataaatgaaaataacaacaaatgaggataaaatcctaattttacatactctaacaaaaaaacatttaacaacaataatacaattgttagaatattttactaatataatcgtaaacataattttatattcacaataattttatttgactggtcttgatgtattacaatggtttttttacaagctagaaccctagcttcttactatagtatttttacaatgatttctcaaccctttggatgagggtgtaaggtggtctttataggttaagaactaggtacgtgtgtatccataacctgctatattttgcatgtaaatttggcccactaatagggtaaatgcataaaat

SEQ ID NO: 15040 - DNA, 3410 bp, Cannabis sativa
ggcaacctcgacgatttgaccattaaggaagtcggagatggtaatctcaatttcgtctacattgtaatcggctcctctggttctttagtcatcaagcaggttagttagagttattgcccaatgggtttcatttctttttcaagagtttctggctgaacactgtttgttgatgccaattttagtattttctttgatgggcttttcatattgagaatttgttgggtaatactttggtatggagtggaaattaaagagttttcatttctatattcttagcttgtagttttattttgagaaaaagaaaaattaaatgttattaatattgtaattaattttgtaaatgagagttttagaagctttctggatttgtctgtgtagagttccaaaggttgaaggtgtaaattatgcaacttttgtgtgaaatagatgaaaagggaatggtgtattgcttctttgcttcaatgagttgagtcattgataatcaaatatctctctttgaaatttactagttttgaaagtttaaattgggcttatttaccagtagagcatggaagtaaggaccctttaaacttttcgattttatttttatgtttctttttttgtaactgtaaaaggctctgccatacatacgctgtataggggagtcatggccaatgacaaaggaaagagcatactttgaagcagtgacattaaaagagcatggtcgctggtgcccgaataatgttccagaagtttttcatttcgaccgcaccatgtcgttgattgccatgcggtatttggagcctccacatataatcctaagaaaagggttgattgctggagttgagtacccactgctggctgaacacatatcagattacatggcaaatactcttttctacacatctctcatttatcggtccacaacagagcacaaaaaggctggtattgagttaaacttcataattctagttttacttgttttgaaatgtactctgtgttcctcaaattaacttatctagttggatctataggctttaatagttgctagagtctaatttgaacattatgagaaaatttactcttactgtcttagccatttttccatctaggatttgtactctctacaacatttgtgtttttcttttaaaattataatatgtttattgttgatatgtgtcttgaaattaaatgtagttttgtggcccttaatgattcttattgttttgccatggactttgctcatatgcttcttactttctgcagttgctgaattttgtgggaatgtggagttatgcaggctcactgagcaagttgttttctctgacccttataaagtatcagaatataaccattggacttccccttatcttgatgaagatgctgaggctgttcgaaatgatgatggtttgaaggttgaaatcgctgagttaaaatccaagtaagtacttttgatcttagtagaaaagtttcctacataattattttttttattgcaaatatttatagagctgtttttcgtataggttctgtgagagatcccaagcgctaattcatggggatcttcacactggttctgtgatggtcactcatgactcaactcaagttatagatccagaatttgcgttttatggaccaatgggttttgatatcggtgcttttttgggaaacttgattttggcttactttgcacaagatgggcatgctgttggtgaaaatgatcgtaaggtatgtctctttgttcatctcttgtttattaatttcaaatgtcctagttcttcatgaaacaacatctttattatggttgaattccaaatttgccttttgttatttatctgactgaataataattctttgagctttatgtttgtagaagataattgttactttgatcttttggcatgaaaaactatcattttttaaaccgatttcttcatttctttgtaattgtactgttttttgttttgccttcatgttccatcctatgctctattaaagttctggaagtagtaacatcacatggtgttcacattaagggagttgaaaattttcattgcataagccaatggaaagggacttgataatagacaaaactgtaacagctttgaattattgtgaatagacaattgatcattgaccttaagagaaactttgtatataatgaaatatgttattgaatatggtctatagaattgagtaatgccatgggcatttgtggtgtttagtggagtggttgatgttgtcttggactgcagttgtcttggtcggggtgtttgaaattagtggtgataagtaaatgatatgaacctggctaaaccacccatttgcttcacttactctaggaaaaagatgaaggaaaatggcttagggtttagcttaggcagcaggctgcgagtaagttaggaggggaatattcagagagggtgagggtgcgtagaatgttctgaagcgaataaagtgtacgagagacattgtaaggagaatcttgttgagtgaatatcttggatagggtactgagtatacctccatacattgtcgatattcttcaacattttctaatattttggtcattttatctaatgatattttttggggtgttttgtattatggtaagatacatatttgcatcgaattgtattattcgttgaagctggaaatgttttgacatatttgtaaaattgaacacaggcagtaatagtcagtaatagtgactcaactggtttcttttagaaactcaaaaatcacatcctttcccttttttttcttttcttaaggttcacccaatttttgagagatctgaaatttctaaatgattcagaattacaaggagtggattttgaagacaattgaggatacctggaatcttttccgtaagaaatttacagctctttgggacaagcacaaagatggttccggcgaggcatatcttcctgcaatttataacaaccctgagcttcagctccttgttcaaaagaagtattttgaagatttattacacgacacagttggatttggttctgcaaaaatgataaggtgaggaaatatcacatagttttttcaaatctttcccacatatatttgcatactctgttatgttccaacgacttctaaagtgagttcactttcatataaagttaaccttgtcttgattaactattttcatatttgattgttttggtagaataatctgctagctattaatgcttttaaattgctctgaacattttcgttcatccattttgattgataggagaattgttggtgtggcacatgttgaggatttagaatctattgttgatcctagcaaacgagctacatgtgagaagcgtgccctttgtttggcaaagatgctgctgaaagaaaggcgtaagtttcacgacatttctgaaattgtttcagctgttaggaacgtccagtaatgactgatttct

SEQ ID NO: 15041 - DNA, 13837 bp, Cannabis sativa
tagtactttatagttgaatatgattcccttcaaatataaaaaagagtacatttgaaattgaatatgattcccttaatgagctaagctaacacagtagtgcatagagattgatttgattcattcatcccttaataattagggaactaaaaaactttgttgattattattactactctcaaacaaaaaccatggccactccaaagaaaaaagagcaaaatcaagaagaaacaaatgctgcaaactctagtactagtagaatagtagaatctgaaaaaggggtatgattcaattcgattcaaatcaattcaagcatgcttagcttgaaaatctttcatgaaagcaaccaacttttcaactccagccaaaggcatagcattgtaaatagaagcacgcatacctcccactgatctatgccccttgagttgaaccatcttctccttagcagcctccttaacaaactcaccttccaactcagacttctcaagtgtgaatggcacattcatcaatgacctcactgacttctccactggacacctgaagaacccattgctctcatcaatagcattgtaaagaatctcagctttcttctgattcttcttctccacttccttcaaaccaccctgttccaacaaatcctcaaacactaaaccacacatgtaaataccataacaaggaggagtgttgtaaagtgagttgttctcagcatgaatcttgtaatccaacatcactggtgtctgttcttgtgcattaccaataagatctttccttatgattacaatggtgactccagatggtccaacattcttctgtgctccagcatagatcacaccaaacttagacacatcaactggctttgaacagaaatttgaagacatgtctgcaactaaaatgcctgtggagttttgtggtgttgggtagtttttgaactcaactccatgaattgtctcattggcgcatatatgcaaatacttggcatctgggttttgttccaaaccctcgaaagttgggatctttgtgtacttttcagattttcctgaccaaatcaaattagggttacagtacttcttagcttccttaatagccttatcaccccaagacccagtaacgagaaaatcaacagggtcacttggtgagcagagattcaaaggtatggcggcgaattgagtggtggcgccaccctggagaaataagacggcgtattcatctgggatttcgagtagggttcggagatcggattcggctttttgaataatggaaaggaattcttttcctctgtggctcatttccatgacactcatgccagatccacggtagttgtagagctctgactgagcctttaagagaacattttccggtaggatggctggaccggcggcgaagttaaaaagcctttcttgggagtgagctgggagtggtggacgatcttggatttgggttgaggtggcggcgcatgagatggagattctgcggttggggatggtgaatctagagaaagcgttaaagggtttaaagattgaggttttgggaagttggtggtgaggttgagttgggttttggaggagaagtgagtgtggtgtggttgccattgccatggtgattggtgacggctctcagatttgaaaaggcagagagagagagagagagagagagaaggggtttgtttcgtagtggcgaagatcaaagttgctttgagtgtgaatttatataaaaagaaattaagaaataaatataaaaatcagatcttggaagtagtgatagtgccaaggactcagggcaaggcaacaagtactatatcattttcgatggggttggttggtttggtaggtaaaggtaaaaaggttgactaaggaagccaattttgatgtcgttttcatcacaaattcatgtcgttgttatcacaaattgatgtcgttttttaccacaaattgatgtcgtttttgtcaaagaaacagatgtcgtttatgacccagatagtgtcgtttatgacctagctagtgtccactaaccaccactttatactaaatgggatattttaatatagttagtatttcttagtctctctatcaatatgagagagttcaaatagatgatgatgatggcaaaacaagagaagaaacaaaaatgaagttgagtatttattattgcccgcattattgttcaaagggaacaataaaaataaaagtaaattgattaaaagacagtccaaagtgaaaaaaatatcgtagtaataataataagaaagagagaaagatattgttgtatgctcaattggaacatagacattaagaatggctgtaaagcaatgaacaaccaaaccaaccaactaaccaatccggctgcaaatctagaatatatcgaattcccaggccgcaaccttggttgctgctgctgctgttgttgatgctgaattattatgtgcacatattagagtagaaagtaaagtagagtagagtagaatagagtagtcatgagtcatgagtcatgttgttgctgttgttgttattgttaagagtagagtagctgctgctgtaatataatacatgccttcctctcctcttctgctgctattgtagttgttgagtcttctgcaacagaaaatttgctggttcacattttgatgtgtatccaaacttagatgtacagtacttcctatgaacccctgttagctttcctgttgctgcgttctggtggagaccaaccatcaatcttgagcactctctgttacaagttaagataatagtaaaatgtgagtgagtgagttaaagactagaatgattgaaataaagactagaaacaacacttacaggagctgatcttctgagtaacttgtgtgccattcgcaggtcctattccactgcttgaacccataaagagtgcattgagcggtgtagactgcagccgcggctaacaaggatggcgaatacttgagcatctcgtactctaccagcgacagctcgatcatgaagaaggatagtagttcaagctgttttcatatcattatagacattagataattgaattgaacagtaatcaaattttataattgggcgacacaagaaatcaattagttacctttttgtcagattgagcagccttgagaaaccttttcatgaagacataaggcgtggggactgacatgttgaattgcaatgtgttaagcatcaatttctcctgcaagttggacaagacaattttacacaagttttttaagttgaaaacaattgaaacatgatcttaattagatgggataagacaaatttatttaccatttcaagaacttcattccttgtgtaagccttatctgatataagaatcaaatcacccacaacaggaacagaaacttcctcatatttacatgccaaaagcatggcaaccaatccaaccaactgaagcttctttcttgcaactttttgcttagctaaaaacctatctatgagattaactgtgagaaacaatgtctctttcaacagttcaaacttgtcatgcacctgtttgattggagggggaagtagattaataataatgataattgcttcataaattggttttttgacatagtcatattggccttaaatggtttattagtacctcaatcagccagtcaatcagtatagatctcatcctttcatttatgtcatattgttgtcctaagtagtcagatgagacacagctaaacccctgagcattggacaataataaaagatagtcaaatgactgtcccttttgaacaatcttcaaggttcaaattcttcaaacaagagtattgtgatttacctccatttttctataaaaagcatagatatcttcaacataatctacaactgcaagtgggttctttctatcacagctatcaatatctgtaattgggtcttcttcttcaactactatatcttccatttcaacctcctcctaaagaaaaatgaagaaaacaaacaagttaaaattcaaattcaatcaaataaaagaggtagaaagagagagagatatagaaacataccataagatcactttcagctggtgcttcttcggtttcggtttgttccaagaacataggcactggctgatctgaaggaggagatttgcattcctcatcaatgaatatggtctctccaaacccatttgagttagaaactgatgagattcttgtgtttttagcttcctggatgtttaaggccaattacccttttaacatttttgacaatttttccaatttccttaaaaacaaatcagatactgagtaaattcaaactcacctcaagtgctgatgattgtttagtgctagcaatttgtgcagcaaatctcctaaatcaaattaattcaaaataattttaacaacccaagtaagtaaacatgtctcaaattggttcatgctaaagaattaagtaataatttgaggttagacttagacaaaactacatttgaaaataattaaggtcagtggtcagatctctaacctggtaattggtctatgagctagatctgcctgcttcttttcacaaatctcctgtttactgaagaaatttttcaaaaaaaaaaaagcagattaatcccagaaaacaaaagaaagaacaaattattactaaaaaaagttagggatttgaaagagaaagagagaagaagaggggtttgaaatattactctgataagcctctcttgttaaccacaacacatgggtaagattgacctctcactaaattatgattaatcactcctaaagctctcctgttctgtcttcccatttctacacacaacacatttcaacaacgaaagatcagaaaaaaaaaatgaaaaattttgattaaacacacaactaagcaagacaacatattttcttttcaaaatcttaagtcagcccactgaaaaagatccaaccttgaatgtttgttgagggtctgatcagattgttgttttcagaaagaaccattttttagctcgatggtcttagagaagaatgagattcagaccaaacccagaagagagaaaagcatgagagagagaaagaaggagagagagcccactgaaattgcagaaacagatagtagaaataataggggagctaagggtatatgtctgaagagagagagagggggggagaaaggttgggtctttttcaaatgcaacggctagtgaaatatgaccgttggatttgattagagtgtgtgagtgagtgagtgagaatagagctttgtgttgtgtgaatgtcctaataacaacggtcactaatattaggaatagggataatggtaatacatgtgctttttcaaaataattcacttaattaattatttaatttaataaattaattaataatccaatgattgggtatgtcagaattttgtcttgcttttttaagggttacccttcaaattcaatcccttcttcaaacttaaatctcatatttgcgctccattttttaaatatatcctttttattattattattattattattattatttgaacaaccatttttaaataattaaacattcacttgtaacattaattattcacattgcacataagtaaaataatcatttttaaaataatacattgaaatttcaatttctaaaaagttaagggtgcagtagtctctcattgggggggatttttttatatatatagatctcttgtaaattactctaactaatttgttttttaagaaaaaagtgtgttcttttgcataaaatttattgttaattaagattagaatattaagtacacaatattgtaaagactaataattgagattgtacatgtagattgcatttttaaaataagtcaagtgaaaggaattggtgaaaagtgaaaaaaaaaagaggaaatatttgaactttatttccttattttgtaaccttttcaaggcaatgcaaaccatcttttttcttttttcttattttggatttttttgataaaaacccttaaaaaaaattagaggcaatatcgaatatgaatatccctttgaccataattgaaaaggaaaaaaataaaagacaaaaaaaaagagcaatatcaaagtatttaatatgccatccaactaagcataacaagtaaaatttcaaaacaaactttcttttcttctttaaagcaccagaagataccaatcatttaagaaaaataaatcataatagcaaatgatattgagcaactgaatcattgacaacaaaaaaaaatattaatgccaaacattaacaacatgaattattttttaaagaagaaaaaaaaaatatcaattgttttgtcattttcaaacatgacaacataagttttctccaacagtacatatttaaaaagaagatcaaaattgttgaaaaaataaatagtgttatggttaatgctcatcatctccaatcaacatatctatttatactttaaattaaattcaagtcctctttttcttttaactgttactcatacaaacaacactatttatctacctattcaactttaatgctttttaaaattgttaagaggaatttaaaaaaagctgttatgaaaaaagcaaggcaaaatttgaagcatattacccctcaaccaaccttacattttttgaaaaatgtacctgcatagtgaaaaataatgattatttagttaatcatttaaccaagatggaagacaatagaagcagaaaaaagaggcaccaccaaaacatacctatcagttgtcagtttcacttcaaactgaaaatgtaattttacttgaatatatcagaaagcaatcgacgatttcccgtttctttgtttacttgtttatgttcggtctctttggttttcaccacaccctgctgtttagccactttatcttcttgtgttgaaggcctttcactcttatgtgtgtgcttttttgtcttaagctcacctttctttttctcaattgctttctcatctggtttttcgcatctctcgtctgatatgtttccttgcattgcaccctgttgctcagccgcttcatcttcttgtgttacatggagcttcttctccttcaccgttgaaggcctttcactcttatgtgtgtgcttctccgtcttaagctcacctttctttttctcatttgccttctcatctggtttttggcatctctcatctgatatgttttcttgcactgcaccctgctgctcagccgcttcatcttcttgtgttacatggtgcttcttctccatcaccgttgaatgtttctcgctcttgtgtgtttgcttcttcttcttcttcttcttcttcttcttattagcctcgcttttatttttctcggttgcattctcatttggttgttcgcatctgttgtctgacatgtttcctagcactgaaatcaactcttccctgggtaattcatctacttcgtagaattttgtatgtttattagctcgttcttggcatatccctatctcaacaacctcttctgtcgatcgagtactgaaatgctcggaatttatactgacttcactgggaacaaaattgcgtttcttggctggctgatgttctatttcaggagaacatagtgaaacactgtgtttttgtcccttcttcacttgcaattgctcctttatcacatcagaaagtcgagtgtcgccagtgatctctgtatgcatgcaattgttctcctctgaaacgttatctcctcttctttgccaacagcccattgtctcaagaataactttgccaacaacaaatctcgtctcccataaatacccttgcccaagcaaggcatagtcaatatcaaaacactttcttctttgctcatgagattgacatcctttcttttttaccagcaactgaaaaatttcagctacatctttgcttgtcctctttggtataaatacctaatacatggagttataatagaagatcagacgacacatttcaagacgacactgtcattgcaaatgtgcctaagcatgtaacattgtgagcataaaaccacgataacgtttacacttaatgccatacctatattttgtgctaacatgagatatcattgatgaaacgaaccatgctaccgttaacaaaataatcaaactaattgattttgccaagcatcatagaagagaaaggagataaggggcatgaagcagcacataggtagatctatataaattaagccaatcacagtcaacttgatataattactagacatacttaccaaaccagagcaaggggaagttgggtgtctggtcactgattcaagataattttctgactctgttaaaatatctaaagaatcttggacaagaatagctaactgagaaactttcatcacaagttcttcatcaaacttagaagcgaaggaacttgagagctcagggacaaacttagcctgaacttcagaattttcttttgcaaatcgaataccctctttccattctccgtggtacaagatagaagcaaaagtcaatactacaagagcatcttgaggattattgattaaagtgagatgaaatgccaacagtccaaccctaccaaaatacacaaaaataatcagcactaacatctcaaacagccttgattgtaaatatgtacaaacatgcaacttggtgttaattattactaatgttttaataaaaatatcacaactaaatacggggggctccctccctccctccctccacactatgaattttttttctccctagaaaattggatttaatggttttaacaattaattaccaattattatatcatatttggatgcatatatggcaggaagaataatcttatgctaaatatctgtcagcttgttttgtttgtttttagatagtgtacacgtttatattcacatctaaccgaatcctctcccattgatatctgaattttttgcttatgcatatgcaagaaagtaatctaaaatggcattcttatcctatattctaagttaattaagttcctgaattgggaaaaaaaaataaaaaatcacttgctccctagaactttgagggtaagattaacaaactttgtcttaattatcactattgttttcaataaaaatattaaaataactagaaaataggaatactgccgggttagccacaatagatggtgcctcatcagcttaagtttgtgcctagttttccgagaattggatggccaatgattggtcaacatgggaaaggaagtttctggtgtttattatcatgttaaaggaataggactagggaatgggggcttagagatcagtgaggaataatttgtaaggtacattttgttgtatgaaatgccaggctgtcaaacaacctggggtttcaataaagatttcaccaattccatctctattctccggtattttgtttgtattaagtcaaaagggtaaacataaaggcataacctttgaaaaacttgaaaatattggcgtcgtacatatagagcatagtagtcggtaagaattttcaggtttaataaaaagtaatgataacataaaattacataaactcaacaaccaaatttactgatgaaatcatctaggatatggtaaagaatataaagttcaaatctagcaaaaaagatcatcaattttcttaccacagcctgcagtcagatggatgatcacagctgaccaccttatccatattgaagaataatttctgccaaagggaaaattgaatcgaaatagagtaattactcgaacatgattgtaacttggaacagccaaatgtgaaagtagcacaaaggcaattaggaaaggaccatcgaattagtcataaagaaaaaaaacttgaatgctaaagttatatatatatatgtgtgtgtgtataaagaatccaagtcattacagaccaattcaccaacccaaactttgtaaaaagtaataacttagctttattaaaaccgatgactcttccctactcggtaatttcttcttaaatgttcccctaagcaaacccataagttccctcaataagttttcactggcttacttaccatcaacattgtagagttctgatcagatttcgtgctagcctgctgctcaagatatgctgcctgaaatcgaaacaggatagtattattaatattaagctacaaattcaaatagaaagtaaaacccagtgaatgatattgaatctcaacaaaggcggaggagtggcacacacatgaaagggaagaaaaaatctcagcagattgaacctctgaagcaaacagagtgaaggctcagcggcaccatacgagagcatatagttgaactccatcattattctggactgaataaccaaagaatgtcactaaagctgaatacatgtttacacataccacaaattactagagtagtaaagcttttttttccatttcaaaataggaaaagtaaaaggtcaacaaaatctggggcaacaaaggacattagtaaagcgtaccttcgctaatgtcaataaggatgaagaaaaactacgaattgcagttgctgtgtcacttgaaaaagaaaaacctagtcgagcagcaagtcttaagccacgcaatattcttgctgcattaatatttggaaagaataaatttttatcttgtaaagcaaaatcctagttaaaaatgtaacggtcagagtattctaagcatacatgggacagagaaaacctaccacagtcctctttgaatgaaacatcggcagggattaacgttcgtagctaattcacatacccaacaataacacttctttagtacatttcaaatgttgaaacagatactaatttatacaccaaatgaaagttccaatatataaatatatatatatattatatacacacatatagaaagaaaaaaacggacactcacttttaaggacctcaagtcagccattccattggcataatcatagatcatcttcgagaaagggtcaaagaataaactgtttcaacaattccacaagaaatttcacaagttagagggaaattaaactaaagtaaaagagttcacatactaaggtaagtgctttatatttgctgccatattctgatatgtactaaactaaaagagaggaagaaacctgtttattgtatagtctcgcttcaaggagttcctccagagagtaaggtcttttttcccaaagccacgtggtgcttgagaagaatgaggttctgtttttttctcagcatgtttagccactgtttcaaaactagacacctgtttcatgaatcagatgtaggaatactaaaattgaaaaataaataaataattgggtatgcagcaccaaccaaccaacctcgattatagaacctcgaacatgcaccatacatattgggaatcgttgtccaacaatgtgtgctttatgaaatcgactcctaatctataataagagatcagtaatcaacaaaaagtggggggataacaaatctcaaaacagtgcaaaattgaattacctgcttaagattagcagtggtaatgacatcaaaatctttaggtgttcttttcaggatcaaatctctaacacatccacccactaagtaggcatcaaatcctgttatattacaatcaaaccaaagcaccaaagagtataagtagagcttttctcacatatgaatataataatctgttaactgtgttgacccctaatcctattcctagctggcattctgctatgaacctaaactaagtgttagttacatgttagagctgttagtgttagttatagatagttagagttgttaactaaccattaacaactcaataaactcggtctaaggcctaaagctataaatagctaacttgttaaggcttacattaactcttagtacagattatttaaatagaaacacttttcttctttctctgtttattctgtttagagttgtgaattgagatcaagctcaagcgattctcaatatactaaaacagaaaatcaagtaacacagctgaaaagatacaatacaataaaaattccaaacttgcaacagtagaattaaagtgatgaatgaataatgagtagagtaccttcattcctcaaaattctcaatacagtcaatgcagctggaggtatagcattatggtgtatcccaaaggccctggaatccaccttgtttgattttttggtacccattaaccccactaaacaatcataacaataacaaaactactaagtgtgtgtctctgattataaaaaacaaaacaaaacaagaaatgaaagaatagatttttattgtaatgacagcataaattataatgtaaaagtgtaataaaaacaaaaccttggggggttgaagctatttcaggtagaactcctcgatgggaaacggcgtggcagaacctctacgcgaaatcagggaatttcaatggttaggaaagccattgggaaaaagcgtataaggtgtttgtgaaaatgagtgagtgagtgaagctgagaaagaaagaaaggaacggacctgttggaggaggaggcggagagaagagaagaagggtttgttgatacgttgtgtggacatcgccatagtccaagtaccatcgccgtcgtcgtcatctcatggcgccattttcagcaacgcccttacaaattttacagtatgttctcttaagttttaactaccaaatcatatgacattttttcttttttcaaataagacctaaattttctttttaaaaaaatatattttttaatttttgattatagataaatattttttttaaacgtaaaatttttattcatttgtcaaatacttcaatggaacatcacttttattgaacactcgatttgaaaaagaacaagatgctctagcaagactatgagcaactatattagcagatcgtttgataaaattaaaacttgtgaccaacacattttatatttctcaaccccacattttcaagagctttgttaaacacttccactagccacctcggacacagtgcctcgcttgtctacctgatccaccacattattatgtcgcacatcaaggcaagctccataaaagcccagttgaccttcaagcctttataccatcgatatttgtaataacatcaatatagtttaatgactaattaagttcgcttgattttcttcacgccacaacattactaaaccctcactcttaagtttaatacctaagtttaatttttaacggtaataatacctaagttatatatctggaacttccgtagatacctcactgttaagtgtcaggttactatccatgtgttattttcttattggtatatttaaattaatctttacataaaaaataaaaatttaaggacctggaccaatcaaagattactacgtagccaattgacttacacttaacggtgttcaagaaatataattttaggtatttataccgcaaattactattctataaatacctacaaatcacaagaaaaaaatacatttttatgggtctataattttttttatatatttttacaaattttaattttttagagaatataaagtattttttgattattattttgaaaattaacattattttttacattgttgttatgggaaactaacatgaaaataacaatctttattaaaataattcatgaaaatgtaaaaaaaaaattgagtttaagtactttgtataaattactagaaaaaaaaaacaattagaattatattattatgttgcgatttgtgaatgcaatggtgtatcttcaataaagtgttataatagtggtgtatatacatttaacataaaattgaattctaattataatgtataatatatgctaaatttaacaaatattaaaagttttgttgaatttaaaataaaatatagcataagttaaatttatactacaataaatatcaaattttttatttgtcatattcactcataaatattaggtttgagccggagtaggcccatcccaagttaattggaggaaattacactataatatttttaataagttttaacttaatgtctttaa

SEQ ID NO: 15042 - DNA, 5294 bp, Cannabis sativa
aatagcttttatgagatatcgctaaccaatcgcacgacaccacctctaggtggtgctagacaccactgatgcgttatagcaatggtcttatattatttatttaatataaactaaacttagttccaataatgtgcataggtttctgtatggcattgcatataacatttgtgttcgagcataatgctaaatattgtgccaaatataatatttttagtcactttaggaccgaatttggcactgacacttgcatttttatggtctaaagtaccaccaaatacacagcttttcattattgaaaaaggagcagtgtatatccatagtttgtattcaggagtgataattaaagtagcaccaaatatgcactaacttttaataacggaaaaagatacaagagcatcacaatgtcttaatttgattccaccatgataaattttgtgaaggaaaaaaattctatgtagctaattttatttagttcgacaaaactattaacacattaaagttttaccatctgaacaagttaataccactacatgtaaaatataccaaattacatttatgcaaagtttgattataatctcctgcacagtactataccatctacatgaaacatactaaagtacacaccatgcaaagatttgatattttcattctataaattattttcagcaaataatgaattttctatttattatccttaattttttatttctttatttttcttgttcagctattgcacattaagtaaatgattcacaaaaaattattgggaaggacataccataaaggattggctgctaaaggtaaaccagccaccagtgctgcaaggatgcctatacatataaaaagttggtttacagatccaagtgcgccacgaatttcagttggtgaaatctgacaccattagaatttgatattacgaaattgcaaatctcaatattttattagtgacctaagaagaatgcgatttcaagatcattacctcagatatgtaaagtggaacaatggcagaagagatgccaataccgatgccagcaagtaaacgaccaattatcatcgtctgcacactctgggctgtggcactggatgtaataaacactacttttaagtagcagttcttcagttttcatattagtgacattaactccatggggaaaagacataccaaagaaatgctccaatggtgagcgggattgcatctaactgaaatgttctagtccttccaaacttgtcagccaaagctccaccggtgaatgatccaacagttgcaccagcaagaagtgtgctcacaatccaccctacacagacatcacttcttttattatagcgaaaccaaaaattggcaaaattttattcttgatatcacttgctatgtagtggatatttattttatgggaaagattaaaagaaacaacaatataaagaaatgaaaagctgtattatggctaagattttctattcagctttgagtcaaactcttgccttgcactacagcattttctgcaattccaagatccttggagagatactcaagggcaccatttaccaccctgcctcaaagaaatagaatatcatggtaaggctcatgtaagatgaaatagtcgtaaaaagggaaaatattaaacaatgtcaggacaaattaaaggagaatgatttggtcaagttaaaataagaagaaaatatgatacatctcattccaactacgtattaccccagatgataaccaaacaaaatggctccaagacaagcaacaccaacaaatggtaaaactgttccagaagatttgccatgttgggtagaaggaatcacaggcacagaagcctcaaggtcttcttctgaatcacaattacaaccgaatacaaatatcaggcataaaacatccatggctaggaccctaacatatgatacttctacaaataatattaaagttcaagtaaattagagtacaacatatatggtcacacattaatagagttagaaacatttttatgacacgttctgagataagaaattccacgaaaatattacgaatatgcattttcgttgggttttaaagcaattttcacaatagtaatgccataaatcaatcgcaaatgcccaaaacataaacacttcaaaagagaagtaatatctataaaagatcctgaatacacagcaacaaggtatttcatataaatatattttccacatgtcaagtacatcatggcaaaacaaatcattgataactaaggcaatgatggttaataatcaaaccagaagcctgagctttgactgatctggattttgccgaagacccaaaaatgccatcaacgcccattctggcacgccccagttcaattcccatagtcgcagaattcaagctcagcccaccacagcaactacttctatctgtcatgtattggcttcttaacattgaaactcttcttctactcgtagattcaccgagactcagcgatacccttctctggtgttcagccccaaagcctactcttcctttgactgaagaatatgttgaagcttgcatctttatctgacagtgagaagtaacccaatcccaaagaaaaagtttacaaaaagtcaaacttcactaaaaaaaaaataatgaaaagaaaaacttttcaatcgagatcacagtcatattcatcacaaaccaaaaatatagccaaattaatgaactatactatgtggcattgatagaactacaaatcactaacaaagtgaaaatctacaaatcaagatcaaaaggagaaaaaaacacacacacacactgacacacacaaaagtgtataccggaattcagttgcgtaaaatcaagttgtgttcatctaaaatagtgaaagggcgaggagaggaattacccaaatgaaagattattattattctatgagaaacgaataaaccccagaagaagaatgagcttaattagtgacaattgttttctgggaaagaagtggtatattgtagtgagtgagaaagttgggaagtccgctgaaaaaaggattgacagttaaaagctttttactaagcatttgccgctatcaacattattcgtgaattggttttattctattctatcctaatcataatcataatcatatatatatttttttttttgaaaaggtgtactaatttcttttgattttggtgacgcaaatagaaatttaattttggaataaatatagcttttctttgtttggattggatatataaatatgattacgtggggattttggattagattttggggtggtggcattgtatacgtggcagtgggacagatagatgaactgtggctttttttgcttgcgtggtgctgtttctcttgcagcctgcaactcgtttctacatcactcgtacaaccaaacacacacatgccctataataattacatgtaattttcatcacctttaaaactttcatacatagaacttggagttggaggaaattgatgtttgttggaatctaattttcaaaacaaaatgccaaacgattatgtcctagtatgggtaggacattgttgtgttgagaggccgaaatttaaattggatctttttctaaaaaaataaatattatttaatttttactttgagatattatttattattaaaattttgacacaatataattaattttttttatctccatataataaataatttttctcacacataacttaactcaacgtaatatttgattataattaatagcatttttattgaagtgctatatattttagaacttttgtaaaaaaaaaaaaaaaatcaatagtatgttaaaaattatattatttttctttaatatatgttataagtttttttaaatttaagaagataaataataattaataaatatacttttattttagttatgatattcttgttagttatttttttaaaatatttgatttatttattagtattcaataaatatttttatctatttgattgtacgaagagtaatttttaaaaaactatttactaaatataatctttgctccttagtccttaccaaaaatatttataatgtacttttttttaagaaaaaccctaacaattgctataaattttaggtaatgcattgaagtcctacatattgaaactctacataatctttacaaaatttaattaatacctttaaatttttaaaacacccaaaatgtgagggagccaggtttcaaacccaacacccacacatcaacataaaatccctctcttaccaattgtgttgtaagttcttttatgaaaattattgaaccaaaatttatatatacatatattatatttttatttttatatatataatattagctttaatttttcagagcctccaaaattgtggggcctggggcctacgcttcgagtgccccaccctctggccggccatgagtatgggtacgtgcccaactgcagaatttcttttggaaatttgactattcatgcttaaaattggtacatggtgtattaatatttcactttagaaaatgtaagaacataatactccaaaaactcttaaatccaaaaataccctttccatttgaaaagtttctctcgctctgtttatcctctctctcatctaaatctccctccctctatctctaactctcaccgacaatatccaccaccattggctccaccaccccaccagacgaaacccacttgaaacctaaccaccccgacgagacccacgacctctgacaaaacctcaaccacaaaaaccaaagacaatcgtaagtcccacaacgaaatcgcaaaacctacaacataatcaagaaacccataacgaaatcgccaagaagaaggtatatttctaaatttttacttgattttaaatgggttttggattttaaatgcttaatttttaagaattagatttattttttttttattttgggttgagtttccatgtttaagattcaagatctgccatttcgccaattatcaacatttagcgacgatgttcgcgatgtttatcgatttcttttccagatagcaaaatgtagcagttgtgtatgttttttgcgatttttcacaacatcatgtgatttctatctacaacatgttcagtcttgatgttgttaatattgtcgctagatttcgttaaaattaattaaaaacaattctacatacaaaatttaacttgtgtcgcgaacatgttgcgaagatatcgctaaatcgtggactgtgtataaggtattttgtgttgtatgtttggtatctgtattgttgtagttggtgacatgtgacgactcgtctgtcgacatgtcgcgagatatacctaggggatgttttctacatttt

SEQ ID NO: 15043 - DNA, 10190 bp, Cannabis sativa
  modified_base (3607)..(3607): a, c, t, g, unknown or other
  modified_base (8332)..(8343): a, c, t, g, unknown or other
acctacacagtctcagaatcaacctacttgaccttccccagacggtgtgggattacacagcttacccagtattttcccttacggatcacgggactactaactgtcacactgatatgcaacatgatatgttagtaatgtagatatgagttaggttttttttacacggcacgagcccaatagacacgagcacgacacgatatgaaaaaaaatatgaacttaggcatgacacaacacaaaaaatatagacttaggcatgacacaatacgatgcgaattggcacaacacgacaaaaagaaatataaacttagacacgataagcccaaaaacacaaaacaacacgaatagattatctcaaaagcacaatacattaaaaaactcgagaatttgatattaataacaatgactaatatttattaattaaaatgatagtaatattgaaattttaataattttttataagattgtgtgtaactattgttgagaaaaatgtaaaagtaattaaaactatgaaattcacatatattttagtaatcaactcatcagttttaataaaaattcaaatatataaagcacgaatttgagtataaaacgagttggtctatttaagaaaaaaagtgtgactcgaaagcacgacacaaaactactggacttgcgggctatgatagacctaccctaggggtgttcataaaatatccaattcaatttaatctaatctaatcctcaaagtgcagattgaattgaattggaaaatccaaaatccgcacttgagtgcaaattggatgttgattgacatataaaagtaaccgatctaatctaattcacatatttatatatttttaaaaaactatatatataattaatattttaatataaataaaataataacttaaaaatttagtacatataacacaaataaatttaaaaatttaatagatgaatgtttattctattaatatatatataattttgtttctacaaacatttttttccctttaatttattatttattatttaatttattttagttttttgttagagtcataaaaaaataatataatttattttattttaatattaattatgtagaaatgtatattttttaaataaatattaaattatttgatattgaaaagtaaccaatctaaataactaattcaatttgtacttttggggtattatattagattgaatttgtttaatttgcaaattaattggatccaaaatatatgaaatttgcacattgtgcggatcgggtgcactatgagtaaaatagtgcgaattaaattaaataaatacccttagcctaccttataaaattgttgcacgacacatcacgatccacatttttttttgaggaaatttacattatatacccatttttcattttctattttaatttttacctttattatattactcttaaatttatttctagttttataagtcatgtcctcattatgtgcattaggaactctaattttaataaattatgcgatgatatatttgatactttgattataaaaaagagtatttattaattaaaattattttagaattatatttagttaatgtgtaataggaaaagatagttttcaacttatcctcatttttttaatgacacagtacaacataacccatatatttttatgatccgataagatactaccgtattttaaaaagccgaatcaagctaaaacggtacacatatatttatactcatattttgagtaattaattttttacttttaaaaaaaaattacgcccaccttaaaacttaattttgggtctactatgattatttctttcttaatttaattttactttttcacgacataataccaatattataccattattttgttagctagccaaatgaaatgcaacctcactttataagataagaaacaaacaacttttaaaataatgacactttatttgtatatttttttgtacaaattaagctagatggaactgtcgaccaaatataatgaaatttaataaatgaccttatattatataatgtactagtgacatgtttcgttatattatatattgcatgacatcaattttattaggtcttgtttggttcgcttaagtaattaataataataccaactcaaataatatctaatccaatttttagggttttcgtatctccatacatgcataaagcatttttatgtatttggtagaactacactaataaaaaggattaatggctttaatgtctccgatttcttttttattattattatatataataaatatggaaattaaagttgccacttataaaagatgataagcaattattactcattttgaaacatattagtgccaaaatttgagtgctaaatggtgattaattattctaataaattaattagaagatatgtttttttttcctttgataaattaattaatttattaccatagttgaaatacttattatcatgttttattcttcatcttaatttgcccttgttttctgcatattgatctcgtgggaatggaattataaattcttgtgtagccttattcaattaattttaataaaagttactgatattttatattaaaaatacgagaattgttaaaaaatattagtatttagcatcattcttaatattatactgttattgatataattaattgccgtcccactaagttttaaaaaattaatttcatgacataattttgtacagaaaaaaaaaatcagcttttgaagctgattttcatcaaaataattttgagtacatgattactaagcgaacttatgtaaaatattttcttcagtgtgcaactgtgcattaactatataaatatagattttgatttaatctactaaaatgatagtacaataatttaaaaatcacccaccttccttttttaattaaataagatagttatctttatatcatagtgcataaataaacaattaaatttaaacctaaaatattaaagcaattatattttgtaaatcataccccacaaataaattgtggcttcaaactttaacatataccaaataatcatattttctgaattttcattcaggtcggacttctattagtataattagacaaaaaatcttaaattcaacaattttaatagttttttttaaaaaaattaacgaccttaaaagtttagagacataacttaatacatgaaaaaatttaacatataaaaatcttaattaacatattataatgacaattttatttttttatcttctaaaacacatttttgaaaatagaaattaatgccaacaagctttaattatatataatcaaatacattaacaataaagttcatttgccaaaatttgatatccaaacctatgttttagtttatcacactacaaaaaattttatttttcgtcaaaataaaatttgtaactaaaagtaaaagaattacgactaattataaattattatttttatgttgtgattaaaaattatgtagttaaaaatattagtcacaaaaatcacaatttgttaagattaaatgtatttttagtcacaataattattgtgactaaaactaatctaataacaacttgtagctaaatattatgttttagtcataattaaaaggctaattaggattnttgccccctgaactttgacatgtaacaaatcatgcccctgaacttttaaggtcattgaaaatcctaaaattatcactaaaaatccaaaagttcaagggacatgatttagtacatgtcacgtgtgactaaaaaattatcactacaatatttatttttttgtgtaatatcataaaaatatagagtattgctattggacactaatggtacctagcaccttttataggtgagtcctatgattggttagcaatattctctaaaaattatttttttaagttatatgtaattccttactcaattataccaataacaataaaacatcgagtaaggtactagacaccaataatactttataataataaaaaatacatgttagtgaataagggattttctctcttagggttgtccataatatgagttaatcattaagacatgattttaatgttaattataaaaaagttcaaattaattttgtattttaataagttaagttagtgaagcgggaaattataatgagagttaaaccaaaacgagcggcgatcaatgcggtgggtaaattgagtaaattagtcaaaaatatatgggccaatatcttccaaataataaaaagtaaaagggtataaaggaaaagaaaagccaaaaaggtggcagtttcctaggtcttcacgaatttggattattaataacaagaattaaattacaccaaaaaacaatttttatttctatttttttcactgcttgacaaaaaattcaaaacataaattaaaaaatcataataattaattaatattaataaaatgttggtggcagtctatgggtatggccctagtcagacatggtctttatattgtactaaatttggacagagcaaaatccaagttattgttctgtcaataaaaaagaaaaaagaaaaaaaaagaatccaagttatgtttattctaaaacagggtagtccttgtaatttcagaccaaatgagaacaaaaaaaaaaatgagaacaaaaaaaaagataataaaaaaattatttgcattttataatcataaaagtacactcaaatgttaaaaaataaaaataataattaagtttaagaaatcaatcttaatatttttaattattttgtgtttttgataattatattttttaaataatgcattttttttaattttatttcaaataaaatctcatatattttatgtatatatttttcaaaaatacaataaaaaattattactataaatgaaatataaggtgtaaataaatcctgataaaaaattaccaaaaacatttattttcactaatatacatttgcgtgatgtatataaaaaaaattgtgtcccaaaacgtatatttaggtcaaatacatacaaagacttagtatacgtataaataacattctatatttagagagagaaaaaggtaaatacccaaaataaattaaaataaagagagataaaaacgagaaagaaacgggtacttttagtatagggccacggacactttgagccctcattcaatgctttacccaactcaccaccctttttccttcttcttcttccattttcactctttcttcctctaaacccttcttcatttctgctcttatcttcttctctttctctctctttttcccactcaggtttatatgttttttctttaataaagtttcaatctttctttcaaatttgttcaaaagactcagtctttaaatatatgtgttttagttgttgtgttttgaactttttctttggttgggttttaggtttgaaacgaaaatggaatgcgttgaagggactttcaagacaagttttgaagagaatggtgatgatttttttgttgatgaccttcttaacttttctaatgaagattgttttgttgaagaagatgaaccagaacaagaaccagaagaagaagaagataacaaaggctttgactctgtttctccttctctgttaaacccaaaccaaacagaagaacaggataactctatcccggttacaagtaccagtttttcaaccaaacaccagtttggccctgtaccaaacaacaacaccacaactgaactctctgttccggtactttttttttttccccaaacataaaatttctaaataaagattgtttttttattgtttttttttttttaaactaaaggtacgatttttaacaggtggatgagttagccaacctcgaatggttatcccatttcgtagaggattccttctcagaattctctacaccataccttgccggtaccggaggagtttcgtctgagaatcccaaaaaccagactgaaaaaatagcaccggaaccccaaatggttactataccggaaaagccctgtttcagtactccggttccggccaaagctagaagcaagagaacccgaaccggtggaagggtttggtcaatgggttctccttctttcactgaatcctcctcaagttcaacctcatcatcttcttcttcttctccgtcaagtccctggcttttgtaccagacagtactgagtcatgacccggccggttcagtcgaaaagcctcaggccaaaaaacccaagaaaaagttaactcaggttggccacgcaaccaacccggccaacccgactaacccggccggtcagccatctcggcggtgcagtcattgcggggttcagaaaaccccacagtggagaaccggtccacttggggcaaagacactctgtaacgcttgtggggttcggttcaagtcgggtcggttactacccgaataccgacccgcttgtagtccgactttttcaagcgagttacactcaaaccaccaccggaaagttctggagatgcggcggaagaaggaggacgtccctgttgccgagtctggttttgttgtaccaagtttttgattagaaaaagaataacattctagtatttaggaaaaattaaagagagagtgatacggcattgaattcgggtcgaataggttcgaattagtgtacattatttttccacggtgggtgagaatagagattaggttcttcttaggtttgtagtaactgattaattattaggaaaagactcttgtatttttattttttattttattaatttcctttttttcagttattttttactacctttaatttttgtatatatagtggggtttttgaaacagtccttgggtcgtcacacctttaatttttggtaactgtttttattttcttttaacgcaaaaaaaaacatcatgtgtatacagtacacgctcacttatttaattcggagaatctccaccgtcggattgaatctaaatttttagtgttaggtttagtctttatatattgttagtaatttacgttcaaattccgatgtgggagtttttagtcgaattggagattttaattggttgtggggtgcgtgtgtccttttttcctttggttcttttatcgatgccactccttgtagattttgatgcttttttgtactttggggttatttctttgtgtttggaatttactcaattttatagacaaaaaaaaaaaaagaaacaatgagagttacatgacaatacaagggataagaatatgaaagtaatttgacattatttatcattaaagggcaaaatggttaatttagggtttttattttattttattactttcttggttaaagtttagtgtaagaaagctagtaggtgggtggaatcttttactataacttaactaatgtcagtctggggtggggtctattagcatttacctgcttctgtagcatttatttggtacttattcatgagtgaattctcagtatatatatgcatgcgctattttaagcatatttaaattcctattaaggaagtactttattaccaaatatccctaagttaaccacacgtaaaatgttatactattaggatgtcattggcatttgctctaatttaaaattattagatttaagaatgtgattatttatatattaaattgtgtttttttgaacttttctttatcttaagtgcccactgttcgttaataaaatttaatgaaaatctttaaatttaacagttttgataattcatagattttttaacaactttaaaaaattataattaagtacacaatgtcaaaattcgacaggaaatctattaatctatctaatccaagactactttttgctcacgaggcagctagtgtccaagaaattatttgtataaactatttgaaaaattatcttatacataagtactaatcaatattttgtattagtcattgtgaatatggttaatcaatttcagagattaagttcatgattattattattttattttatatttcttaagacaaaaaataagaagaggattaaattataattaaggctaaaaaaatattaatggtgtttagtatttttgtaagtattaaatcactattggtgcaattaagtatattgagttctataaaaattaatctaataatatttagtctaatttagatttttgtcccctgaactttgacatataccaaatcatgccctctgaacttttaaagtcgttaaaaatactacttaaactattgagattgttagatttaaggatttttgtctaattacatacaattttactatttcagtgattgtttatgtactaaaccatactctctagacttcgatatttatcagatcatgcccctcaaactttgacatgtacgaaatcatgctctttcaactttcatctatgttagacttttttactaaaattagacaaaannnnnnnnnnnnaacaatctcaatagttcagagaatatttttaacgaccttaaaagttgaaggagcatgatttgacacatgtcaaaatttaaggaacaaaaaccctaattaatctaacatttaatattactaaccaattataagtggttactcataaataattattcgtcactaataataatactcataaattatgatgggatgtaattaagtgatatcgaaatgcgaaaagcaatggtatgcgcatgccgtgtgtagccatttgtctaataataagtctgcgtagactttgcatattggttcaatgagtcaaaaattatataccccaagttgcacatatctatgtacttatctctatttcatacatttatttatttatttttttaaaaaataataaatatataatttgtaaatatctattatgttcattgagatacatagggtcttctaagtatttacaactacttatcattgcactaaaacttaaagtcaaaagtaagcaaaattgtaaataattagctacaaacatttaataaatttgtttactttattgtatagtaatagtagtagtaataactaacaagctaatatattttaacaaaactgtgacaggcaatgattattaatcttggttttgtgaaaaaaaattaacataaactaattatatttttcacacaatcatgtgactctttgcttagggctaccggtactactctaggcacgtgctcttcccataagaattaatttactatataataatatcctacatatttatgagtaataaacaaaatatataccaaaatatttttttagttaatcacacatacaatgcagaatttacagtatgtaagattaaaatattgtgcttacataaaatataaaaattaatttgaatattattaatttaatcatgatttaatattcagagaaatagttaatattttaactaaaaaatatgtattcaaatatattttttatcaataacaaaattataattaaaaatatttgtatttattatgtattaaatttggcacacaatattattgtgtgaaatttgatacaattttttatttatattaaatttgacacaaaatttaagacgagagaaatagttttattttttttttctaaaatactaataatatagtactacattttttttttgtatattttcttttttgtgcatggtatcattactctccatatctatttaatttatttatatatatcttctttttttttttaaaaaaaaaaagaaagagagagagaggggccttgtgtatgcagatataccaaaatcaaaccaaacaaaaaatgtcgatatacataagaattggcaaaatatgtgggcaaattttcatgtttgccccacccaataccataattgttgagtggcaattacgtgatggacatcttccaccagttccaaccactctccaacctccaaaaataaaaaaaaaagttattagggttttagagagattaattataattatcattatatttgtaaaagtcatattagttatagttttttactttataagcatattgctgaaggggtaactattttcagtccttttttcattccaaaacataaagaagatgagaaaaaaccgttttgagtaacttttttgtggtttattttattgggcaggccattaacaaaagaaggaaaaaaaaaaaacaacaatgatggtgtttgatagagatatatggtgtaacaataatttatatttatatatcttttgtgaaattgaagaaaatagtcaattttttgggccggcttttcacccaaaattattagtaatggtgtgtggagtagtggtgtggcatgagaacaatcaaacaacattttagta

SEQ ID NO: 15044 - DNA, 5125 bp, Cannabis sativa
tgcgtatacttgcgtagtgtttataatttttagcaacatggggtactagtatgttgttactagccaaagggtaatacttttggctaatacttaagaatttttttggattttagttttttagtaatattgagagtgtgttaaattctaagttgtatattaatttgtatgatgaagattgtcatttaatatacttttgttttttgatttggtgttgtgatatttttattttcagttttgctagttctggcgacaaccattaataatgggaatgtgcttttcaatgtgttgggagtgctgtttgaagacgttatagttttattgtctaaatttttgggagtagttttgtcccatgtgattcgtgttaacattttagcagcccatggtatgacaaagtatgtttttctgttagacgatgagctatcctagttcgaagagcgtcttacgctaattataaatttttgtattataaatttatgagtgattctaattattttataaaaaaatatagcttgattttaataaaacaaaacataaaatactcaatcagtattttaccaaaaaatccaagggcagaacacaacacatattgaataatttttttaattattattattattattttacaggtacaataatggaagaagagtggagaaaaataaaatggctgcaaccagcactatgattctgatcaatagctactactactgctctgctgttctgcaatcttattttgttcagagatctctgatgttttttaggctgtggacaaaaattcatcacatccacaatttcccatcttcaattgaatatgagaggattattcaattttcaacaacaataaaactatttaataaaaaatgcatttttgatcttaatatttatatatatatatttatataaaatcactttttttcgaagcattttttaatatgctaataataataatttgttttacaaaaattaatttgttacccacaatgttttaatattatatttttgaaattagaattattaagaaattacccttatttttattattttaatttttatattttcattatctgatgaattattattttcattttagtttcataaagtaaagatagtattataaattttttgaatgaaaaagaataggttaattaggatttttgttctgaattttgacatgtactaaatcatgttctttgaacttttaaggtcgttaaaaatgccttttgaactattgagattgttggatttatggatttttttaacatggatgaacgttcaaggactataatttagtacatgtcaaagttcaaatataatttggtagatatcaaagtttgggagcatgatttagtacataaataatcactgaaatagtgaaattgaataaaattaattagacaaaaatcttttaattcaataatctcaatagttcagagaccatgtcaaaattgagaagaaaaaaattctaagccaaaagaatatcataaacaaataatataatgataacaaaatagataaagagagtctttacaaaagaaatgatatttttagacttaaaaaatagttaaatttaatatttaattccttttaaaaaatatttaattaaattttttatttgaagaagatagtaaagttagagctcgggacagtgaatcagtgatattaacaaataacaatcagaaaaaagaaatagtcaaagaaccaccgtcgtctcgtcaaatttttaaccccacgtgatcatccggcttcacatgcacacaagaacacatcaaaacaaattaaccccattatataaaaatgttatttattttaatttttttttgtttattttatttatttataaatacaagcaaaacagagccaaaatccaactcactcccactgcactattttcttttacttcctttcttgtttggttctttttttcttcctttttttttcaaactctgctgcttttttcctcacaaaaaaaaaagcctgctgctttttatacatttctttcttcttctcccctgtctgtaatggcttttctctgttcccaatcttcttgttcctttcttgggtcttgttttgttcttctatgctgggttttagcccaatctcacatagcttcgtcagctgtgataatgagcatgaggaaccacaataataaccatcaccatagaaggcaacctatgttccagaccaaccaaagcagttgtgcattgttcgccgggacttgggttcgagatgaaagctacccattgtatcagtattccgattgtccggccattgatgctgaattcaactgccaaatgtatggtcgcccggatactgattacctcaagtatcgttggagacccctcaactgtgagctcccaaggtgagaactttatgggcttgttttgatgggttttgaggataatgaagtgggtttgtgttggtttttcgaaagccatcattattgactttggttgtagcgttttcatggtaggttcaatggggttgagtttttgctcaaaatgaaaggaaaaacagtgatgtttgttggtgattcacttggacggaatcaatgggagtctttgatttgtatggtttcagcttcggcgcctggttcacagacccaaatgaccagaggggatcctatctcgacgttcaagtttttggtaagatttcattttttagatttagtagaaatatatatctgaatgcatttttgattaggaacaaaaactagtctaaacttaacgttttaatttaccttttagcccggtagcggaccaatttaatgcccccatgtaatatcctttctctctattcgttttcaatttctgagaaaaaaaaattgtgtcagtctctcaccagagtttccaatgctcaatatacatatatatatatatatatatttattggaaaactcgcttgtttttttttttttcttttcgagaagaggtgtagcaacaaatttacatacttccccttctattatctcaatttttaatgattgtacaattcattcatcttaagaaaaaaaataatgaagaagaagaagtgcagagttcctatgctttcgtatgcacaaaactatgacaacgtgttgagggtcccacatctcgcaaaatggtataatgtttactgttgtcaataatctttaagccagttggggccaactgcgaaacactaaaattgtccaaataaaaaaagtaataaaaagatgcgaaaactattacaaaatgtggatcagaagagaaaaggggtttattgggttttgttttggtatgaataattgtaggactatggtgtgtccttgtcatactaccgagccacatatttggtggacatagacatacttcaagggaagagaattctaaaacttgacgagatctcgggcaatggcaatgcctggcgcaacgccgatgtgctgtcgtttaacaccggccactggtggagccacagaggatctctccaagggtcagtaaactttgtctcttacctctaattatgctttacttgctacatgttttcttttttgattccattgttctttaaggacacgtacatttagcttagttaaatagaagaggatcatctatgtcattatagtcctgtgttttagcttaattaattgttgacccttcctttaatactcattcgaattaaggtcaaaatattatcagtaaaagatcgatgtctgtctcagatccacatattttcaaaatcgatgatcccgtacataaatctaaacacaacacaacaacacattgtttcagaaattattttaacaaacttaatggaaaaatgggagaagttttggaaaatggaacatagcatttatctaattaccaaaactcttttggaaatgggattttggtgggaaagaaaaatgtagaaaaaaagtgaagaaaaaaaaaaaaatcaatttatcatgtttatttgaaatttttggttgaatcaaatttagttattttcttacctttcttttcatcccaataattttttcattattattttttatattccataattttttccttacatttttcttactttgttttccgatcaaaatttaactaaggttatgtttgattgattggaatggaatgagttttcctaaagagaatccattcacttctttggtttgctatttataattgaagaacttattcttttggaattgtaattcatgttgagataggatttgtctttcctagacaaaaaacaaaatgagttgaaaagtgattcctttccaatattatttaaaggaaaaatagtgacataaatattttaaattttaagtttgtaagtagcataaatctaataatttttttaacggtataaatacttaatgtatgtacaatttcgttttgaatttattatgaagatttagaagtaattaatactataatgttcttttcaaactcaaatgatttattatctaggtcttatatgtgctttgtttaacacaataacgaagtctgtattgaagaaacttgaggataattactttacaaatattagatatttttgccgtttaaaaaattattgaatttatgccacttacaaatttaaaattttgaatacttatattgctatttaactttatttgaattatgctaaatctattccatttcccaaatgtaagaaaaaatttactttagaattttactaattagagctttaagaattagacgtaaataattatatgatgattaaattatataaatgatatttatattaatatttaaatataaaatacataattagctacttgttaatatgtaattttattattttattttttattattagatctaagaaaatataatcacaaattgatacttaaatttatatgatttatttgtttaatttgtaaaataatagtagtttgataaatcaaaaattactagaagagtaagaggtaatttagtcaaaataataaaaatttcactccattctataaaataccaaatataataatctttattctgtagtctttactaaatagtcattctattcctattcttgttactattctccattcccatttcatttttattttataaccaaaagtcattgtattgcttttattagttctaatcaactcaattgagttctaagtttctttctttctttctttatttttttttttttt

SEQ ID NO: 15045 - DNA, 7578 bp, Cannabis sativa
agttatagtgtaattatatggtcagaaaaacatgtcaaattgtgtaattacctctaattacacacaaatttaattacattgtgactttccaaacgcgctcttattatatatatatataaaaaaaaaaaactcaaaaaatcaaaaaataaaaaatttaatgaggtttcatcaaaacgctgtcgtttaagttctcactccttaaaagggcttttattcatcaaaggggggctctcaaatatccgcaaaaccctttggtgcgaagaaagattgttttcccggaaaattaaaagtttccgagaaaatgacagaggtagcgggctctgtggtgcaagaagtgcttggccgaagggccgtggatgtggatcaacctattatggactacatcatcaacgtcctcgccgacgaagacttcgatttcggaatcgacggcgaaggtgcttttgaagccatcggtgagcttctcgtcggtgctggttgcgtcgatgacaccaccgaatgtcgttctgtgagtttcatatcctcaattacctttttggttttgtttatcagctaaaaaatcattcgacagttgaatattttacttgaatttgctgaacagtaacagcattgaattgatcctattacgctttcgattttcatatattgatattgagttcgatgccagttaatttgttttggagtgttttgtaaaaatagtcattatgaaattttttgttagacaaaattattgccaaaaattacactatatggttgcacagtgtatatatggttgcacagtgtaaattcaatgtggttattttgctaatttaacaattttaggttgaattcatggaacttgtgattcattattgattttaatttttgtttgtaataggtatgtagtatattatctgaaaagtttgggaagcatggactagttaaacctaaaccaactatgcggagccttgcaacaccttttagaatggatgatggaatggatgaagagcaagctccaaaaaagaaggttgaagtttttgatggtcctctgctcactgaacgtgacaaagctaagctagaaaggcgaaagaggaaggacgagcgccaaagagaggtaaattttaataaccattatggcaaaataacaacaagatgaaagaaattagtagtttgcaacatattaggtgtcatacaattaaaaaccatatgttgagcattgctgattatttgattgatgtttcatatgaactgcgtcactatcaaaatatttgtttgataaggtttttttaatcaatatttttactaatttttattatttaggtggaataccaaatccatttggcagagatggaagcagctagggaagggatgcctgttgtgtgtgttactcacgacaacagtggtggatcaactgtcaaggacattcgtatggagaatttcagtgtttctgttggtggtcgggagctcattgtggatggtgaacttacactctcgtttggaaggcattatggtaagtttgatatatgttgttggcattgtaataatctttatttcatcttcattttagggagggtgagcttgttgtagaaaggaaaaaaaagtcaccttgcatcagtcttatggtctctatttaaaggcaattgtaaatgatataatcttttatccattcattgtaattcgttatccgactttgatgatgatgacatgtttttgtgcaatttttctaggtcttgttggaagaaacggaacaggaaaaacaacattcctcaggcacatggctatgcatgccattgacggcattccttcaaattgccagatattgcatgtggagcaagaagttgttggtgatgatatatcagctttgcaatgtgttctcaactctgacatagagagaacccaactcttgcaagaagaagctcgccttagtgctctgcaggtgaatatatattttctgttgttgttttgtttgtgttaatttatcctactttactttggttgatatttttagttgaattgatggttctatgcccctttttttggctatccttcattaatttaagagagacatggacttggatgatggaaaaaccaatggaggagcggacaaagatgcaatttcacaaaggcttcagcagatatacaaacggcttgaattcattgatgcagattctgcagagtctcgtgcagctgccattctcgctgtgagttctgttttggtggttgaattttgtggcttcttagttctcttgacatattgcgcatgctcttttctgaaatttagtttgctttatttgatctgtaattagtaaaaaccatgaagaaattatgttttggcttctttttctgattggtgtcgtgctataaaaatattctacagggtcttagttttactccagaaatgcagctgaaagcaacaaaaacattttctggaggatggagaatgcgaattgcccttgcacgtgcccttttcatagagcctgatttattgctactggatgaacccacagtatgttatgtgcattataagtacctctgacttcattcattttgttatttgtaatctgtattgttatttaccaagtactcttgttgagctgcttgccttactctttatatacctgcagaaccatcttgatcttcatgctgtgttgtggctggagacttacctggtgaaatggccaaagacgttcatagttgtttctcacgctagagaatttttgaacacggtaattatctttgttatgccttccaagctttgtatgggaaataattgtgtcttattcaattttcctgtatttacaggtggttactgatattcttcatctacaaggacaaaaactgactgcgtacaagggtaattatgatatctttgagaggacacgagaagaacagataaaaaataaacagaaagcttttgaagcaaatgaacgttcaagatcccatatgcaggttgttaatcctttcataataaaataaatatgattatgctgattgttttttattatttagggttagatatctgtttttttaacattgtctgcattattggttgtttccacgttaatgcttgctttggcaccgagacagggtgatcaattgtttattgtcaaagacgtatgccttgttaataacctttatctctgctcattgtcaaaaaaaaaaaaaaaaaagaaaagaaaagaaaaagagaaaaacctttaactctatctgaactctgaagtatgacacacagaacatttcttctatacattttggtttaactgattctgacttctgagtggcagttaagtcagattttgtatcttttgtatttcattggtaatttcttttggtatttgatgcttcgtttcttttacttttctgtaattcatttcactttgggatcttcttgtatcttagttggggtgaagtgtgattttctgattcactgatcatttgctcactattgtggatgcaattaactaagctgttactaaaatcttgttatttgagatcatccttttctgttttttttttttccgctagatttttcacgactcgtatttgactaccacatgacctttttaacactgcagacatttattgataagtttcgttacaacgcaaagagagcatctcttgttcagtcaagaatcaaggtagacctgtcctcctacattgttgttttgtgatttaaagattgctttgatctctatatcctggatctatttaactctttgccatttatttattttttcattatattactttgtccttgcaattcaattaatgttttttcattaaatgctaggcattggagcggatgggtcatgtagatgaagttgttaatgatcctgagtaagcacctttttcttttggatactcaacgttgaatttcgaagaaaagctgctacatccaaattttcatcaacttttcttccattgttcttttcttttatgtttcattaatctttagctgtccttttatcccccctatgcagctataaatttgagttcccaactccagatgacaggccaggtgcccctattataagtttcaggtttgcaactcatttttctgagtggttacatttatttattgatacctttttggcctttgggttgaagtgttgtaaaaaaaaatcattttctgttatttctcctgcttccagtgattgtgattcatactggctttatttttcttataataaacaacctcaactagccatgttcttgataaacttcaaaatattgaatcctagtagtcatagtctggtttaagataccatgtttgacttgattaacctgcgatgttttctattcccatggtctcacttagatcaagtgcttataatcttttgatgtgttggaaattatttgcagtgatgcttcatttggttatcctggcggtcctatattgtttaggaacttaaatttcgggattgacctagacagccgtgttgcaagtaaggaatcttgttgaagtggatttttcttttatttatctttctaaattatctaggaatgcagtagacagtttttatttatttttaatgttattctgcgcttgtaattgataattttcacgtttgtgggatcttccaatgtatgctgcatatatttatgcgatagaaatcaatcataaagctgatatttatactcagtgtgtgtgtgtgtgtattcgtggtaagtttgtttgaatatatttgtgactcatatcaatctttaaggtgatgttgacacataggagtgtgtgtggtgtgtatatgttttcccactgtgtatttgcatttgcttatttgatataaaatcaatcttaaggatgatgttgatccctacaaagctcatggttggaataatttactgttgctagtgtaatcttaacatttatgtctttcaactagtcaactttgtaagttcttctatttctttcccaaattcacttctgggtttcaaaatcattttgcagtggttgggccaaatggtatagggaaatcaaccatactcaaactaattgcaggagagctacaaccaacctctgggacagttttccgctcagctaaggtttgatcatttttccgtcaactgctttttgtccgctattattataaatagcaaccgaatttcatattttaattgaaatgcgattgtgttttgttgatggttgatatctttgaaatataagaggactgctggattcataattatcaagctatcttgtttcccataaataaataagcatatataattcttaattaccaatctacttgtctgattagcaacttaactcattagacttgggagttttaatgctttaatctgatcaccatattgttcattcaggttcgtattgctgtcttcagtcagcaccacgtggatggacttgacttatcttcaaatcctcttttgtatatgatgcgctgctacccagtaagtttttgttaacgaaactacttttcttccaaagctaacaaatatagaaagctgttcttagtgttgctccatctctacttttccttgtatttcaaatacatgttaaccttagcaatatggattttctgatagcacgagaaattttcattctcacctagcaaatttttagctcattagaaaatttcatgctagaattatcgaactttcaatcaagggaaatttatctaatgaagtttatgtttattcttgctcataattcctgcctgaaacattctcactttgggttgagtggtttttgacggagtttatataagcacttttctttctggtttgaaaacaaaatctctcttctttcagggagtgcctgaacagaagctccgaagtcacctcggttcatttggtgtcacaggaaatcttgcacttcagccaatgtacactttgtctggtattttcctttcttaacttctgtttactttaaaaactttatgtaacttgtattttaccctcggcctccagcttttgacaatggtcaacatcctatatatatgtttgtatatgattagtagctcttttctttttattatttatctttattttaaaatatttaactgggttgcacatccaatttgctcaacttaaatattaggtggtcagaagagcagagttgcatttgctaagataactttcaagaaacctcacattatattacttgacgagccatccaatcatttggtaagctacccctttcttctttttatgtttaatgctcttcgtgggctactcggtttggttctttgtttttcgagcaaagccgaactatcaatatatctcgatttaagttagccattttagtctagaaatctcaaggtgtgcttgccctttattggctaattcatttattctgtatatattgcaagaaacaaacaatattatctccatctattacaattttctcacctattgttgttgaaaatgtaggatttggatgccgttgaggcactaattcaaggacttgttcttttccaaggaggcgttcttatggtaatgatttcaaaacccgattaataaaacgtctataaatctaggcaattttacccaagctttaggttacaaattgtgtgtgtgtgtgttttggttaaacaggttagtcacgacgaacatctaatttcgggaagtgtggaagagctatgggtggtgtcggaaggtagggtgaatccattccatggaactttcaacgagtacaagaagattctccaatcttaaaacaagtaaaaacttactcaaattttcttcttgagcaccatccttttatatagttttgaatcttttacaagtcttattatcacttgaggaatcattttttattttattttatttatatctttagaagaaggaaaaaaatgtgagtatattttggattttgaggtatgataaagctttatcttttccaatttaatggccatttatatgtatatgaaaaaattagtatggcatttaatagaactagaagagttattaaatgccacaataacaaaataatgcaaaatttgcctctaagatgaatgaaataagagatttattttctatctaagcatgtttttattaaaaaaaaagaaaagaaaagaaaaaaaaaaaaagagttacactgaaattgagaatataaataaaaacttgattagaaaatattttcctttatccatatacatatttatacttaattagagttacaactttttcggattgtcttcgttttgtcttcccaataataatgacgtttgtcatattgagttttgtattgtgcttaatgataatacatatctcttgtttgaaaatctttccatagtttatgttatattatttgatagtataataagtataaattaaaatgtaataaatatattattatgagaataatatatattaagggctagtttggcacaatttttgaaaaatttaaaatttattttttgaaaaagttgtgataaaaaagtgtttagtaagctattaaaaaataatttattgaagaatttatgaaaaagttagagttaaaagttaaagctggtacaaacttaacttttagaaatagctcttttaattaaaagactgtataataaattattgtttttaaaagggtaaataccattttggaccttgtgttttacaaaagttactaattggaccctctgtttt

SEQ ID NO: 15046 - DNA, 7035 bp, Cannabis sativa
tgttgatataatgtgtttattaaaatttaaatacaaatttataaataaaaatatgtaagtttattatttattatttatatatttatatgtttattatttattttaaccatatatagtttgtatataaaattaaaaatatatttctcataattgataaaatgtataataaattgtaaataattttttatgtacatatattgtaattaagtactataaagttataaatttctctttaattaaatttttttttatatatatattttcatatttactctcataaaatattttctttttcaattttaacatcatatattttcatttttgtctttgtaaaattataatttccattttcattttagatatttttatatttattctataaaaaatatttttattctcaaatatttatttatgtcccaaaagatttgtattttttttctataaaaatatataatatttttattaataggccatttttgcagaattatttttgacctcccataacagtagctccgcattgcttgccagtatacttaaaatggaacaaattgttggaaatggttcaaaaaaataaaaaataatatatggtttaattatgagtatttttaatgttcaattattataattattttggcaaggactcattgtcacagttacatataataacatcaaattttcatctttctgtgcaggtttttgcacagtaatagaaagctgaaccctcttattatttgttttttagtacaaatatttttgagtcccattcccatatatcccattactcaaaaacttgcttcttttatttatatatatttattcatgactttacagctggacacataaaacacactgaaactaggttaatagtggtctgacaatttaatggtcctttctctcttcttcctcttcttccttcatcatcagtcctaatccaccaaaaaggttaaaagggaaacctatcaccacatactctgcaacaaatttcccactttggagaaaattttgaattcatcagacttcacagagtgttattttttgaaaattttgtgccaataaagttacaaaatttggcaataaattttagtgtttatacatctcacctcagagtctattgtttgattatagtgcatgcatgagtaatacttcaaatcatgaaatttttactaaataaacctaaaatttgaagaaaacattacaaaaccatgtctaacactcaaaaaattttgtttttacttttttatttttttatttataaaaatatatttttagtaaaaataataaaccgtttttttttgttttataattgttataatgttattattttcaggttgtttttgattattttatagttttcttaattgatgtatagttgttataaagttaatttttcattattttcttactttttgatgatgagaaaaatatacttttgtaatttctaaattttaaaagagtattttataatttatttattattattttttttttttgaaaaaagcgttcattgataaaaaaaagtttgacctcattatcattacaaaataagtctttcggaatagaaggaacgtacaaaataagtatttttgtaatttttaaacattaaaagaatatttttgtaaataaaaactttaggtcgtaataaaattataaatgaaatgtgcatttcgtaagaactttttaatcattttttaattaaaaatgtaaaaatatcttccaaaaatatattttataaaattatttttatttttgaatttttaaataaaaattttgaagaaaaaaaatccctttcaattctttttaagcaattttttcttaattaatattttcaaatttgcctcggacctcaaccttgggaccaagacccagacccctatcctgaatttcaaccttggccccggaccccgaacaccggccttgaccctagagcccggccccgacgtcggactcggatcccgaccttgaccccaaacccaaacctccacccagatactagccctgaacctcgaacccaaccccaaccatggacttggacccgacttcaaacccaaattctaacctggatcccagaccctaactcagaccttattctcaacttaacctcgaccccaattcaaacccgaacccgagcccgagcccgaaccacgttctctgccctagccccaaacctcagctgcgatcccgaacctcatccccaggcccggacccaaccccacacccaacttaaataaattcaacaaataattaaaatttacaaactcacttttatttttttgtttttaaacttgaattaaacaaagttattatagaacacaattttatttttcaaaaaataaaattttaaaacaaaacttttatttcatgtttgccattaaaataattgaaaacaaaagtattaacaaagccaccaaaacattaaaaaaaagtatttttaaaaattctccaaaaatcattatactacaaataatcccctaatttaaaaatgattaagaataatttttattttaatttttgaaaaatagtttcttatataaaaataatcttttagcgaaggtgctaccgtgctagaatatttaatattatttattgatgtttaaggcttttaaacatattattcacgtgtctgtcataatcaaactctttgaggtctattaaattaaataaacatgaaagagaaaaaggagggcttttaaatgaacttgcatataaaatatatttatatatatttttttcatttttaataatttatggtgcctaagatttttatttttctattattgccaagaaaagagtaatgcctagctatgaatcaagaaagtacaaacagctaagccaaaaatcatatattgtcattttcagatttcaaaagttaccctccaaaaaacgacgtcgttttcgaacgtagctttacaagtttcacgcgcgtagacgacgtggaccggccaagacggcgatggacgtccaaatcccgccacgagatctcgcttcgagtctaagaattcctcgatacgacacgatatattgagagacgaggcaatatctcggcgagttcacaagagccaaacgaaacaaccaataaaacgacaaaaaaaaaaggaaagagaaaatcaccgcgcgtgctgactcaaccgcttacagttttccgacatctcggagaaccggatcttgaccttatctttgactctctctcttatcaaaggtcagcgcatcacagccgttcatcttaattaccacttaactagcttaaccgacagcgccacgtaattacacacacgtggagtaaaaactaagagcgtcgtgctgttcttagttgtaccttttcttattttttattttttcacttttgctcagtccacttcactaaaaactacctttaatttaaaaaaaatatatatttgtttttacaaaaatatatattatatatttttttacagtgtaatacggatcgtttcggaaagagtgacgcgtgggggctcttgattattttcacggtttcgagtttacctttttctaatttaatttcaccttaggctgaaaatgaaattgatacaaaaatgtatatattttaaaaataattatttcatatgtatatatatatatactatctgcggcagtatatatatctctattacatacacagaaagatataacgtatatagaatttttttcttttgaaactgatttctgtttttattttcttggaaagaatgtctgaatgtaacttgtcagtcaaaatgtccacttttgctttctcagtactagttattaatgatgatgtgaaataaagaagagcaaaatactatatattaattaataatggtaataataattaccaatggtacttgtatatatacttattattaaatcctttgtgctcaaataattataaaaatgtatgaacgaacgtatcatgtaatcaataaactaatgctacatcgctatatatagctaattaatatgtatacgtagattttaatctataaaatggaatcttgatcccgaatgaagttttaaaaatataaaggtgtctttttttttttcaatagttggtttttaaatatatgagacctctccacgaagattctgagtgttttgctatatatatatatatatttaatgacaagtgatctaatttcgtggctaagctataactaaataagcacttaaaatgggaactagtaagaatgctaattaaagtttggtttagtgtattattaggtcttcctcggatgctagatttggcacactgccaaagaataataattattattatatattaatggtcacattatgtttttgggtttaaaaaaaaattgaaaaatcataatttcgacccatgttctctttcatattttagtttcaagtggtagtactttgctaactgtaagcagtaaaaaacaaaagaaacaaagacaatatgaactgtgttttagcataacaagccaataaataccaataaccaatgaaatgaccaaagtttaataagcttcaaaaaaattacataccctatatagttaataattatataaaatatatatcttaaggcgtgcaatattttccaaccctttttctcataaaaatctaattaaaagggccactaataaaaaaaattacataaaaatgttgtataagacaatttatatatacatctaatctaagaatattattttctgtctttttctaacctgtataataggtataaaaagcaataaaacaacaaataagtgcatagtgttggtgctacgtggatgtatggtttccatgtaagacactgttgattagtaaaataattaatcacatggataaaagttagaaaaacagctaattattttgtccataatatataataataatcttaattattattattattattatttaaaaaaaaaaaagaaattaaaaagtaaggaacaattcttgcatgctgaaatgtttttaccatatataataaaaacaataaatagtgtcaaagactagctagtacatggtaaaaggcaagagaagctcataaaccaatgaatagaactgttggtctctttggccttactattcacaaaacttaattcagatcctttgtccttctatatatatccaaattataatattgcttatgcatctccatttgtcgggaataggccaaagtttggtaatccatgcacttttctaattaattaattaatcaatttacttcatatttaataataataaagttgtttgcagctgctactttgtcaccactaccactagtactaacttaattaactagcttattttttcttcttctttcaaattaagatattatggtcgttttatacattttttttaaaaaaattaattaatgagaatcttcggctacatagattaattgtcatcattgtctttgtttggttttgataattattgataattgatttatttgggcttgatgatcagttagtggagaggactagattaagctcaccaaaactttgtgttgaagataataacttattaattattgattaacctattcaactcttggcttgctggcaatttaagtatatagatatatatatgccaaaatctgtggagtaattcatttggatcagagtggaagccagtctatagtttcctcataatttgttattatttaaattaattatattaccatattaatctttttttacagcaacttataataaggaattaagctcatcattttcatcccaaccaaattaataaaaacaaaatccagtggtatataatgatcatgacatataataatttgttactagctaggaaagttcaatattttgaactttttattattgtaactttacatatatacgcgtatactacacgcacattttgaatcaaagtactctaatgagcttagtttattctccaaaatctatatatatgttttaagttacatacacatatatcgtgtggagaagatgaatggtttaattgttaatattgtactgcaaatactgtagagaatcatatttgttggtggtctctggctggtaatcatataaattattgatctttttaattgagataagttataaataccaagtactaaacaatggtaataagtgttgaatttttttttttttttgataatacgaacaattttgcatatatatattcattataaatatgtcaaattcatgtaaattcacacacaaattcgaaaatcaaattattcacaaagggtttcaatttcagctgatcaatgtatggatataagaacataagtagtgaaaaggtaaaatatagcttatttaataaaaaatgtattttaatagtgtgttggcacaatattttgtgctgaaattaacacaacatttgttatatgtaaaatttacatcataataaatgtactatttttttttatttatttatacaatttgtattattttattagtataataaattatatcattaaattataaggcatctatattattttttattgtcttacatattaaaataataataaaattgatggtaaagtgattagttttattttttttaataaaaacattaattagatattaaattttatatcaaaatttgagataagttgaaaaatatctcttttttgtatctattaatcaaaaatactctcatattattattattattttttaaaaatatacctatttttttgagtggattgcctagtatagcctcactctctacttaagtctagcatataatttacataacttaaggggtctaatgggacatcatccataaaagtggatatatctaaaaaaatatgaaactggaggtaaaaattaaaacaagtaaaacaaagtgggtttacaatgtaaattcttctcaaagttttgcaattatgcattagagtacaatgctaaaatttgatgtaaatctactacaaaaataatttttgtattaaatataacatactttttacattttccattaaagatatggtctaaatatatataatgaattaattcggattttctaaattcatttcttaatataaaacttaggatatcaatttttagaggaaaaataaat

SEQ ID NO: 15047 - DNA, 15840 bp, Cannabis sativa
tattttctttcaaaattatgcataatttttaataattctttttatattttttatcttgatatttaaaatatatatttttttattctacatttatatatattaaaatatttttttaagaatatgagaaagaaaacaaatgtaaaaaaaaaaaaaaaaaagcataaattataactatatattttatataaaataaaacctattaaaatagcctccacataaaaatcctctaattgaaatctaataaaagaaaaataatttgttttcatacatatctttagttacttttcttttttcaacaaaatctaacttccaaaatttaaattattcaaaagaacctcccatacaaaaaaataataatatgaaccgtaatttttttctttttttaatcaacagctacataaaaatcaatcctatacaaataattttaaaaaaactattttttagatattatttgtagctcaaccctttcttctaattctcccaaacaaatgctgcatttttatacatttgagtcccaatagtaggactaatgaaaaacttcctactatcttaaggccttgacttgactccaaagagagcttgtttgaatccaatcccttgaattgggatgcaaaatgaatgaagggaagtgagaagtgggaaacaaggttgccaaaatttctgcaagtaaccacttttcattgaaagcttgggatgtctttcttcattttcttctgttctcttctgtgttttgttggtcttcggtactcgaggctgacgggtgcagaccagattctgtgctaggcaaactgtactcgctagtaacttgttcttggctctgtagtgccaattttttgaacttttccatgtcttccctgtattgatgagacttgtaatcttgacttccataggaactgtagatcgtgctatcaccgggcttaactccttcatccagttcatccagagatatatgtccttccaaagctcgaagtatctataatgacagtgaataagttgggaaaagaaaccaacatttagaaggagaactttgacatcatcactaaatatttttataaacattaagagcaaaaaagttgaaaagattcccaaacaagtaaatgcagttgaaaatttgaaagataccagactcattcgtggccgaagtcgggcagaatgacgaacacaagcagatgcacaagcaaccattcgagtcatttcatccgggttgtaatcattctgcaacttagggtcaacaagaccatcaaagttgccattttcaagtgcttgcactagcaaaggccttgcctatattcaaaaacagttccgctattaattcagcttattttaataagctttggaatgaaaaaattctacagttaaaggaaaagaaaaaactggttccttatctaagttcaggggctaaccaataatagggtcaaaatttgcacaagttgaaatttttaaggtaaggtgatttttcctaaacaacttgtagattacgaattatcaaaactactttcagacaaacaaattatagttctatcccacaaaaaagttgaacctttcatgctataacatctgcgaattgcagtactcacccactcaaccatgctatcatttgtaaagttatgaaatttatcgataggatggtgtccagtaatcaactccaaaagcacaaccccaaaagagaagacatccgacttatctgtaagctttccactagatgcatattctggagccaagtatctgcaattgataatccaagattctaaggtcattacaataaactattatacttccttgcagtactaaactcacgtataaaattatatgcatgtacatatataagagtttcctacccaaaagttcccatgaccctggtagagacgtgagtatcagtatctagagaagacttagctagaccaaaatctgcaacctgaacaaaataatcaagagcatatatatatttatcatcatagaagtcaaatttacaaatccttgtaaaaaagctgaagaatacttggtggtttgattttagaaattagaaacttctgtccaataaactattatgactgcgctcaaacagttcagttaaatattatcatgctacctacacagcataaaaatgtaaatactttcgatttgacataggaaagaaaatatgagaaggtaaattgaaattgtggcttataaacttatagatgaaagttcaattgacagacatatgatatgaccaagtgttgtaagaaacttatgctgcatgaacatactacaacaggtttcatgcaaaagattatctaagttagaatccaaccttcgcctcaaagtcattatcaagaaggatattagctgctttgatgtccctgtgaattatcttaggttgacctgaagatacatttagctcaaaactgaattcaaaggccaatacttatatccaaaaaatgctccaatgtataattggaacgaaaaagaaaacttacagtcttcatgcagatatgccatccctcttgcagagcctatagctattttcattctagttggccaactcattgttggtctcccttttcctgaaataatagtttgctctcataaaaatactcaagaagacattaacctcccattctcaatctagaatatagaagcttatatatcacatatatagtgccattgtgtaataactacgttatgaaagttgaaaatctacacaattgaaacactgtctatcccatccacatcaacaattataagggtttaccatgcaagtgaaattccaatgtgccgtttggaacaaactcgtagacaagcattctctgaatccctgtgctacagtatccaaccaacgaaacgaggtgtctatgatggacacgaccaataaactcaacctcggccttaaattcacgctccccctgcccactcccagctttcagctgcttaactgcaacaacttttccactaggaaggacacctttatgaacataaccaaatccaccttccccaagaagattagcaggggagaaatcgtctgttgctttggctaattcctcatgagtaaatgtaccttgtgaaagttccgagcccttaacaggaattagtatatggggcggtttctcagagcctgagctactgcttgctgaagctgctggataatttaaaacaacccctgcaggaggggtgggcttgggaaacattactaatttattgttatcaggtgtattaccctgttgcagctgctgacctgggtcacctggaggaggtccatctggaaggattataggaagaaattgaattagagacataaaccttgatttattagcaccttcatattaaatatacacacagagaagataccaagaaccttctaagatgatcttgcaggagagatgatcttctataaacaaatcaccccctttcactaaaagtacatctcttatccccttaccagaaacaaaggcattatcatataatcaaaaagagaatttttatggacaaccatgtctaaaatttcaagacataattagtaaagactacaaccaagtccttaactatgcaatacataaaaaattagcagacagttcactacagaccccattcattcaatttttcttcctttaacctcattggaataaaatattataaaaacccttaaaaaaattcttaattgacaaattcaaacaactatttagaacagttaagattcttcaaaaatggaattgttaactaaattacaaggcgaaccaaacttagaaatttagtgggataagaaaaagtaacgccttacacttgggatgtgacggaggtccacctccacctccaccgttactctccaagtcttgctttctccttttcctctttttatatttccgatacaaaatgtagaaaaagcacacagcaaccaacatactcatccctccaatccctataccgacgatcatcccaaccagcgtccccgtcgacaaacctccattccccggtggcgatgaaggtggtggtggtgtagacgaattaaacaaccccgttgccggagccggaatcaaatccggaggagaaagaactgtaggagggggtaacgtgactccaggggacactggtgggcttggtggcggcggaggtgacatagcagtagcgtttgcggtaggagaaatgacaggagacaacgaagacatcgtgggagttaatcggcggcgatgtcaacgaggtgagtcacttcgccgccggtgagttgagttgtacggaaagtgagggtggagatgttataaatcagttgaaaaagaaaataataaaaaataaaaattattagatttattttatttatttattttctaataaaagtaatgtggttagtaattgttgggtttggaaaaataatgttaaaaggaaaaagtgattggtaccatgtgacgtcgtcgtttcaaccttttctaactaaaaagttccaagtccaacgccgtttctcatttttcttattttaataataatttaatgaaaataattattttttcgatgtcaaaattaattaccattaaattttgtttctactattcatggagcttagcgtcattattaggaaattttttgtttaattaagttgggatattctgtaaattattatataaaaaaaaaagggtaagtgcctaaagtgggtaactcccaaatatattacatgtcagcattatattttttatatattatttaaaaataaataaaattgggtagaatgattaaataaaaaatgaaaagctttcataaaagtgcatgtaataatgtagagtgtgtattatgaacaacacataatcttgtctccaacaaagtaggaccataaatcaacactaaattcatattccatgcaagattctagaattcaacttcatattttcctttgattattaattggacaaagcatgactaattttttccaaaattacaaaatcacccttacattgatctattctagactagctagcttagtcaaaatactaatgataaaactagctaatagataatgacataataaatggctgaaataagtgtcacatgttaattttcatttatcttgtttaaaaataactttggcccaaaaaaatcatcttcctaaattattagagatagtaactattcactttcaaaatataagacttttgtgttaaataattaataattttatccttctaactactatcattattctatattgcccttcaaatttttaacactaccaaatcagacactttttatttaattgaagttaagggacacaagtctaacaaaatctatatatctgaagtcttattattaacgtttaaagttgaaagaaaatatttaacattgctaataatggcacaatcttattagtgaaaacgtttataacacaaaatacatatttattcttgctttttttatttatataaagttttagtcaacacaaaaatcacaaagtataattatttctactgttattgattattattattttttgctgttaatttcgatattatgatactaataaattagttttttcattacattgatccgagttggcatttgaaaagagaagatgactatgtatctattttgttgtagaaatggacgtaccaaccatcaatcataaaaactaaaataataatatatatcattaataaaataattaaattaaattacattttcagttagtcataaaaaattaatttcaaattcactaaaaaattacataacggtgttctttaataaattatgatgtattattaagtcaacaaaaagaaacactcataaatcataaaagagttgttggttagataatatatgaaaactgaaaattaaatatatagactagtaactctttctcagttctaattgcaatattaatgaaattatattcttacaaataatgtaattatgtaagaatattgattagaacaatgtttacttactggtatcaaaaagaaaaatcaatctttacttaccaaaataaataaattgactaaatatggctttcttctttctttcttgataaaaatatcttcgaatttgatatgagatgtcttttggtttaattttaatactcaatttatgtttaattaatacatgccacgtaattgaaaacatttatctcttcaaattaaaacaaaaattgaagaaatatattaattaatttattatattaaaaagggtaaactaaagaatgagaaaaatgatggtaatattttgtaccattttggttaattttaatttatcaatttataaaatagaaggtctaatttataatttttgcaaaacatgttcaaaatggtgtttacctattaatattaaggttgattagatttttttgctccccaaactttgacatgtaccaaatcatgtctcttaaacttttcaggttattaaaaattcttcttaaacttttaaagttcgggcccgagtttcggttcgagactgggtctagatttggatcttgatctgaagtctaggggttgagtctgaattcgggtctaggttcgaggtcgaggtcgaggtcgggtattgagtctgaaatccagatccaggtctcggggccttttttcgatgacaggtgacaagtccgggtccagaatcccgaacccagacttgaatatgtgagagaaaatgtaaaaaataatatgagacaaaaaaaataaaaagtatatttatttttttatatttgggagggaggatttgaacttaggacctcctatttgtgacaagaaacgtagaaccatgtctatgaccacattttcatttttcttaaaaaaaaaaaaaaattgaccaaacaatccactttaatttttaaaaactatttttgaaaaataatttttaagttatgaatttaaacaccactttagattttcggtttattttgtcaaaaaaagaaaccatacatttttttcatatttcattataattaataataaatactaaaatatattggagatttttcatttttatacttcaaaataactttttattgtacatttttacggaattgaaattctcatagcaattaatggaacaacctaaatcgcaattaaaattcacatagcaactcatatagaaaccaccaaaacaacccaaaccgtaaattttaaaaaaataatatataaagtaatctccaaatatatacataactaaaagagttttgtttttataaatgatatacatcaatttctaccacactcttgtacatgagttttttttttagtgtcatgagctgctaaaagaaaatgactaagactaattatctcaaaaaaattaataaaataaatttgagaccatcataaagcaccattaagtataattataatgatgattaaaaaatgttaaacatattaaagaacttgtaaaatataaaagtgtatatttcttactttaaaatcattaattaaaaccaaacctccccgggaaaaaaaaaacctaatccgctaataaaataagtcaccaattagaaaaaaaaaaataaataaataaatatggtttgatttgaatgttttttttttttttatcagccctaataattgaatcccaatttaagtttaaatacattttaactacttcaacaaacttacacaatgaaataatactaataaataaacaatcatatttttctcaccaattaattttttaaaaaaataatatgtttttattctaaaagcatcttcaaatcaagagtgtatcaagaaagatgctcaagttggagtgtcttcgaataatggtcgagcccctcctagttcagggtcgagctcagctactcgcaccattgtagagttgactttgggggatgttgatctttttgttgatgcgggccttggttattaagattttaaaatggggatggtagcttcggatcctaatggggtattttttggtgcttttttgttgattggtacctttaagccacattttgcaaaggtgatggctttgtttcatggcctttctctttgtcttcgttttggcttcaagaatgttaccgccttctctgattgtcttcgcttggttcttgctgtcaatggtaatgatattcgttataatgagttttgtattatgcttagtgatatatattaagcgtaaaaatcttttcatagtttatctttttctcattgcaataggcttttgaataatattgttcactgtttaacaaagaggacgcttgttttagatgagtctcgtgtttgatgtccggagtttcttatggatctagttgtttaatcttttgagctactctttgaattttgagatcttttaggttttgtgtcttttaatgtaatatttttattttctttcaaaaaaaaaaaataatgataaattatttgaataattatgtcataaaattagttattattaattattgatgtaaataatataaaatatgtgtttatttaagcaaaatatttgtattatttgttgagctattgttgttattacaccaaaatagattatatactagtaaaaatatacatttaccacaattggatatggacttaagtattgttaattttgaacggatggtgctagagatagcgattgattggaagcaccatttttgtttattgagagcgattcagagcaagttattaaagctctgaatgagacatgttccaactagaatattgataattatatgttgtagtataatagactctctaataatttttaagttgtaatttttcttttatttctcataaagtgtaattccaacggttgttatccgtaatagccattagaggtggcaattcttgttcgtagggtcgtattcgtgtcgtgtcgagattcatgtatagcaggtatatgttcgatccgaacacgacatatttaacaatcgtgttagaaaattaaacctgaacacgacccgtttataaacggattgacacgacataactcatttaacctgtttacaagtatattttgtttaaatatggcaaccacacttataaagtattcaacacgtttataacctattaaagtactgaaataactttaaataagttattaacagctcagtttcgtgttagccgtgttaatccgaacacaacccgtttattaaacgggttagacgagtcaactagaacacgacccttacccatttaaggcaaactcaaacccgttaactctcgtgcagatttcaagttgtattatcgtgtctaacccattttgccggctccaataggcatgaggtctactttttttttcattaatcaacactaattttcaaagaaaatgaaaattaaaatatataaaattaattttttgaaaaaataaaataaaaatgagtacagaaaagatgaaatataaaacgccaacctcaatgacttggcggttgaatccaaacacacattctcacccagaaaattaaaccagaacgaaagtgacaccaaaaaaaaaaaaaaaacacgatacgcaaccacagggacgaagaatcaaaacctaacggtcctcgtgttccattcaactctcacaactactctctcattctccttttcgccaagcgccgacctcgtttccgatcatacctctccccacaatgctcttgattcgattcattttgggtttttgggctgattctttatgtgatcccaaaccggaactgttgcaattgaattgaggcattgaattcgatttttgtgtgaggaatatttttggatttgatttgaaatgagctcccaaaggcagcaggtgacgattcgcgacctggccgaggaggccaagaagcggattgtgtttctggccatttgcgttgtgggtttatcatacctcatgtcatgtgagttctacttctaccactactactacttcttagctgcttattgttctaatgttttggaatttgtgtttggtgaattggttacagaattattatttatgctcaattttgtgcagactttcttttgttggaataccttgattttcaagctttacatgcattgttgcttctaattagcatattcagatttcaattgggcattgtaattatctattttccccttatttcaattgagaattcttttattcatatatttgtctagtttcattacacgctggctcgctgtcactgatctaatttacagatatgaatgctcattctaattgggtacaaatacaatactgtatttatctctgactctctttctctctcttgattcatttaatgcaaagttgaaaattatattctgttgggaattaataggtcgcattatagtttttgcttcattgaagtatgtgaggttgttgtgtcttgtgttgtgcgtgacatttatgctattctctttctttaagatacaacttatcttgctcttattatagtgacaagttcctctgtctggatcaatctgcctgctgctgcattattaattctagtcggccgttatctatcactggattatgagacaaagagaaaagctgcagcatataacagcaaaccgcctgctgcaaacactctcacccaaaagaaaccatttgaccggcctaaagttgttgatgggtctgagtggagaaggagagtgaattctcctattgtcgaggatgcaatagatcagttaactagacatatagtttctgagtgggtgactgatctctggtactcaaagttaacacctgataaagaaggtccagaggaactagtgcacataatcaatggtgttcttggggagatttcaggacggatgagaaatataaatttgattgatcttctaacaaggttttagttcccacaatgtctcagaccagtttactatgattttgacttttatttataggataattactggaactgaaactcataggatggtgcagggacctggttaatctcatttgcacacatttggagctctttcgtgcgactcaagctaagattaaaaagaaggaagggatactaacaattgaacaccgagacatagaattaagactcatcatgttttctgacaagaagttgcatcctgctttattttctgctgaagctgagcacaaggttgcttatctctcttatgactatgctcaagtagttaggaagcattctgtgctttttacctggaatattcaaaactattgtttctaattatagtgactgtactttctctatgttcaggttttgcagcatatgatgagtggtctcatttctttcacattcaagcctgaagacctgcaatgctctttctttcgttatgttacccgagagctacttgcgtgtgcagtaatacgacctgtcttaaacttagccagtccaaggtgtttacttttttgtttgatatgaagcaatcatgttgtttcatggtatgctgctatcattttattgcttgatatgctggtattgctagtaatacttgcttcaacattttgtgacaggtttattaatgaacgtattgaatctgtggttgttaatatgaacaagtccaaacacgcagttaggccggtatctgagtcatctcaacccaatgcagagggacttacagatatctcatctgatcatttttccagattcttggattcttctgtaactggagtagaacttgtccaattaaaaaatgatcagtcaagaagcgatacagatacacgtgcagcagagaatggcaatggaaatctttcaaaagatccattgctttctattgatactcgatccacccgttcatggagttcattgcctatgaattcccaaactaatgatgtggcaggtattcaacgacatcgctctggaggagaatggggtgatatgttggatgttgtttctctcagaaaaactcaagccctggctccagaacattttgaaaacatgtggacaaaaggaagaaactacaaaaacaaggcaggtgatgatcacttaaatgagcatgtttctcagggctcctcacatggaaaattgattacagagaatagcactaaagcagtgtccaatctcaaagatcaagtgacaagagggagttcttctgagagcagtcacatgcagtctggatatactgataagttcaaggagacaaactcagcccattttacagttcaggatactccaagtcaatctctagttaattcagatggggagtatctagactcaggaagtgacacatcgtatacttctgaagatgaaaatagcagtataacaggccttggctctcctggaactaaagtttgggatggtaggaataatagaaatattgcagttcctcacattcatcatccacttgaaaattttgagagccataatgcaaagaaaactgctaagggacgtgttcgctatcaaagacataaaaaccagactggtcggaaaagatctcgaccgagcaaccagaatgtgcatgtttggcaggaggttgagagaacaagcttcttgtctggggatggacaagatatactcaagtcttccaaaggacaagcaaatgatgaggactatagtgatgattctgatatggatagttttggtagggttcatagtggtgccgctgcttcttcatctgcactttcttcttctgctgctgaaaatcataatctggctgtcaattctctgaaaagttcgctggcagttgattcattttataaattgagatgtgaggtacagtaaacaaaaaatatgttttaatttatttatatattccgagtattagctaattctgtttatctttggcaggtattgggtgcaaatattgtgaagagtggctcaaggacatttgcggtctactccgtatctgttgttgatgttaataataatagttggtcaattaaaagaaggtaatatagattaacattgcattttcccccgcttcatatgatgtgttttattttgtaacatgtcaaataaatgggatttactatggttttacgtgcttgcaacttttgatactttctacaggtttcgccattttgaggaactacatcggcgtctgaaaatgttttctgaatataatcttcacctgccaccgaaacattttctctcaactggtttggatgtagttgtcattcgagaacggtgtaaattgcttgatgattatttgaaggttaatgatgatatcagtcttctgtccttttttaattttttgagatgttgttactggctatctggtcaactggatgattttaaattatacgtaatatcatatctttactttccacattttaagtgttctgactcatgggaaaactttgttgttttgctgttggtatgtctacttgcgtgatttgcattagaactcatttgttaaatgctactactgtttatccattagcttaaccttgtgtatatttaccttcagattgatgcatctttcacttaattaactactcatgttcttcagtgtggtgtgactggagttggttaaataagcatgcgtacatacatttattggttgttaactgataagtatgggatttaagttgataagccaatagaaaggagtctaggatttatatgcaattcctctcctttcctatctattaatctttcctgttgtctaatattttcgtgatgttgttatgtcttcatattcctcagaagcttatgctgcttccaacaatttccggatcaattgaagtttgggattttctgagcgttgattctcaggtatgcaattagacaaaaagaaatgagatttattttttggtattggtggtatttaatacaatttaattttatttggtgcagacatatactttctccaattccttctccatagttgaaactttgtcaggtagattatgatctattcatgcatatgtaactttcaaaaaaaaaaaaatcttattgcgcttgtttggaattatatagttggcctagaagataagccatctgaaagaagtaaaggggtttcaaacgttggtggaatggacggctcttctttaaatacagaacgtcaggaacctgcattacgaatgaggaataatgcatctgggtctagattaaacacaccaaaagctatgaattattcaccggtgaaaattctaggtaaagaaactacagagacatttgataattctggtggtgcttctgaaacaaaggctcaaaaagatgtatcctcacttagaaaatcaggaaaagttcttaaaggtagagaaagtgatagggcagcatcagagtcgttagatgctgcaaatgacctgacccttcctacagaggtaaacaaataaaatttgtctgttcatcccattctgaatatatttttggttagcacttggcataggtatgaaccttgtgtttctatgtctcgtacaattctttccttcagtgggtgccaccaaatgtaagtgttcccatactggatttggtcgacgtcattctccagctccaagatggtggatggatcaggtatctcgtatgtttcattttggagctctctcttctatccaagattctgattacatacatcttcatttcatctgattatttttaatgtaactatgctgcgcattgtaggagacaagctttttgggtggccaaacaaatcctgcaactaggaatgggagatgcctttgacgattggttaatagagaaaatccagcttctgcgtaagggatctgtggttgcttcagggatcaagcgacttgaacaagtagaattccattgctactagagaactctgttccccttttccttaaaattaattactgtcataattattcaacagttgttctcattttatttttggtagatactctggcctgatggaatattcttaaccaaacacccaaagagacgtgcaccatcaccttctaacacatccccgggttcacccagtgctcatcaacatacagaagtatcatcgcctagaatggccgatgaccaacaagaagaagcaaatcgacgtgcaaatcttgtatatgagctaatgattggtactactattttgtcatgaaagatttgttaacatgtacagtttggaagttggcatttcattagcctcttaatcttctttccttttggatatgcagagaaagcacctgcagctattgtcggtcttgttggtcgcaaggaatacgaacaatgtgccaaggatctatatttctttcttcaggtgagcgttttttcaaaaatgttgattactcaatcaatcatggttcgctgattgtcatcttaattttgcctttgcagtcatctgttttcttgaagcaagtgggttttgaggttctggagctcattctagtgtcagcatttccagaactagacaacacattcaagcaattgcatgatgaaaaacataaatttggtgagtttaaaccgcagtagagcggtgtctacatttttgatgacacaattctgttgtcaaattgagattttgccatcgaaatgtcatcgcccttgattttaacattttgccttgtggaatttattgagaaaagctgagttgtgtaaatgatattttgatgtagctagcatctttgacgaaattgtacgtaaaagacattagataagtgcaaatacatgatatttactgcgtacagaaacacaatccggtcgatttttttcatacatatggcattacactaaaaaaatatatatataaaaaatgataaatcatcatgttagaataagatcacattttttattcaaattaccgaattaaaatccaatttctaaggttaattgatcataaaaaaaaaatgaagaaaaaattgcattttcaaattgagcatggttgcatgctgcaataaaaaattattacaaaagttgcatcatcagttaaactaaaaaaaaatggtgccttttagcatttttcgttgaacccattgtatcacaaccaggggaaataaacaaattttttatgttatatgatgtttgaatgagaaaatatagaaatatttttagaagaacataatagctttttaaaaaaaaaaatttaatcaattataaataaatacgatgagataatcatattacaaaaatat

SEQ ID NO: 15048 - DNA, 2027 bp, Cannabis sativa
ctaataaaatgtatttgataagagttttaattcacaaacctgcctatatagagctttttgataatatatgcggttagtaatccaacctgcaataataatatcaatcaaagttattgatttggtaaatggtaacctatgttacattataggcacaaagagtgatacttacaaatactcccagcactgtactggctacaaataaatacataaaattttcaataaactttaaggcaatggctgtatttatattagtgaggtcaaagctttggattgcattgaaaagcaccactgacgtggcatcatttactacgccttctccaaaaactaggctgtataataagggcgtctcatcttgattaagcacctaaaataatgacaaaatgatattattattaattattagaaaggagaggaccacagaatatacgaaaaatgcccacaagtacctgcaaggtgcaaacagaatctgtagcagaaaatatggctccaagggctgcaataaaaaggagaagataaaattaaaaacatgttaaattaaattaaaacaaaaatgttcacattaaatcaaaatttaacataccaagataatctgcaattttgagaggacccacgttcatttttccaaagaagtgtatagaacctatgtggagaaaacaaagtactttatgaatagtactattcataatttatgcacataagttaaagcaaataaaacttgtgtacctaaagagattatggcggatgatacgattgtaccaacagctccatttagcattatggtcaagaaattacgaaaaaattgctttttcttcacccggaacctattaagttggcaagtcagtcaaaactaattggtcatggtacgaaaaaagaagcataatatgaatcaccaaagggaatatataactgaataatacacattaaagcttaataaagaaaagctaattgaccgttgaaattgcaaccagacccattccctatatttactcatatttctattagtaaagttgtttgtgtgaaagtgaaagttaatgtcaattttggaaggattaaataaatagaagcattttttaactcaatatataccaattcaaataataataataagaagaagatggcaaaaaattttcgtacccagcattaaaaataattggtggaagaagaaaattaaagaaaagctctccattaaatactaataagtgtgaacttcttcctccagttgtatacagtatcaaacatccagtacaaagtccctgcattcatcataattatacattcctattattcataattatacagtatatatttatatatttatatatttatatgaaggcatgaagaaagaataatcttacgatggtaagtgcagaaatagattcattgagccaccgatttccttcgagcaaatgaccaatgacaatgcaagcaagaaaaagaaccacgaacagaggaatcacataagaatggtgatcatcactaccactgctcttcaacaaactcaccgattctgcaaaaaaccaactcacttccatcgctttacttaatctcaaaaacgaatccgattcagagagaagctaagcttctctttctctttctttcttctgtttggttgctgagaaagttgataaaacaaaattcaactaaatatattgtatattaatcaaaaaacttacttcgttcgttatgaaacctcaagtttatatataaacaccactaatacacatatataatatatatagtttatataataacatagaggaagatgaagagactgaaacatatttataggggtgttaaaattcagtaagaaacttttttcgatcagaaaaattactgaccgttgatttatggtgatgatggaataggagctggttttgagtgtagaggattagccacccaatgttggagggagaggtctacctttatgattatgtcgttcaatagaatcttttggaatttattacttaattaaaagtggtttcaaataaaattaagtaattaaaagtgttgaaaaagctctaaacaat

SEQ ID NO: 15049 - DNA, 6367 bp, Cannabis sativa
ttgttgcctttcttaaaccgtctatcaaagtggtacaagcaatcaaacttggacaatttcctctcctccaaagctcattcatgacctctatagctctttctgaacatccttttctacaaagaacctcaaccagaccaaaatagtcataactattgggcaacactccttttcttgaaaaatctattaataactcacaagcttccataactcgatcttctctacaaagcccgtcaaccaaaatttcacaagtgacattagaaaactcacaccgaagttcaatcatttcgtaagccatttgaataccttcctcaaacttcctctctctaaagaaacctttaatcaaagtattaaaactaacaacatttggactagaccctttctccctcatctctttaaacaactccaaagctaacccaaattgagaattacgacaataactactcaacaaaatattgaaagtaaacacatcaggcttcactctatccttaaccatcctatgatagaattctaaagccttgccatgttcaccgtttttcacaaacccattaattaaaatgttgcaaatgacaacactaggcttcccatcaatcagtttcttcatggaatcaaaggctcgaactgcatccttcactttcccaactctacaataagcattaatggcaaaatgaaaaatgggttcagttcgagagcaacagaagataccatcagaacaaggacaaggattggctaccatgaagttgagaagagagtcgagctcgacaaagcgatctgttcgggcaagggtacgtgacatccactcgaaggtggagtggtcatggcgataggagtcaatggtagaggcccaattgaagatatgaaaatcataatgggtgaaattagggtggtggtggagctttgatttgagaaatcgaagcaggctttgaggtgagaagggaggcttgagatgggtcttgaggaagattaggagacgattgtggttagaggagtgagagagggtgagagttggaaaaggctctgggaaggttgctggtgcggttgggagagttgggtttgggattatagtagatggtaatggtggaggcctttgctggaacaatggaagggattttgagaactttttcattgctattgttgtaacttattgcttttctgctccatcactttctctgcaatccaaagagtcaagcaaattttcagtctatatttaaagttgctaccatgtgaagtttctacagagtgttgctcttaaattaattgagattagtaaaatgattatttgaatttctttccttatcaatttatctttaaactctttttcttttcatgcacagacaagtgtaatccttcagtgatggataagaattctatatgattcaggtggacctaaaaaaagaaccaatgaaaactttgagatggttgtgcataccatgaatcatgttggaggtaaaagaagcaatgggaaacacaacatagatttctagatttgtgtgtcatccttgtgcaggggagatgctaatcttcactatatcaacccagtgaaaattatgcacatgtagttactgtcttaaatttatgtccatctatggttgtagttaaaactatctcatgcttcaatatatttttcagcctatatatggatatattttcatatataacatcataattctataagagaatccaaaggttgttaaatgtctaaatcctaccaccatgcttatatgaccaacaagctacaagcttctttgtaacattgcataactacttagtttgttttatcatccctctttttttctcattctacttccagtgattcaaagattaattttttactaacaagtatgcttataatggttatgtcctatatcttagtcaaaacagaaacactctccaaattttttattaatttatttgtaatcaaaacccaatcttgccaactaaaaacccaaaagaaaatctcagcaacatcaaactcacactattttctaatcatttctgatacaatttcacaagcaacaagaaatacctgaactgatattgataggcagagctgcagatgttcaggcgaaaaacaaagaaatttagtaagaaacaagaaaaaaaacacactttatttagggtaaaatcaaaataaataaaatgatctggatcaaacataaagacacctgagactgagatgagatattgttcaggccgagacgagaaggatacacggcggagagagagagactagccgccggcgaccgtcgtcggccactgtgagaagagactgttttcttcggatgagtggtgagaatgagaaagacaggtggactttattttatttatttatttatttttgttttataataacttgaaaaatacaaaacgacgtagtatagtgaactataaaattataaaacgacagagtacgataatataaaaaataaattgtaagtaaaagaaaaagataagatacaaaattgaataaacgtaataaaaagattaaaataaaataaataaaaacagtagagagagactagagagagagagtatcaaagcaagtacctttcttcttgctccggctacttcaaaatcagtcgcttttccattccatgcaaggttcgttcttatatttctttctttctctaaattctgttttagtggaattatataataataagttatatcattcccttttgagtttttaaattttgaattttgaatacccactactactcaaaagtcaagaataaaatactactttgattactttatcaatttatttattgggttttttgaggagttcagatgattgttttctattttgtagttctaaatttgggaaatattagctgttgatgttgtagtatattctcggaacagctaaatttggggatgactttttttatgagcctaaatttcatatttcactatcattcaggcaatgatttatatggatttcggttttatattccactagattccttctcacgggttctaattattttatgttatatgtatttatttttttaaatattgatttttgttagtaaggataaatttaggtaagggttgtttgttggtcatgtgggttttaatctaaatttagtggatggaatttcttttgactggtagatacaattttgagttttggaatatctagttcattcaatcgttttgcagttttggattgagaggaaaccatttttgtgggctctatttgctctgggttttcttcatttctgcacattttcatttcttctctcagtttctcctcataagaagcatttaaaaggtacctttgtataaccttattcaagtgatgggtaattgctgccttatagtctggagatgttaaaaaattcttgagctattcttattaaaagtgctccctttctgtttgcatgttcattgtaagagaggtaattctaaaaaaagtaatcatttatattccttgctatgccttgtttgtacttggatcatgttggattatgacatacgattattttataatttctgttgatggattattattttttgttattcttgcagttcctatgataggagacatgtaacgttttataggttgtttcatgcttgtcttgtgaacaagtgattattgtatgggaatatgaatgtatgtattgcagttgctgctgttggaattaagtaataagcgttccttttttataataagatggttatgcttgattcctttcatgtattggatttattgtcctaagtgctaacttgagtcctttgaaaatttctttgtaataaatatgtaatttgatattaacatttaagcggaattatgatagaaacttaaaagcgagattagcgtatgatacccaaaaccagtagttattggtttctactaaaatattacaaattagtgggaaaagcctgttgtgacaaatatgttatcacacaagaaagtatagaacaccaaatgttttctgttagtgtgggagatcttgcacgatctaaatctcacgctgaattgttagctggaaaatacataagaaggttatatatatacttggaacaatgctattataacatcatattgtaatgtatgtacatacttttttgttattgtaaaaaatattggaatatgcttatattcatttctttttatttattatcttttttagggggttttgttcaagaccaagcaagggacattcaagggtttttacaacgaacttttatcgatacggcacactgttgatctgaaagttctgaaggcaattagctgcattgatccttataatttgaagaaactattggggagatcttgatgcacttctattttcttagaacaacagtatcaggaccttgagggttgggggagcagtcaaatttttatcttcatggtcttggtttcagtatttcaggttcgtctgccttgttaataatcacaactttcatattccccgcaagattgaagatttatgtgaaaaaaggtctgttcacggtcttgtatttccaacctaagataaaagtgattcttttaaagtggcagccgtaaacaaaataatattttgctttctgcttcttgcttttgcctctacatattgctttcccttcacattagtgaccctgacaggatagtttgtttaatctctggcattcctaatggcttgtattggtccgtggtgatagttagtatatttgatgttgtgaaaaagttcggctccaattttgtatttcttgacacatcgattgttcatgtattttctttattactgttgacaggcacatgaaaagatgtatcaggaccttccaagaatcaataatgatactgttggaattttggatggaggaaatgatcccttacaaatgaaactgaaaaagcagactaatgtcaaaagttcttcagaggtcatatgagtttttcaactgaaatctggttaaattcttctaatttattaattggggtagaacattttcctcacaagaaaaaaataaatcttcttcaggttcatggagtatcatctctcatttggagcaattcagataacaggtaattgatttttactgtaagatgtaggtgacagttgtaatcttctttcaaataaggatttgttaagattattgttaacatgcagatgggtaatcttttgtgccttctgctggtatcttttggatatgaggcatctctaagtgtatttgatgctacattctgaatatacttgtgtaatatattgcacatttacaccaaatctacaaatcatagggtatgccaaggacctaaggtcaataaaaataataatagaaatgactacacgctcgcttcagaaagaacatggatttaaaactcttggttcttctatttctataatataaccttagatcatatatttggttcagaatggtggattatgattagaattaacaagtatttaagaacttctacggtaggaaaacttattatggctttgtatacatgtgagaaagtgcatattacctaaactattaagtataaaagaacaaattgaaacctaagtcggtactagtaaacttgccatctttgtctgtgaaaattgtttgcaatttgaggctctctagcattactccataacctgttgtctttggcttgtttgaatcttaaaaaaaaaagttttaaccttttacataatatgtcacaaaagaaacataattatattaattataattcaaacaaaaatatatataaatatatatagtgtacctgaaaatggtttactagtagatggtttcagtagaactaaatagttagttaatattgttttgcattagatgcacatatatatgtgttataaggatgtgaataagcagttgtaaatattattctttttacggttgtctgactctctttaataagtataaggaaaaaaaatttctcactttttacttcttttttgtttgtgagtataggaatagcttatcatcgtagatacttcataaatttttatttacaggtttaattgtaataacttggtattgcactgtaaatggggcaaacatttattaccagcctctacatcatctcatgaatatgaaacatattctgattctaatgtaacaatgatttgctctatgatcagcccatatgcccagaacaaagcatttggggtaaggctcaatcatttagcatgcttttgctttagttgtttttacttgtagcccatctgatcagaaggcaaattacattcttggcttcttcattttttttttatcatatttaacatgtatttattgagactaggtttggattaaaagccactcgcttgtttgctctcacaagcttttaagcactgtagtgtgtaagcattccaaatttattgagcctagtgcctctcactttacttggtttcttttttacaagaactttagcaaagta

SEQ ID NO: 15050 - DNA, 4846 bp, Cannabis sativa
  modified_base (1714)..(1734): a, c, t, g, unknown or other
tatgatcaatttattggagaagagaataagctctcatcaagtttcaattttcttcaaagaagatccttagagaaggaaattatttctatatatacacacaaaaaggtatgtttatatatatatatatatagatatgatcttaattttattaattatagttcattttgttaatttcttgtttggatctatcactttcttctctctctctcttaaattttcatggcaaccaaacagggtattagcaagaaaataaataaaagattttttttttatttattttaacaaaattatcttcaaacatagtggtttagttagagaaatcacaatctgggatattttcagttcaaagttctgaacttttttaattattattgttattattattctctttaaataattaatcttattgaaccttaagataatatatattttatatacttttttttttttttttctctaaagcaatgagtaaatttcattaactgtgatttctcactctggtgtggtactgctttgtatatattttttttttctttctaaatatagaaattttatcaaatcataattttttttttttaattatcttcaacatatatatcgaaattaattactattattttatatgaaccggtttgtggtgtgcatggtattttatgagacatatttattattattattattaattagaaaggaaatttaagagttataagctagaaaataataattaagaaatagaaaattaaaccaaaaatattgaaaatgtaattagtttcaaatcttctgaattttagccatgagagaggtgagtgtgtctaaacactgaaaagacaaaaaaaacccagacatacattatatacacaaaaacaaattagaaagaaaaaaacaaaagcaattatatatatacaaatatataaaaaaaaaaaaacacaatgaagaaagaagattattaaatgagtcaaatttgtaaaaaaagatttagcattgctattatgtaccagtggtgcttaacattttttagacatgtgacgttgcgattagctaacgatacaccctaaaatctattatattaaactatgttggacctgatacttagtaggaccaatagcgatactgacacataggaggctgctaggcatcggtgccctttaacatttttctttttcttttttgatggatttgtgtgctatttaatgctagatctccaccttttgctataaataccataaatattcatacccttatatatatataaaaaaaaaatacttaattatgttttttgatcttggctttaattagtttattctttttcttgttgtccccaaacatgcccttataacttaagacccataaaaataggagttaagaaaaaaaaatgttgttttttaaagcatttaatggtttattttagtatactttttttttccatgttttattatttttacttgagaaaaaagtaattaagcttttttgttttcttagtttagtgattttgaataatgttttagtgagttgagttgtcatgatgatttggatcaatattgtaaaaataatattattaaatttaattgacgtaatgtctaatttactaattaaataatgagaaaactcatgataacgtagagataatatctttaacattactcatgaattgtatttaatttaattaagagatgcatgtaaagactttaaagaccaataataataataataatannnnnnnnnnnnnnnnnnnnnataataataataataatccattttattagaatttgttggttttgaggtgtcatttcaaattatttgagtatatatattccccacagaaaaattatagaagcacattggatactgaagaagaaggtctatcaaagttataattctaatttggttttattttcatgctatttttgacccattacattctgagtcaataatggtccctactgtaaaattaaaaaaaaaaaattaattatattttcagtgtaaatttaaatattttattacttaattttattaatttattttctacaagcattttccactaactatacttgttgtaagccatctaattaattagtaaatataacaaatggaaaatatagtaagattttctattaatatattgttttatttatctataatagaattgagaaatacatataataatatgtatataaattttttaatagcaaccttaatttgaactaactacaataatattaggtctagcacaataaattatataatatttacaactaataaaaagaattccaccaaaataaataataattgaatagagatagttggattataaatatttataggtgtgtgtaaccattttgttagattcctctttagtggctctttttagtcttcttgttcttcttttatatttttgtattttattaagtacaaatctatcaaataattatatttaagagaaatgttacaaaatggctcagacacaataatataatttgaaattggttcgaaattacagatttagatttactttaaatgtaattgtatcaattttttttattgacttatttaacccatactttaataaatggattgtgtttagatttacatgactaatacaaagagaatattcatgacctatttaaaattaatttagaatcttaatatgctaaatagaccataaatgtattaaatatgttataaatatgcccaacagactattaacatattaatgagttagcatatttgattccatttgaaatatatcaatttatatatgggttatacgagtcgttcgtgttgtatcaacccatctataaatagattatatttagattttattttttgacataattatttgtatttaggttgggttaatatttataatacatgaatctcgacatgataaaaacataacatatgtatataaattgtcatccttaattaaaaatattaattacggagacttattagggaatactaataatcaacaccaaatttattaggacctttttaaaagaaaatgtagtaaacatgtatttttaaaataaatgtcgttttgttttgagctctagatgcaggtctaatttgcctaattcaaaccgaccctaatattactaatatctactattatgaggtatccattggtaaaattaatatcaaattttatatattttattttaataatattataaaatatatgtattcataatacatattactagctagtagctagtgtataataataccaatacttactatataatagtgaatgtgttggttagttttattagtatccacatggaaccttgtattgcatacaaggtatggccttgttaattatataagtacatatagtatagtagtgtcagattgtcagttgtgtctatcaactttcattcttgtagatctagattgaatagtcttcttatatagatagataccactagatacccaaaaataaaaatatatgattaataataatgtcataaaataaatacaacatctatcaataaaaacaccacatatatgatggtgcttcttgtttttattcccaacttgtgctccatatttttcttctattcacaatcattgtgtttgaataataatttctttttcttcttctttcacactattttggaatgaaaaatatcaattaatgaattaattaaaaaaaaaattggccaaaagtggggtgcttcccaaaatgccaattggcttgaaaaaagattgacactttcacaccatttctttaagttctaatctaagtcaactttaaaaactcaatatgcttgtttttgtaactagctaaggttacaataagattttttaatttttatttataaagtttgattctttatttgattgaattgaattggtctcccaccacctatccactcattaaattttaaaggatgaaaatgatacatttttctttctcttctttcttggtcggtttcttgaaactttcacaaataaaatctaacacttagaaaagaaaaagaaaaaaagagtaaatgaaagcttttattataattacttggataactctttattactttcatttgctttgtaaagtaatattggattgtagaaaatattatttaaattcattggataccacaaaatagatagataagcttatatgatctagaaactatatttaattcattagatagataataagataagtcttacttcattttaaacttgaagtgtttggatatgtagacaaggatattgggttgttgagatttcctaacacaactaagtacatcaatttatatagttccaacacgtatgagacaaatgttgttcacttaaaatttcactcaaaactaggattttattactcaaagtataggctctaataatgggtgtaaaattgggtgattactaatttttcatatttgtaataaattaaaatatgtaagaatggatattaaattgtgttaataattgtaccatgctataaatttaatagtctctaatcacacataatagatttaataatgccatcactaagccacatgacattatactatgattaagcactaatcacatacaattataataataatctctaaaaaataatataattaataaaagtaaaaagcaattaaggtggtcaaaattgtgggattaggaaatgaagaggaaattaattgacaaccaatactattttttttttttttttgacaaccaatactattgaagccatgtgattgggtctaattcaccaatccactaattcatataataagagcattgttatagtatcactgtgtcgctcaacgattgattagtaaattttttaaaatttattatcttaatttaaatgagatttgacacttaattacatcaataa

SEQ ID NO: 15051 - DNA, 3385 bp, Cannabis sativa
ccttgtcccatgaagcatcggtgaaaacaacataatcaacttgctcatgatacatacaagtgggagcatcaggatactccgtagcctcaaggctaagagtggggactagagattcctttgctgaatccattatcaacactttaaaatcagttaaggcctttccaacattccaaagagcttgagttggattacctgtggcattacgaatgcaggaagcattcctctgattccatatttcattgcacaagcaaccgaagaagaagacaaaatcaatcctacaggagtcagggaagattgatattaaattttccagaaaaattaccattgattcccctggaatgttatcaatcctcagtggatactgacttcccatccacatagccttagtgaagctacaacttcgaaataggtggagagccgattctccttcctttccacataaactacaatctttgattgggacaaaaggcaacttgttcttggtcggtattgcttcgtttaagatacgccaaaggaaaatcgagatccttggatgtattctcccatcccaaatccatttccaaattcgttggccaggttcaaatcgccatttttgatccacaacatacgccgacttaactgagaattttccattgcgattttccttccagaacatttggtcagggaaagggcttggaattctcggtatattaagaattcgttcccccaattcatgaccgaatatctggataatcacttcttcattccacctgttccccagagacacatctgctagcgttttaattgtgtaccttctttctccaagcagctgcatcagatcaaaaaactctctgtattccatccagggtatccacggttgcttccagaagttaattgattctcccgaagcagcggttgccatggagccttggagcaacacttcccttgagcctaaaacacttttccaaagaggggagtcattggatttctggtttacacaccagaagctgtcgtgcttgcaatacttttccagcatacatgtaacccacggtctctccattttacttccaaggcaccaagccaattttgtcatgagtgccttgttcatgtcttcgcaccttctcaaccccagcccccccatagactttggggtacaaatcttatcccaggctctatacgccatgtatctatccttttctacacttcctttccaccaatacttcctcattaaagaatctaagcctcgacaagtggatataggaaccttctgagtggacatggcataaattgggatcgaggccgcaactgacttgatgagagttaaccttccagcataggatagcgatttcatcttccaaccctccagctttgatctcatactatccttgagcttattataatcttctgcttttctccttttgaaaatgaatggatttcctaaatgtttctcttctccactgacttgattaatattaaggatgttgaggatattatttttcaagccagcattggtattctttgagaaaagaatcccagactttggtttgctgcaagtctgacccgaccaactctcataatcggataggtacttgagaaggttccttgcatttgtttcatttgctcgagcgaaaaggatagtatcgtctgcgaacattagatgagaaatcgaggggctagactgtgcaatcttgattccttgaatgtaaccttcctcttccgcctgagtaatcattttggatagcacgtcttgacaaaggagaaacaggaatggcgaaatcggatccccttgtctcaaccctcgttgaggatacaacttctttagaggacagccattcaacagaacagagtaggagacactagtcacgcaagccataaggagcctaatactcttgccattaaaaccattcttacttagtactttttggatgaaactccattccatcttgtcatatgctttgtgcatatccagctttattgccataagacctcccctgcctcttttcgccttgattttgtgaacaagctcttgggtaaggattgaagattcggcaatccatctgcctggaatgaaggccgattggaacggggaaaccaactcctccatgagaggtcgcatcctatttgaaaggatctttgctattaccttataagaaaagttgcataagctaattgggcgatattgatcaacacccaacgcaaattcaacttttggaataaggcacacaaaggtattattgattcttggatcaatcacccccgtctcgaaggcttcttgaaccgaggagcacagacaagggccgacaatgtcccataattttctgaaaaaacatcccaaaaatccatccggtcccggggctttgagagggtgaaggctgaatactgcacttttaatctcctcgacactaggagttcttgacatttcctcattttctgaatgggatatactcttcacctctagattttccaacttatcatcgagtaccggtctcgttgaagtgtacagttctgtgaagtgagtatttatgaccctgccaatattcatcttgtccttccaaattcttccctctttatctttgatggcccatatgctattccttcttcttctgatgttagtcgcagtatggaaaaattttgtattccgatctcccaaagctagccaagtttcccttgatcgttgtctccagatgctttcttgtttagaccacgagattatcaattgatcttgaatgagagcttcttctcttttcaggtcagtcgagatgggctgttgttggatccattctaaccttttttccattgctttgatgtctgtgtctgttactccttgaatctttttcttccatccttggagcgcttttctcgtattactgacatttcgaactagagctgttgtggcttcagtacttggacagcaccaagccctttcaatttctcccctacacgagctttcccaggtccatgcttcataaaatcggaagggaatgaaacctttggtagcaaacaagtgagtatccagaatgataggagcatggtccgaaatagtgataggtagattaaggacccctgagtaatcataattattcatccaatctcccgaacagagctctctatccaatctttccctaattaaaccaccatgaaatctcttattttgccatgtgaatttgttaccgatacaacgaagatctacgcatcccgtattatcttgaaaattcctcaaccatcgtaaatctgtcacagtaaccttagaccccccaactttctcttccttacttccaatacaatttagatcacccaaaataacccacggcaaatggaagtggtttgcctcagtctcaagataattccagaaattctccttgtctcgaacataaggcgttccataaaccgccaccagcttccaaag

SEQ ID NO: 15052 - DNA, 4457 bp, Cannabis sativa
  modified_base (2361)..(2366): a, c, t, g, unknown or other
ttcttaaatagaggttctactatactaaatatacaaatattaactctacgaatgtagatatgtatgtattttttattcggattcttgactgcattagactatgtcatattagtgctacatcaacaaagtgtttagaatatataataaacacaaatgggtaacttcgcaatagttttgacagttaaaaaggtgaaaaaaactctacaaaggtgatagttcaaaaaaatataatttattcaattaattagtcaacattaattgattaattaatgtttgatttttttgtagaccattattcattgcatataaattgtggtggaaaaccaatcaccattggagacatcaagtatgaaggagatgatggattggtgagtccttcgaatttcgtaaacgtaggcacttggggtttgagcaacactggtgatttttgggattatgagaataaagcatcagactacatagcagcaacaaccaatgtatctggattaagaatcaacaattcagattttgagctctacacaacttcacgagtttcgcctctttcgctaacttattatgcttactgcttaggaaatggaaattacactgtcaaacttcatttcgcagagatagtactaagacaaaacagatcttattacagtcttggaagacgaatatttgatgtttatgttcaggtatacactcttgatttgcttatgtgatcatatcgccacatttgatgtttatgtatgtggaacttatgtttggctttaaattacattatagggaaaattggagttgaaagatttcaacattgaaaaggaagctaatggagttgataaggccgttattagagtagttaagcaagttgttgtgagtcataatacactcgagattcgcctccaatggacggggaaagggacaaggaatattccaaagcgaggaatatacggttccctaatttcagctatctcaatagattctggtaaaataattgaattttgaatatgtatgtcaatgtgatcatcatgaaaaactagcttgttcatagtgaaaagtgaaatttgatttgttttcttttcgtagatttcaagcctccagacaaaaacaaagcgaaaaagatcatcatcggagtagtttcagctctttgtcttcttttcatagctctaggccttctttgtttgaaatgctatattggaagaaaggaatcaagagatgaaggtaaaagaatgagcattgctattactattaggcacttgcatcactatgaagaagtggtatctgaaacataattatactaatagtgatatgacacatcgaataatgttagacattactggtgcctttcaacacttttctaagagaatatactcatgccatcaaatttctcattaaaaaattgcatgatatattcactatgcattgcctttattgttcttcacataattttaccaaaacaaatgttattttatcatacagttctgaaaggcttagacttgaaaactggtatctttaccttcaagcaaatcaaagttgccactgacaacttcgatgctgcaaataaaattggagaaggcggattcggatcagtctacaaggtatttaaaactcattactttccatgactacaaacttgatatgtcacaatagaatgaagacatagctgaatgcatgtcacaattttattgcagggtgtgctattagatggtactattatcgcagttaagcaactttcatccaaatcgaaccaaggaaatcgagaatttataaatgaaataggcatgatttctgctttacaacacccaaatcttgtcaagttgcatggatgttgtattgaaggaaaacaactcttgttggtttatgaatacatggaaaataatagccttgcaaactctttatatggtaagtttattgttaatacatttatgttaagccttactatgactaaattttatatatattcattgactatctactaattttttcaatacttaaaaaggttttgaagaaggtgaagtgaaactagactggaatacaaggcaaagaatatgtataggaattgcaagaggtttagcttttcttcatgaagactcagcaataaaaattgtccacagagatatcaaagccacaaatatacttttagataaggaccttaccccgaaaatatcggatttcggtttggctagactcaatgaagaggaaaacacccacatcagcaccagagttgctggaactatgtgagctatataatatcttttcttatgttactacattatgattaattgattatcatggcaatgatcaccacaaaaaagactactttaagtgataacaaaaagttacttgtaactaaaacgtagtatttagatacaaattgtcacnnnnnnagttttaatcacaacaagtattgcgactaaaaatatatttagtcacaacaaattatatttttgtgacgaatacttttaactatgaaccttttaatggcaatacaagaatgataatttataattagtcacaatttttacacctttagtcacaaattttactgtgactaaaagtaagactttgtagtggatactaattaattgattttgttgtagaggttatatggcaccggagtacgcattatggggtcacttaactgataaagcagatgtatacagttttggagttttggcaatggaaattgtggctggaaaaaacaacatgagatatcgcccgagcgagaactttgtgtgccttctagattgggtaacaaacaacttcatagttagttttgagttgatttcttattctttctattcctatattggtaatggctgatcttcttcatatgattgatatgtaggcccttttcttacaacaaaagggagatataatggagcttgtggatccaaatttgggatcacaattcaagaaagaagaggcgaaaagaatgattaaagtagctctgttgtgcacgaatccatcaccttctcttcgccccaccatgtcaacggttgtgagcatactcgaaggtcgaactaccattcctaaactagacatggcgttgagtattgatgatccattcatgttcaccggtttgcgagacaagcttgatcaaatttcacaacaaacctccagaggatctcataacatggctgctcaatcatccaattcatcatcatggattgattctgcttctgcatcatcttttagtaagagtagtttaaattagtttaagttaaaagtgtaaggtaaaattatcaacaaacaagacaagaaagctactttgatctttataagaagcaatagagtctacgatgttcaattttagatagggacacaattattgggccaacaaaatgccttattctagtatatcttttatacttatttttgtttggttattgatatgagtcttggaaaagataatatcattggacataaaatttggataatgcttatcttaatcttattaattagattttgatttgtaattatatagctatatatgattatcttgcatgacaaaaggaatgaagcttaacttgtattttttaaattaattagacataaaaatatattaattaatgaaaagaaatttatcatagaaactttggaaaaagacatgaactaattaattcctcgttaacaaaccaatctaccttgattccacccagggcgatatagtgggttacaagaaaaaaaaaatatttttgagctcttatttaaaaaaaaaatgtagtattttttaaaattaataaaaaaaatatataattttaaaagggaaatttattttttttagtccctacctctagactaggtacgtcctaagtctactattcccttatttgtttactgttattttaagtttatttgcatttgtttctttttaattatcaatgtttaaatcaattgtgttatacattacgttgctttcatgctaaattagtaagtgttgatttttgctatacttgcttagatgattcttgaggagacgataaaattactttcattatattacttttttttgctaaaaaaaacctcaattcattaaagtaaatttagaagtggggtgatcacaaggagccaaaaaatataaatcattaaaaaaaagaaacattattttattttattatttattaacgtaaaaataaataaataaataaagtgtatttaatttgtatttatttattaattattatctacaatattactgaattcatgataaaattaaattaaatgtgataaaataatcaacagacggaaattattggctaatcttttggacccaccaaaaatggaataaagattttctattaaagaataatattataccataatgtattaaaccaatttaaatatgaaacatctatttatttaatagtattttaaggaaaaaaaaatgtctacaaggttaatagtatttaaaagagtaatttgcggcataaatacttaagttttatgtcgagtagcagataaatacttaagtcgta

SEQ ID NO: 15053 - DNA, 14535 bp, Cannabis sativa
  modified_base (14509)..(14510): a, c, t, g, unknown or other
taaggagcttattttaatatttagttatattttttattctaataaaatgtttatggttttttttttctcgagtaatattatgtttgtttataaaatatattaaatttttaatacatattttttagttatattttatattgtcaattgtaatattattaattaaaaaataaatattaattatagtatatatttatttcggaatttatttacttaattttataataaataaattaaaattaaatatttatatttagtatttctattacttaatctaattatctaaacaaaattaaatgattctcattgactttctagtcaattaagtttacaattacaatttagtaaccgtggcataagtgaatgctcaatttttattctttttgatttctccatttcatttattcccattcgaattacaattattaaccgtggcataagtgaatcctcaatttttatggcttgctttctgaaactctgatcaaatccgggcagttaaaacccttacattagcgtcgtccgatccgatctcgacaatggagcccggcgtgagtatcgagacgagttccatgatccgtgtggcggtgctgccgatcggcgaggtaccacctacccttttgcgggactacttctccatgctgctccgctatcagacaatcctactctcagccataagctccttctacacggagcaccagaagtcgcccttcgctcatcagccatgggattccggcagccttcgattcaagtttatcctcggtggtgctccaccctcaccttgggaggatttccaatccaatcgcaagatccttgccattattggtatctgccactgcccttcctccccggatctggacaccgttgtcagccagttcagtgccgcttgcaagggtttctcttcggcacttgtggagcgttgctttgctttctgccctggggattcacaggttcgattatactttttttttctttttcctgtcataattcgttgagggaaactcagattttccaatttcgaatttgatgttgtagttggaggatgggagtaggaaagggggtaacctgatgctgtttccgccagctgaccgcgatacgcaggagttgcacttgcagacaatgatgcaggacattgccgcgtctctgctgatgaagtttgagaaatgggttcttcaggcagagtctactgggactattctcaagacgcctttagattcccagtctagtctcagctcagaggaggtttatttttaggtgttctaaagcatttgaataattttagtctgatttttctttttcctttttcttctttttcttaaatgtctatttagatacttactgggacttcattgatagtttaaatagtctttgagttagatgttacttattcatcttaataactgctccaagtaacattcggatttgcaaatgccaggttatcaaggccaaaaaacgaagacttggccgtgcacagaagaccataggtgattattgtctgttggcaggatcacctgttgatgccaatgcacattacaccactgctttagaactttcaaggttgactggggattttttctggttggctggggcactggagggcggtgtgtgtgcattactggtagtttttctctatatgatatatctataatgttccatcccagcttgaacgactaaattcccttgtatgttaggatgggctaaacagcaatatgtgataataatatggtgtgcttttggggttttgctttaagagcaatctttatgactgaaatggagatttgcagttgagagtgacttattgcttagggtaattagtatatgagttcttatttttttgtgaatttgagttgtccttgggtcggtacgtagctaaaaagtatgagttttttgtgttgctagaaactgtggaattccatgaggaaccctttaggtaagcaatgcagaggctgtattcttttgtaattgcttcttaagttttgaatagatataatttcaggtctctttatgtttcgacatgatggttattcttgtgttccaccttcaatgctctaatttttactggaagatgacaattgatcacatttatttttgacacctgcttgtgcttataccttatagattgatcgaatgggccaacgggactcagttttggaagatgaggttaggtatcggtaccaaagtgtcattgtacactacaggaagtcatttatacaagaaaatgctcagaggcaagctttttcctaaaaaatgatttattgactgattgttttttctctgaatgatgtactgtatctgattatcttttccctcttaaatcttgtaatgtaatgttgtaatctacaatgctagagcctgaaatttggacactgactgccaataaaagagaatttttacctcctccacttcattttctttctattggtaaaatcttaattgagttatgtctcaagtgtactcatgtttcattcattactatgccctgattcatttggtgtgtgtgtcttttattacattaaatcaaaagctcttatagttctgtgtagaatctctcccataacctttaagcttgaggctactttgtgtgtgtgcgtttctttaataaatgattaagattatgatttcactttcattacattaatccagaagctcttatagttctgtattttgttctgtgcagagtctcacccataacctttgaacttgaggctactttgaaattagcaaggtttctttgcaggtaaattttgttataaactatttctgttatatgttatatgtttttctcgtagcaggtaaattttgtcataagctcttatatatatatatatattttaaaaagaggcagaggaaacatgtccatgagcgacttcctctcaactcttatttattcagataatgacaatatcttacgtaatacttttcttctttaattgtttcttttctcagagggggcatttatcttctgttgcttgtattatttcacaatgtttactatattaatacaagttgaggtgttgtttcaaatttatagtagtattagtaacaatgctgaaagtactattactgtattttgtgctttaatttcttatgtttattgttaccatggttttcctctgtgataagtgaggctccttaataaacttgggaggtcagtttaagacaagtgacatatgtctctttttcaaaaaatgaaaaaaaatagtagcaatatgtgtttgtcaaacaaatgaaccaagttgggaaattctttagtagactttaggtgagcagagaatacaaactattattcttctttggttcattggttttcaattttttaattttattggaaacacactcaaaaagatatgtttcaagtcttatatgagaggaaagagattcatatcccaaaatacttataaaaaaaatcaaaatatggatcttaagtatttagttttctcctatctttttatggcttaagtcttttcacctttccatttggtcattttttgatgtgtttgatctgttttaaccttcatttttagcagaaattatgaactaagttaaagtactgagcaatatgcttgagatcctaccaaggattgttggatatacttttttgagctgaccaagggtttatagggttggtgcaacggcccattatgatataatcaatgttcagcttgaataatgtttattagcttatatatgtaatattttttttaagatttcatacatttgcttgtatttaattttaggaatatttcttattatcgttgttgagattatttttgttatttatcattttatactgttaacattttattgtgtttttgcagaagagagctggctaaggaagtagttgatctcttgaccactgctgcagatggtgctaaatccttgattgatgctagtgataggcttatattatatgttgaattagctcgtttatatggtactcttggttatgagcgtaaggcggcattcttttcaaggcaggtagctcagttatatttgcaacaagaaaataggttggctgctattagcgctatgcatgttttggcattgacaacaaaagcatatcgtgttcagagtacagcatctgtttcaaaagtgagtatataaatattaactaggagatggttttattttttggggatcttatgtcttaagcaccagtaattgcttatacgatccaattgacatgaggagatggtctaatttgattattggtggactctcatgtttcttatagttatcttagagatcttttatcagtatctgccatttatttaacattcttttatttcacggaccagatcctcttgttttgttgaacatatcatgtgaatatgctgttaacaagtttatttgcctttatcttacttggaactttacagaacgagactggatcaggtcttgctgataacacaaaaatgctgcaccagtccgtagtctctcttttcgagtctcagtggagtaccctgcaaatggttgtgctgagagagattctgctatctgctctccgtgctggagatcctcttgctgcctggagtgcagctgcacggttacttaggtcatattatcctttaattacacctgcagggcaaaatggcctcgccagtgcactttcaaattcagccgataggctgccttctggaacacgctctgctgatcctgctctaccctttgttaggtaagtatatgatatctttattaggctatttcaacaatatatttttttgtgctgtacatgtacagatacagaatgcataatgttcaagcaaagtagtgccttttttactcttgtgtattgtgaattgctgaactgatagacagattgaagcttaagttaaagctttccatgctttgtaaaataaaaagatttcatggtgtttatcttgcactgataatacattttgatttattttcttgattgttgatttttataattcaggatcacactaattgataccaactttcacgtgaatatttccttcactatattgaactctcaacggttgcttttgcttgattcacttgtgcacattactaaatgtaggttattattagagatggtactcttaaataagatagtatgacataaatgccgatagcattgtgttcttcccaaaaataaaatgttatggatggtagatgttttccttgcatatatatatatttgttttttcttacttattttctactcaaaatttccagctgcagtatctcaactaattatttactaatctactgttttaattttcctaggtggataaattcactcttagagctctacttttatcaccatactattactcttgtctgcagttctcaatttatggcatgtttactaattgggaatggggatcacgtgttataatcgttcatttgtttacttttatttagtaacaatgggaatacttaatggggccacatgaatttaggagaaaacaccgggattacttccaatcccattttcttaagtaatacttctaccggtaatggaatttaaaaataaaaataaattaaatgacaaatttaccaaaaaaatctctcttacaatatacattttctatagggcaatttagttaaattaaagcattttgattaactttcctagttgtgtaactgtaaacaaaaataaaataattatgattctctgtctggccagccagttttctaacaacaaataaattcataatttcgattctttaatattttatttccattcatttctctcattgatttattctaattgcaattacagtttagtaaacgtgtcattattccagattgcattcttttccacttcgtcaatcacaaatggacattgttaagcggaattcagctaaagaagattggtgggctggatcagctccttctggaccttttatttatacaccattcaccaaaggagagccaaataacaacagtaaacacgagttgatttgggttgttggggaacttgttgaagttttggttgagttggcaaacccgtgtggctttgatttgagggtcgatagtatttatctatcagtgaattcaagaaattttgatcctttccctgttaccgttaatcttccaactaattcctcaaaggttatcgccttgtctgggattccaacggcagtggggcctgtcacaattcatgggtgcactgtccactgctttggtgttattacagaacacctgtttaaggatgttgacaatctgctccttggagcaatgcaaggacttgtgctctctgatccttttagatcttgtggttctgggaaattgaagaatgtatctgttccaaatatttctgtggtaccgccactacctttactggtatcccatattgttggtgatggtgcaattattctacatgaaggtgaaattcgtgatgtatggatacatctggcaaatgctggcacagtttcagttgagcaggtccatatttcactatccgggaagaaccaagattctgttatctcatttgcaagtgaaaccttaaaatctgcattgcctttgaaacctggtgcagaagtgacaatacctgtgaccttaaaggcatggaggcttggtgtaggggatgctgatattgctggtgggaagagtgcctttgggagtatagtgagacattctaaggatggacacagtcctgcattgctgatccattattcaggtgccttgtttgttgtacacctcttttactttcgattttggttcattaaacttacattgtaatgtcaggcgactggaatcgggatgaatttgattttttctccccctctctttctaagatcactggtttgttagtttcttccctaggcaattgtaattcagtgttgaaggttctcagcttaatccctgtttgattcatgtgaaagcaggaagtatagaatccaagtaaactaggaaggtgatgttgagtagtttagttgtacaagatagctaataaggttgctctgtttttttttttttttggtactaaacttagtggacgggttagttttaggttcagttggaattaattaggaagttgtcatttacaagagtgagccaggctaattttggtgctcagaccattattgtttgggggagagcatgttttccgtcaaacatgtgtattatctagtgtttttatctcaatatcaaatttatccataaagattgtttaccttccagtgctttatcacctgagcaacgacaaaggtttttacaaagtgtaaaaggaagcacaacagaaaatgtaactattatagactatgcgcacttgccagttaggagctgtctctagagacatgtaaagttcaataaagagctcataataattgatagagtgcttctacaatacaccccatcaaaattggtgtattgatgcaacccctaactgtttcagtagctataagaagtttttagtctaaattttttcatagtcgtgtacgttatagttatttaagacatcttgtaaaattttgagaaatttggaataatttacaatatagatatcaatgtttaaaccgtttatttcacacgcgtataaaataaaaaagtcacgcgtgcaacagactctttgaacactgttttcaacgtgttaaatttttctaaatttctcaaaattttgtcagttgtcttaaataagtataatgtatacgaccataaaaaaaattggactaagtagttttttagatatcgaagtagataagggtgcattgttacacccattttaaaagggtgtagtatagaatttttctaattgatattgtattttatattttcagtgattagaagtggatctaattttcagttaatattattgctaaattatatcaagcattcacaagttgtcttttggttatgttagcaaagtcattgcttatactcgtatatacggacatcttttattgtgatatcgaactatgttatttatgattgagcagaaagcagtgtttatctgtttgttgttatcccctagcagcatttagtttttcacaacttctagtatgacacttattttgttcttctcttcagggcctctatcaaattctaaagatcctcaaacaaatgaaactattccccctggcaagcgtctggttgttcctctgcagatttgtgtcttgcagggtttatcttttgtaaaggctcaattgctattaatggagattcctgcacacgtgggtgaaagccttcctcaattggctcatgtgaatagtcactgttctgaagacgctgttggctctaacagtgaaatagataaattggtgaaaattgatccatacaggggaagttggggactccgatttcttgagttagagttgtctaatccaactgatgttgtgtttgacataaccgtttctgttcaactggacagttccagcaatgatgatagtcattctgttgacaaagatacttccgagtatggttatcttacaacaagaatcgatagggatctctctgctagggtacttataccgctggagcattttaaattacctattcttgatgcttccttttttgcgaaggatgaccagacagatggggttggcagttgcagaagtgcaatcttttcagaaaagaacaccaatgctgaactgaatgcttctatcaaaaacctcatttctaaaatcaaggtgtggtggaaatctgggcggaatagctctggagaactaaacatcaaggatgccatacatgctgctctccggtcatctgttatggatgtattgctcccagatccgttgacatttggattcaggcttcttagaagctgttctgagccagaagatttcactgctcaagctcacccttttacgtctaagggttctgttctggcacatgacatgactccgatggaagttacagtacgtaataacacaaaggacatgatcaagatgaatcttagcattgcatgcagagatgtagctggagagagctgtgtggagggtgccaaagcaactgttttattagctggtgagatcatattatcactcttttctacttttctttttctttcctttgtattatttgatgctatactttttgagcactcattgctatttggttatgaaaatttaaaatatttcattacctgccgactttttgtttactttgttagtgttggtgtgatctcaactgtagttttcaagggctcgagtcaaatttgcttatgcatatcttcctccccaatagctgattttgaattttaatacaggtgttttgggtggaatcgccatggaggttcctcctttgcaagaaattaagcattctttctctttgtattttcttgttccgggtgagtattctctggtagctgctgcaatgattgatgatgccaacgacctcctcagagctcgtgctagaactgattcacctgatgagccaatcttatgtcgtgggcctccttttcacgttcgtgtagttggaactctctaaccttttcaattcacaggctcaaccggatttgattaaagcataactgattcgcattgcatttttatggacttctcgagagcccttcattttatttgacaattggagtggagtgactagaaatttattggctgcaatgcaatactatatctcatttgtcttgtaatcttgttttggcattttgaaatgagttcttactgtccaaagttatattttattgtgaaatttatacgaaataccaatttttctctaaactaatttttacactttccatacctatttcctttctttttaacaggtttgtttttgtttttgtttttttttttttaattttttaattactaaaaaaaaaacaaaatttatattttaaaaaataaaaataaaaatacgttctatacttttgttttatgttttaaaaatagaaaataaaagtgttctataatttttatttttatttatttattttatttaagtcgggtttaagtttgggtttggattttgggttggggttggagtttgtgttctaaggtctagaatagagttggagtttaaaatattgattaaaataattgttttaaaaaaaataaaagtgattttcttttatttaaaaattttgattctcaatttaaaaattaataaatgaaaatattttgatagagcgagcattatttttagaagatattgataaaagacaaatcattaattttatgttcttaacatactcaaataattatttcatccttcattattgccacttttaatcaaatcatcattttattcacaaaacaaaagataagcctccttccactatcaacctcctcgaagaaaaaccaaaaagccaccttcattcgttcatattcaaaacccattggaagagattttcttaaaataatttttttttagtcatggtattcttttgaaaaccaatcataaaccaacaacaacaacgacccaactggacattttgcttattcgtgctatttggtcaattgggtcggtttccaaatggatttttattagaaaactttagagaaaaaaaattgttttcattgatttagaataatggtacagatgagatatatatagtacaaagctagttggagtaacaaacacctaactaatcttataactgaatagatcaaatgtaacaaacttaacagtctctctcaagatagagtgtaaagattctttacacccatcttaaatagaatttcattgaaaggagcaggaaaaagtagcttcgttaggatgtctccaaggttcactttggatgaaacgtgactcaacttcagggtaccatttgtgattttctccctgtctatgtgataatcaatctcgacatgttttgttctttcatggaaaattgtgttctctaatatatggatggtagcattgttgtcgcaaaatagtattgaagggagattgatgtctgagttcttggagaatggaagtgagccatgtgagttcacatgtagcattggcaatggcgcgataatctgcttcagcagaagaccgtgagacagttggttgtttctttgattttcatgagatgtgtgatttgcctaagaaaacataatagccagagattgattgtcttgtgtcgacgcaagctccccaatctgcatcagcaaaggcttagagctagagtttaggtggaggggaagcataaaaaaagagtcattgtcttggtgaatttttaagtagtggagtactcttgttgcagcaagcatgtgaggttgtcaaggattttggagatattggcttagtttatttacagcatagcttatatcaggccgtgttattgtaagatagagtaatttgccaatgagactcctatgttgagttagattttggaggaggtcccctgagttgttgcttagtttagtattaggttccataggagtggagactggtttggaaccaaggcagccaacttctttgagaagttgtaatgtgaatggcctttgagaaatagatatgccttttgaacatcgagctatttcaaggccaaggaagaagcgaagggtgccaagatctttgagtttaaacctggaatcaagtgttgatatgaatggctttagagcagttatgtcattggtggctacaattatgtcattaacatatataaggagagcaaggaagacaccatattagtgtcttgtgaatagagaaggatcatttttagcttgtttgaaattgtgatgcaataaggtagtgttgagtttggcctaccattgacgcaagaaatgtttaagcccatacaagcttttgtttaatttacaaactacatttgttggcaggtctcctttaggaaagtagccttgggaaagtttcatgtagacatcctcatttaaatcaccatgcaagaaagcattattgatgtccatgtggtgtaagtgccaatttttgatggcagcaagagcaaagaggagttttagggtgttgaattttgctacaggagcttatgttttgaaatagtcaattcctggtttttgagcataccctttggcaattaaacgtgctttaacttttttcactgatccatcaggattatgtttaatcctatatacccatttgtttccaatgacatgttggtttggtggtaaaggcaccacaatccatgtgtcgttctttttgagagcatctatttccacatcctaaactttgtgtttggaagctttcttaaatgaagttggtgtggaaaataaatcgaggaatctgtcatatgataagaagttggtgagaggatattgagtgctggaatgagtaaccatgtcacaattgtaatcttgaagatgggatggtatgtgatgaacacgacctgatctggtgcaagtgttggtgactagtttttgtgtgtttatatcagcagtgtgaagtggaggtttgggagctggaatggattcaggaatgaggatttgagttttattttcctcatgcatgttggttggagaagtggtggaacactgatgaaagaagtcatcaatgttctgattatgagggatgtttatgttcataaaatacaacatttaatgaatggaaaatgttgttagtttgaatggaaaatgaaaacacatggtctagctcgaggtgaaaatttaggtttggtggtgaaaaatgaagcatatgttcgacagccaaaatttcaaaggtgtgtgtagagtggtggcttttgatgcaacaactcataagatgttttatcattaagtaaaacagaagaagttatgtttaataggtacactacaatggtcaccatataacttcaataagctaggggtaaattggattgaaatgctagtgcatgagctacattgagtatatgttattgctttctttcaactacaatattttgttgtggtgtaccaacacaagagttgtaatggaagactccttttgtggcatagaaagtagtgagatgtaattatttggcattatcactgtggacagctttgatatttacctaaaattgagtatgaatgaaagtaaagaaattttgtatggctaacatggcatctgattttgcttttaaaaagtataactaagtgtgccttgaatggtcatcaactatggttaaaaattatcgtagccttcaactaaagggattgaatctggtccacaaatgttcatatgaatgaggtcaaagaaaaggtagtttcttttgctttgcaaaagagtgaaaattttagagaaatgtaaatgtttattaattttattagtaccaagtaccatgaatgtccaaggcgagtataccattagagattagtaatttgaacattacaagtattgattgataaagcatgcttggggagggtctactgttgcaggtagtatagattcctaatttgtttagctatcccaatcttcaatgtctgagaatggtcctggatataacagtggtaagaagtgaaatgcatggaatttttactgttttgtaagagagcgtgtacagataaaagattaaagtcaaactttggtacaaagagaacattatacagagtaatgtgagagtttatttgaatagtaccaatttttttgatctgtactttagtgccattaggaagagtgacaaatttagccattgtattatgagttagagcaaaaaaataatttttaccacatcaaacatgatgtgttgctccactgtctataatccaagcgaaaagagtggtcgtacctaagaagttgttcaactgcattgtcattggatgttgaagcatctgtggaaggttataattgttatgtcaacatagagattagttgttgacacagagctaaggtgagttgtgaaggattgatgttagatatggtgcttgaaacttgggatgtttatggcatgttcttgtgtggtaaaccaagatcagatttgcgagtggcagcaggatcagttggtttttgattgccataactaggtggaaaacctattagaaaatagcatttgtctttataatcacctagtttttggcaattggttcaatgaggacgaggccttttgtttcttgaagctgcatgcgcattagcagcttggacaacttcagatggcatggtggatgtattggttgtagtagcaactggtggaattgttttgttacctaatgttctttgtctttcttgatgtatgaccataaaaagaactttatttattgaaggacatggatcaaaaaggagaatttggtcacaaatggcatggtaggattaatttaggccattgagaaattgaagaacctgatcacaattatgatgatcttgtgtctgtattgctgcagcaccagtacaagggattctaggccttaattgattagtttcatctcacatagcattgagttttgcaaaataggcactcactgattcattgaatcacctggatgaaggtatgtcaaggattcattcaattcaaaaattcttggaccatttccttaattggatcgaatattcaatatggtccacatttcagatgcagtatcaagatacatgatgctgttttttattttagaagaaacagagtgtaagatgttgagaatattttacaaggatctagggtttagggtttaacaatgtgtaacaccctaattattataggcgtgttagcatgatttttaacgtactgtgcaactcgttgctaatnnacgaggttattgaaaatcgtgaata

SEQ ID NO: 15054 - DNA, 4026 bp, Cannabis sativa
tttttggaatatatataatgtataaactaaattatgatcttaaattatttcttgttagtaggaatagttatatatattatataccgattattattttgaatgaagtctgattgttggaataaatgaacaatttttccccctaattgccacatgagatgctgcattattctacctatatttcccttaactgcattatttaacctatacattcagctacgctcactcactcacacacacacatacacaaaaaaagttaagattatttggatcactggatactattgaatttgtgactacagttttgtatggtttgtggatttctatgataatctacatctaacaccttcattttctagtacataatgccttagcttttcgtgtacgtctacaatgaacgtagtgaaaccatgcatatgacacttgagcatgtgatttctaaagaaaagaggtgtttcttctgttgttattgtttgttgtggtgtatctggattttacttttctgaggcactgggtttttctttttatagaaaaattattgtacaattgcagaatctatggtgattgttgaatgtttctaaacaatgtctgctttcaattgtaataagaatcaatacaaagatgattaattatcacattttgacctgatgcagatgaatagaaaacggcacattgcaattttcactactgccagtcttccatggatgactggaactgctgtcaaccccctttttcgtgcagcctatctttcaaaagatggggagcgaaaggtcacattagtgattccttggttatcattgaaagatcaagagctggtctatccaaacaattgcagattctcctcacctactgaacatgaagcatacgtacgtcaatggcttgaggagaggactaagtttaggtctgatttcactatacgtttttatcctggaaaggtatataactttaatttgtggcagtttccagtttatgaagcatcctaggtgtgaatgaagattttattatcatttcaataagcgtataccttttttttcggcttagttttgcagaatgtttattatttcacattatatcaacaatttcacatcttttttttttcttcttcatataagtaaataattgcgggtgccttacaatataaccaaatatcaaccttataccaatttactacataacttgtggtgcagttttctgtagataaaagaagcattcttgctgccggagatatttctgaagtaattcctgatgaagactcagatgttgcaattcttgaggagcctgagcatcttacatggtatcatcatgggaagagatggaaaactaaattttgtttagttatagggattgttcacaccaattatcttgaatatgtgaggagagagaagaatggagtacaagcatttttacttaagtacatgaatacttgggttgttagtatatattgccacaaggtattcctttacatctgttagatttcatgaagtaacttcaattttgttctttcttatgcatcttgagttcctagagaactctttattcttatatttgatgctttaatactagaagtgttcagttgaatgtgaaaactttaagaaacttatttcttaaaattaagtttctctcttttttagttgctaaccacattttacgtgtcttgtcgatttaggtaattagattatcagctgccacccaggattaccctaagtccatcatttgtaacgttcatggagttaatcccaagtttcttgagataggcaagaagaagctagagcaacaacagaatggagaccaggcatttacaaaagctgcttactacattgggaaaatggtgtggagcaaagggtacagggagctacttaaacttctccatgatcaccaaaaggaacttacggggcttcaggttgatttatatggaagtggagaagactctagtgaagttcaggaagctgttcagaagctggaattgtcagttcaagttcaccctgggcgtgatcatgctgatcctatttttcatgagtaagctatcccatattttgttaaatttcctatttttcgtctctaataaattagtacttctttaagaaaaataatgattgtcaagtattcaggacttatttgcaccaactatgcctgtaattgctcgtaatatcaactccaaatacttagttttggaacgctccatccaatcactatttcttatagattgtctttaacaaccaaagtgttcaatatatggttcatctgatcactgatttcctaatcacagaagaaatgctaattttggcttttttctccttttgacttttgattcatgaaataaagtggaagtagattcttcttattttgattatttgttcatgaagttgaatttgttgtagatacattatcttccaatcatacatatgacagagcttgaattgaaaccctcaattaaaagaaaaagtgggaaaatgggcagaattatatagccatgtcaataatttctaggatgtaatctagttcctcatgttattgggagtacatgtttttttttcttttctaattgttttggttggcttgtaacttatccagatagtgtatatataaaaatgtttaaattaaagaaataatagctgttaattttagtcgggcccttttaaaatctgtcagagttgtttggagaggtgtgaaaacctgaggaaatatggcctggtagcagttatacctaatgcttattttctcttgtcaagttattctttacctacttcattttgttgactagtttttgcctctggatttttttgtctctgtaattttacttttatatattttcactgtctcctgtgttctgagatcttcaagcacttcctatatactctcgccgttgaatggattttttaagtttgaaaggctaatctttctgaatgaattaaaaaaataccaattagtgaattttcattttccgaaatgacatttctatgctaatcattttttatctgctttgtagatacaaagtgttcttgaatccaagcaccactgatgtggtttgcacaacaacggctgaagcgttggctatgggaaagattgttgtttgtgctaatcattcgtctaatgacttcttcaagcagtttccaaattgccgaacatttgataagagcaatgattttgttacggtcacacgcaaggcactagccgatgagcctgcacagctgagtgatgcacagagacatgagctctcctgggaagcggccacagagcggtttctaaaggctgcagagctggaccatccgttgacaaaaaatcaatcaagatctccttccaataactatatgtcaacatcaatgaatctgcagtggaacattgaggatttatcggcccaagtgcatcattttgtttccgggtttgaagcatctcggaagatatttggtgcaatccctggaagcttgcaaccagatgaagagcaacgcaaagaacttggtttggttgtgcctgcagggaactaatgctcaagaatttgacgtcataaatgctcttgctgactactaaattaataaattcaaattagatttagaagaatcatgctgttcaattggatttaaataatgctctatgcaaagaacataacttagaactacgattgtttggatgtagtctactcggggggattctgcatttttcagtccttgtaattgaaatgtacatacatattattgttcacactaattttgacagatgtgaattcatatgattacttagaattttcgtacaatgtcttatttgtttacttttacttcaaataaatattaattattattatttaaaaaaaaaaaaaagagaaaaagaaagcaagcttgacaaatggattagtggaagttacaaaagttgctcaatatactaatacagaatttggatgttatatattagaattggggtagtttctaatctcgagttgacctgtcgagtaggattttgaggatcattccttaactcttaaccgagttgtagctcttaacgtgtacggtgtacgtagaggtgtggagccacactgta

SEQ ID NO: 15055 - DNA, 10005 bp, Cannabis sativa
  modified_base (507)..(518): a, c, t, g, unknown or other
  modified_base (9976)..(9979): a, c, t, g, unknown or other
agcacttgttctttgagtgcaaggcaaccggttcttggcttgttgaaattaagagctgcctgggttggaaagcaagaacaacaaacgttcagcagctggttagatggattgagaaggcaaagatgtcaaaattcaaaaaacaagttttttctgcagcagttgctgcacttgtatacagttgctggaaggctcgaaataaactcatatggcagcaagagcagattaaccaacagcaggtgatttgtgacattaagtggagtctaaggactcggattcatgttgttttgccaaagaaaatctcaagtgtagatagagaatggttcttgactttgtaattagaaaaacatagcagtatagtgcagttggtattgtatagattgaggaccggctggttgctcttagtgtgtattcaaattggttttgagcaatacaattctttgatttatcaaaaaaaaaaaaataataatacttaattggtacctcatattttcaaattgtacatatttnnnnnnnnnnnntaaaatttaatcaatacaattttatcaatttaaccaaacagttctcaaattatctgtaatcaaataactaaatttgaattcagaattcataaaattttagacaatttaattatattgataaaattttataaaaaaaagttgaatttaaagtatcaaatatgtataatgtaaaaatacaaaatactaaataaacattattaaaaatacaaagtacccaatatgtattttaataatataaaggtaccaaaatttgtagacacctattaaataatttaaatatatatttattaaaatttactggaaataatatattttttttaattaacattattattacaagtggaaaaaagaaggaagtgatttttagaagatttgcaagagtttaagacacgtgtaaaggttgtcagtcatttcatgaaactgaaaactgaaacaaatctaaaactctaaacaagtaccaacttcccaaacatctctctctcctctttctcccttctctctcctctcatccaagtacccaattctaaatccctctctctctgcatcttcatctccatgtgcacatgtcaaggttctctctttcttttttttttttaagctcgcatgtgcattagaacactaatttgttttgggtcaacgattttttctgggttttctttatttaattttggtggggttttcattatttattattattgtattttgtctcatctcaggaagtttcaattttgtgtgcatttattaatgaatatattaagttttgcttatattcacattccaatgtccctacaatttgtatggtcttcattccatttcaaaattatatgctggcttgttcggtaacaccctctgctccatttcttcaaattccaacttctattaatcttgttcttcatttttcattcgagttgacttttttcccattttcaaagatgacccttttaagtttttgtggattttaaggagtttaacctctgtaattatgtcaaattatttttcttaactctttttagatttttgtttgtattgatctgtgttgactttaagtagctttatttcatcaggtcaaccttcatatctctcctcgatttaacttgcttgctttttctaaaagccttgtattaatctgtattgaattataatccaacacattgtgataacaccagtttctgctgtgttatggtctctaatttggacttgttttgatacatatttgagcctgtttaggatgaatttctaagaattttttttgcataatattgattttatttatttatttctacaatgacatgttaatctagtattgaattatgttataattgttcctttacttattggagtttgcattttttgtaggaaccatttcgaataagtttgaaaatattggcctagatagggattacatgtcctgagaaccaggtgccattttgctgtaatgaaaagggaactttgctagacttttctgttatgagtttggtaaaatctaagttcctttacttaaattaacaacaattcgagtggaaatccatggcacgagcttcgccagtacttttgattcttttggctattgttttttcctttgccacttataatttgttaactacaataatccgctatagatctactggtagtttagtaggtgactattcagatggcatgcttttgtccgaccccattgttgcgaggcctaagaatgtgagacgtgtggggaactcgaagtcattattccacgttgctttaacagcaactgatgctccatatagcacatggcagtgtcgaataatgtactattggtatacgaaacaaaaggttatgcctgaatctgagatgggaggattcactcgaattttgcactcgggaaatcctgacaatttgatggatgaaattcctactgtcgtagtcgatcctcttcctgcaggtctagaccgagtaagacttttatactctttgtttggtgttttttctttcttttttctctatgcttatattgttataaacattgattaggtacaagaattggtagtcacaaattgagttagcagaaattattaaaatggaatttatttttctgactgttgatgttttactttatgtcattgtgttttcactcacaagaaaatccttgaagctaatctagttgctaattgatgtgttattttcatgaggaatagcctaatatgctcgtattcttcatatgcacaccgtaatttatgtaaaggtattttgctatctgtgtgtgacatgaaatcaaaatgcatattcgttcctttttggaaatgaggggccgaaagcccagtgcattttagaatgtgtttggtaggaagggagaagtgggaaaatggagggttgagaggattaatgttacttaagttcggtatgcagtaacaatttgaaaaggccaacactatatgttgctgctgctactatagatttgggttcaagaagattaatcttcctatcttctcttcatgctaccatgccctgaactttatcggctgccccctctgctggttattggctcaaagtcaacaatatattttgttgcagttgctggtgttgaagcttcagtgaagaaaaagttcaatcactattgttgactttgagagtgaacagctaacaattggctcaaatgctattgttgagatttggccaagtacaaaaaatatcgccagctactcgtgttaattgagcaaacaattaacaatcgtcatcttgctaagaatttatagtgctgcctttaatgtgccattgcagctcaagggtgcattagaaggatattattcctcgtcaggttggttctttgccaatcaaaggatcttattccttgtcatggttgctttcgagaaaactagtaagcctaaagagtttggaagattaggataggcgaaattgtacatatgaaatggatataaagatttcttttgtaaaaagaaacattttggcacaaggtcaataagtaaggcttagtttcatacgggtcgggtgcatccatattcttaggggtttcttttagaagtccttcgaagttgaccttaggaagacacactgagtttctcaagcttgtcacttttaaactaggcgcaagaaattccatgagaatcttggagggtatctgattgggagaagcaattttgactgaacaatttttctttttattgtatagagctgttcttgtgaacgtagattttcatttgattcaaaaaaccttgaaggatgatgacttcgtgcaccttaagggtacggttgattaaaagtaatgaaaacataagaacgagaacagaatgaaataaaatttaataatctttttttatcgaaattggaaagtatagtcactctaccaaaacggttgaaaactcttacattagatgaagattgatcccttttcattccattctaatacccccaactaaacacatgtcttcaataatttgtcgggaaacttcttgtgttgtgtttttcatatagtctttgcttgttgtgtcgtgactgtcgtctcccactcttctaatcagagtatgatattatgaagattgtgacttcattcctcatcaaaatcagaaaagtatttaattgttagcttttagtaaccgcaatcccagagttgcaactacgaagattccagttccatctgagtggacaccagaagcttatactagaataagctttacacgggagacttgtcaagttcaagtgtgttactttctgtttcgatggcattccatttatgcatttctgtgtctattttgtcaaaattgtttccctgatcataatttctctccagggatatattgtcttaaacagaccatgggcctttgttcagtggctggagaaggctaccattgaagaagagtgagtttttgcttatctgacgatattgaatttagtgaacattttttcttttttttgctgagaattcgagcctgtttcttattttgttgctccagttacattttgatggcagaacccgatcacatattcgtgaatcctctacctaatttggctcatggaggatatcctgctgcctttccatttttctatatcacacctgctcaacacgagaacatcataaggaagttttatcccgaggaaatgggcccggtcacaaatgttgatccaattggaaattcccctgtcattatccaaaaggtaagtcttttgctgtacttttagtcatgtcacaatttcctcttgtggatcagccagtctattatctgttttctaaattcttatgatcttttgggtttaataattcaggagttgctggaaaagattgctcctacatggatgaatgtttcattgaggatgaaagatgatcccgagacagataaggctttcggatgggtactagaaatgtaagtacaatagcttcttttttatgagattttgcaaaataattttcccgaacacattcaatactttgtctcaattgtttacgcgtatttcccttttgtttcacaaaggtatgcttatgctgtggcatcggctttacaccgggtgcagcatattctccgcaaggattttatgcttcaggttcggtatctaatcttgcaaatctctatattctaaattctatgttcacctttcatgtctcgtttaactcgaattagaagctcttctaaagaatccttttctttgttaaattttcagcccccttgggatttagatattgctaacaagttcattattcattatacctatggatgtgactataacttaaaggtaaaattctatattatcttttaaagcatctttccctgttatgatttttgttcttgttcagttgataacttagtgtatggtttgatatgtgtacttgcatctaatcttgcttcatattatttagggtgaattaacatacggtaagtttggggagtggcgatttgacaagcggtcgtatttacgtggacctccaccaagaaacctctcccttccacctcccggtgttcccgaaagtgtggtatgtatttaagaatgtaattttatttataactaaattttgtttaaacattttatagtatagcatggaactactatcataaatgaattgcacaatagccaaaataatgataaattcataaaatgttttggcctcataatgttttatttggtgtcaaattgtacaagaacatttttaattcataatgttttttctatatgcaggtaacccttgttaagatggtgaatgaagctactgctaacattccgaattggggcaagagcgaagcgcaatagtatcgatagcattctcgattattatattatactgatttcgatgagggaaaattttgatcttacttttttttttggaaagcttaatacatgaaaaattcatgtggttgctaaatggaaaatattagtaaaatttatgtggataacttacttgggaattataggttttcttaagggtggtctttgtagggtaagttggttagcttttgtacttgcttggtagcaaatgatgtcatgagagtgttttttggtttcatttcttgattgcctttgttgtaaacaaacattcaagtcaaaataatatgttttgataaaagtattttgttttgctaataaaatacatttttgggacttgaatatcctattatattacaatgccaatagtctcaccaaacaattgaaaaatgatacaccaaaaaaccaaatcaaatttaaattggctatttaattaaaaactaataatgtattcttgcatttaatattttgttcaaataaataaacaatacaaacatctagattacgaggactatatattgaaaaatttgttgcaaatatgtctaaataatgcatatgtcttgtttagtgttttccaatggctaaaaggttgtttgacattgcttttgtttttgttttcaaaatttcaaatatgagaacaacaatttcttttatatagttttttaaaagaaaaagtgtttggttgatgctctcgaaaacattgtttggatttatttatttattttttttataaaaacctaataaaaaaaaagtaagaaatatatttattgaaagataaatactttagaattcgttttataataatagtgtgtgcctaatatttttcaacaatcataataggatggttaatagtcactaaatgtattagagagtcaaagacacatgagaacacccttataactataattgtcagagaaatccatatcaggctacattttcatgatggctggaggagttatttcgtgaaaaaatatcaaacaaacactcacaacatcctcaacaatggaggcaaagtatatggcatgttatgaggctacttgtcaagcaatatggttgcagaactttatttcaacattgggtgttatagactctatctctagactgttgaaattatattgtgacaattccgcagtagctttctttaagaatgctaaaagtacttgtggctcaaaatatattgacttaaagtactattttgttaaagataaagttattgagtctctcattttcattcagaacacgcttaccactagcatgttggtaagcccactaaatgaaaggcttacccatatgtgtatttttggagcatgtcgctcgaatgagaatgttaggagtatagcttgttgagctcagtgggagttttattattttgtatttaacgtgctaatattttgtatgaaatacttatgacttatattttgaacatgcataataatgttgtagtcattttttattgttattgtcatatttatatatatatgttgtttactgaaagtataaaaggagatagatacgcatagtcttaattttatttgattgttaatgtttgttattttattatatgtattcaaagccaagttttatgcaatatgagtaatagtatcttatagatgtttgatttagttgatcgttatatgagttggataatgttatggtagttgattatattgtctaagtaaaaaaatattagaattattattatggactattataattataggcataattctataatcacaaccattaactatgtacctaataatatttgtcaatagttataatatgataatagtcactaaatatattagaggcacatgaaagcacctttatagctataattatcccattaaattatagtctaccattaattaaaccttattgatccaattagctcataatctcctagggttagaagggtgttatatattaagtgtatgagggtttaattgatgatatgaggattgtagacaagggttactttacatttgcttctatcttgcattttacctttgatcatggttttgcattaatcatattgggagatcctaagtttaaatggctcatatagacaatatggcattatggggtatgttttattaatcataaataaatactttgatgttggattatatattagcattattgtgattattgtttgattatatgtagaatataatgctcaaatgagttttagtattttaacatttgatacaaaacaaattattatggaaacttcataaattaagtttttgttgttctcaaaattatctattttttgtatttttgtttttaaaagtcattttcttataacaatgtcaaacaacctattatttatttgttttgcatggttcaattttaaaatattgttcaataatggtcaattagctggaatattttttcaaaaaattctataatgaacactcaagatgagtgtatcaatggacatccttcatatttttgatatttgatagttataacctcatttatattatacataacagtgtacatcgtaattatttaatacatcctgtaaagttttaagaagattagaacactttattgtgttaaaaaaaagttcaaatagtttattgtaggtacacttcttattttatacgcatgtgaaataaattatttaaattatacttaaatctacattgttacataaaaaagttaagaatataactatttagatctcgaaaaaaatgaagaaactgtataaatacacctatttttaaggtgcaccatagaagcaccttttaattctacattaagttaatttgttgtaattagttatacatgttcaattaattatcgttactaacttgtaacaatttttctagttatcgttacagagttgtaccattaagtatggtataataaattataaatggctaatactctgtgagaaaataaagaatataacttttaaacgcacaaccatataaaacataaaagggcttattttgatagggtattccattagcaccactgtatgtcatgtaatttctcatctcaatgatgaaaatggttgaggataaaatgatgggaagaaagtacaaggcagtggagttcatgagtagaagaagtatgttctcttagagatattacacatcaaaatggaagataaattaaaatattaattccattgcaatataaaatatttttgagtgtaaatcagtgaagatagccataatttgaaaatgtataatacttttgttcaaaaatttatttattctatctctaagcacgggaaattctcatagaaataactttgagaattatcaagcctttaagatttctaacaaagtatttttttgatatagaaactatcatcatctctatatgaatacattaggcacttatttattgtatttataatcacacattttgaaattcaataccctatactctatgactgttaccatctcttaattgagtgtaaatgaaattaaatgggtgatttgaaagttattggagctgttaaaaagcattctcattgtcaaaaattgtttaaattaaaaaaaaaaaaagcagtaactagtaattgttactaaatttttcaatttttgtaaataactttctaaagcattttaaagtattctcacttgattttatatcacttatacacatattataaatgataaaaatatctccaacaattgcattttttattatagctttgaatttcaaagaattaagttgtgcaacctctctttaaaaacttaattagtgataatgtagaagttataaaatgtaactaactctacttcttatgttgctaatattttcacttattggtttgataccttttatatttaatctatatatatatattatattataatatttattaaatactataacattacatgctccacccttctacttgtgtgtttatatactaaaaaaatgtcacaaatcactacaatccctatcttcattcccatcttaaaagttttggtcaaaccaaccacttccaaaatgtttcttctcctttgagttttttttattcactttttctttttccaaagttaaaattgtataaatgacatgtacaaatatatgtggcccaaagtggttcacatatggtaaaataagtttttatagtagagtgagttgttgtggtatattttttcactcgttataattgctccatgctagaaaaaagtaacttccatagaaaactaaggtgaattctgttgggttttatgccnnnnataaaactctttacaatctgattagt

SEQ ID NO: 15056 - DNA, 5084 bp, Cannabis sativa
ttaaaaatgtttgttgagagaaatacaatgggccacggcccacggtgaatagttgcatacgtggaaggtaaacagaggagagggagtgtcaaaagtgtgtgataatttacccaacacacgtggcagctttgtagtattccaaaaaagctgtcacctttaataaccggtccaattttttaatttatttttcagaatttaaaattgggcacatataggctctttctctctcgcacatagctttcttaaaaaaccgttggattccctcaaacggaaaatcttaacccaaggttaagctaacctcaaccggcaacctgtggttgagttagtctcattgttttttcagttttgttttctttataattgtttttgcaattatgtcccttatcaattcattatttccttttttgtttaaaataatgcacgtcattgccaattagggacatctcctgtccattgtatttgtgcattaaatcatttttatattacatattatatacatttctcttcaatttcattttaaaagtttgaaccaagagagaactatattaggtagtggcattaattatatcccatgtgatagagaatcattgaaaattaaaatagaatattgattgattttttcccatttaatttggttatttttatttccttatttccgtttaaaaatgtgaaaaaggattattaattactctatttgatttttcttttttcattgaagaaattaacctgactgtgattagggttatttttcaatttatattaatttaattatttttaaggactcttggaaaaagtaaaattcttttgaaggactaaatattaaaatatttagaaaaatggaaaatggaataaaagaaaagtcataaatacgttaagatgcgagggtatgagtgcaaaatatcggaataaacctactttagacccattcacgaaaatatcgcgagaaaacaaccgcctccttcttcacgcaaagctctttcaaaaattagtataaatacatggcttgtgtgaagctaggtttgccgaattaggcagccaaaggcagcttttgaaaaagaaaagaaaaaaaatctcttctctctctttcgtgaaatttcctctctcctaaattttcaacctctctctcctaaatttcaacagaaaaaaatggcggtttcttctagaagaagtagcggaccggtactccgttccctctcaccctccggaagattctgttactctcattactcttcgtctccatcatcgtcttcctcagcttttgcatcatccagttcgagtttctcatcccgttcctccgacttcttccaccgtgccgcctccccaacgcgcgttaacctagttggcgcgtcgtcttccgcatcgtccgtacggttcgctcttgaccgtccgatttctcccaaccgttcgattgccgtggcgccgcgtggtagtatgagcaacaaccatcaggtggtgaggcgtcaagcgactggtcagaagaagacttgtctgtgttccccttcgactcaccccggcgcgttccgatgtagtctccacagaggctttgggaacaacacgtcgcatcactcggtgactccttacgcgcagaaccggctcaacgctcgcaggtcagccatgacgaattctttggttaggattggaggcgttgaaggcgatctggtgaaacgtgctttggcggctctgattcgtccttcatcgcaccatcagaagaggcgtgctgacttccgtccaaggccgagccgactctctatcatgtcgaaagcaggtgaagaagaaggctcttgatctgatttggtatgttgaaatcttcaaaaccaaaaaaacaaaactcgtcgatctttcatgtatgaaattgtagccttttagctacttatttagtggtctatctccgaattttcctgttgacggaggcttcagaatccgaaaaccactggtgttggtgaacggatttcagccgcgcgcggcggcaacagcgacggcatcagattaaggcggcatacgtttgtgatctgacatgcgcaatgatttggaaacggacctggttattttgtgtactccggtgaccgaaatcctatacaggacaaataatatctatagttaatagttttctgtatataaaaaaatatatataattcatttctagttgaccgccattaatggtggctcgacgagctttcggaccgaacgaatctccacctaacaatcatcaatccatacatttcaaaatcaattccaaataattaaaacacttaagaaattcattcgatcagtacagtctatcagcacataattccattccatttagtttcatttccatatacgttttgttcaaacacgtatttgttcgtttgggttctgtttcgtgtgtcgtttcttcattcgttccgttctgttccgttccgttccgtgttgcgtcccgtcccgttccttgttgcgttccgttccgttccgttccgttccgtttgtagggtttgatctggtttaagctatgtactgtgttcttcgtcttcctctggccagatctgtgtatcaagtaagctcatttctctttctttataatttaattacttatttcttattattattttgttgtatactattactgtggttattctttttgcaggtttaaattttaccttagcttgatactcttggattggtgaagatgagattttggactgaacttgaggattgaatcaaccaagttaattaaaaattataataattccaagaacccacgacttgggtcttttgacagaggaacctaaccttaacaacaagttgttcaactgataaaacaaaattaaaatttaagattaataataacaataccaataaagtaatgatttttaaaattaaatcgcacccacgtcttcatcatctctattttaaaaaataataataataattaaaaaacaataaaattttaaatggcgagggtggcccatatgactaccaccattatcgactgtgactgacagactgaaatttaattatgtcgactgaaaatttttatgggagctgtagtgaaattggaaatttattcccgaaattacaggtggttggtttggtaatttactatgaaattgaaagaacacttgaaaattggaaattaatggatgattcggtgggctacttaattacttattttaaagtaaaatttatataattttcaaaaaacaaaaagataaaattttaatatttttttttttataaaaatatatagtaaggtcgtccattaatgtatatatatatattttgatatctttatatattttaggacttattatatgttatcaagtctaccgttaggtatatcaatgcataggtacaaagctcgtgaatctctgcgattttaaacgagcgaacaagaggagaaaatagaaatggttgccaaattgaattctctatcgaaagtgccacaaattcggcactatatattttgagcgtgaaggaaaagaataagaattgagtgggacaatgagtatgagattctctggtggccaaaaagatgagcttcaatgacgtttttcttcccaatatttttaaaaaaaaataaaagaaagaaaagccacttgaataggcgggaagataaggttgataaggctatgaaaacgataggtggggggttgtggcctgtggataagcagatgccagatggtaaatggctggctccatttttatgatttgggttttggtctattgtcttttaactccaaatttgtagtggtcccgtaggtaaaaacaaagaaaaaggtatcacttatccatccggaaattgaggtatcaatacccaaaacactagtttcagattataaataatgggaactcaaaacaatagtcccattccatcccatctctggactgggaatatcataatcatagtatagtgggataatatccacattttttttttattttgacaaatttacaaattacgtatggacttgggtgtcccacttttttttatctaaaaggattgaatgagaagttatttgatgttggaattaattttaagaagtttgagtcgcttaaaccattccataaatatcaaactgatcaatttacaatttaattcctcataataaaaaaaccacaaatccctatttatacaataagaaaactaagattttcttttttcattggctgcgatttcaccactaatttttaaagcacttcttaaacaatatctcaggtgcaatttcatcttatcctcaaggtgaaatgtgtgaaattgagtcaaatagtctcccttgattgctacagcttgttccgccactttaaatttcaataattgatgcttccaatctatgttttcattacccaaggttccaaccattttattcctaaaatgatattcgtgcctcccaaactaaatggctggaagtcatttacaatggtaagtgcttgtgactcgagcaccacttctctacacactcccttattaattattgattctcccaaccctaatgtgactccatactcccttgttttgatcaataacaacttgttcattttcactaattccttggaaaagaaaatatggtagccccaaagtcaattataaccgtcacttcatgactaccaatattcctcttaatcttaatagtctttggagttgcatttcatattgttgaatgcaatgaaacttatattgtcctagtaatttctgcactatttaaagccaaattccatgcttttggaggccctagatcctcgtattcatgacaagtaataactatgttcaattccttcttctcacatcgatgtataccgaatgccatttgttatcacaacgtgataaattccctttcaatatttttcatgaacttcagcattagtgaaccttcgatatgggcctatcagtttgtccacgttgttcgaaattttggtgcccttccattcaatggtattgccatttcccttataattccctgaaccaacttaagaaccaaataaagattggttcttattctcgatcttggccccaaaatccatggctttttgcaagattcttggctcaaatagttgcaactcatctttgatgccttgttgcaatctgttcaataattggctcaatgcca

SEQ ID NO: 15057 - DNA, 6582 bp, Cannabis sativa
aaaaaagtataaaattaacttttaaattaattattagcgagttaattttataataattgtgtcaatctaaatacaattaatttgttaataggttaaagaaatcaataaaaaagaatattattataagtatcagtatcaatttaacttttaatataataattattaaattaaattatataaattttaatatttaattactctaataataatatcacactcatttagtggtgtctactgcctaatacacaatttttttttttttttaagcatttctcatattaattaaactaacccgaatccaattaaaatttcctaattttgtgtgagatttttaaattttgtgtgagtttggaatggtattattgtgtcactctaacctatttaacctattttgtcgtcgtgaatccatctaaaaataacaatctccctagtataattatttatttatttatttattatactacacctatactatagttgggtctgcatgcatgacgtggcacccataaacagtgggccccgccgtctgggatatgacaacaccatgtcataaacttccacgtgttccacttttccctcccgctgtgttcggggaccttgacatgggaaggtggaccccactctctaccctttcttccgccgtgacacgtcgatttacggcgcgtcaatatcgccttccctctgacgtcaccactcgtgatcttttttggtggacataaacaaatcctcaccgttcgatactcttctccttaaaatggattcaagttacaatgttaagagaaaaattccaatagattcagtgactcactctgttgaaactgctcaaactcatcatacatgtacaattgtagctcaatctattgccacgtgtacattcttaactttatcaacgtatatttaaaaacaggtggcaagtcagtaaggtaataagttggtcaagaaatttttggtaaaaaaaataacgttgtggattaaaagaacacaaaagaagaaaaaaagtagagaaagaagtgtgtggataaaagttgtgttttgtgagtagagaaaggctttgtgcaattacggtccgttctttttgggcggtcgatgggcccacattggaccgtatgggcccttctcactggaccaatttgtaaaagtggtgttaaatgggccccacatgagtaatcttagaccaacaagaatgcaacaacttaaaaaattaataatattaaaaaggaaattaattaattaataaaaaaaaaagcaacggtggaggatattttgacgggtgaacaacggccaaggaaagcaacttaaggggtggtggcacagcccttggtggtggtgatggtggtggtggaggtttcaactgtcgaccactactagaaagtgaatcactgagtcaactcgttactatcttagtcactatgtctttttcactatccaaaaaataaaaataaaatgtcccttatgttgttcttccaaattggtttgtgacttctctaaatatagtactaaagagcttttgttccaatccacttagaaaaaaaaaaagaaaatataaagaagaaaaaagttaggacgtaacttctcgtccaaaatatcaactagttgcatgtttcgtttggtgataaattgctgcgttttttttttctgatacaataaataaatatatttaaatttatgtatgtgaatatagtatatgatgattttttgactttatgactgaacacaacattatttggattctgataactttggttgaaataaaaaaaagaaagaaaagagggaaaaagtagtttggggaatttagagagataatagatatctctatatgtgaattaatattaagctagctagctagggttgggtttggaaattagattgatctagttggaaaaggagtttattttgtaaaagaaaggctttgatttgagtaattgaaaaaaaatattattaattttgtgaaaaggcaagtggacaagatttcattgtcttaatccgccgtcaatggttgaatgattagacaagaaatcaaagtaatccattgctagcttatcttttaattccaagaggcccccactcaaaaatttgatggatgcaccttataaacaaccatattcatattattattacttcaaaaatgctttcatagtgtttattgaattcgaatctgaacacattacgaaattaactagaatagttacaaaataactgttcgcaacaaccttacaacaatcttaataaatttcgtaccattacatgacttgatagacttgtagtatgtagcaccttaaaacacacattttcaaattattagttcaaaaatgctttccattagcttgaaccctattctgaactacgcgacagtagaaaagtaatcaaaattgttataaaattaccgctctgacaaatttaggaggaactcgactacaagagctacctctctactatatgattcacctcctttgaggattgttaaggggtattgagccccttcacaatccatataagagtatggagccaccttcatttcttttaaagcatatgttgagtgcctactcctaaatttaaaatataaatgtataaatgggttttttttttatatattttttgttttatgacacaatgcacagtcttgcaggtgtctttaggtattattatactaccattaatgatgagaaagggctgtgaattgtgatgaattttgtttggtattgtgtatatgtatgtacatggaatccaatcaacacaaacgtccttctttgaaataataaaatgtatggtcattgtgtttcatcatgattaaagcaaaatttactaatccatacgtgtacatatatctcatcatgtttggtgatgagtgcccaaaataataactatcaacttgttgcccctaattttagaattattaggtgcacaaacaaacctctttttattaatattaatattttgatcagctacatatctattctactattgggttggggttattattattgttattatcattttcttcttcaaatttttaatggctttcatttaattaacacgtgcatagaaaatgcaaaccaagattagcaaaataatccaattttgtttattaattatatccatgacatatattatcttatactatattatatttatacatatgcatctaaatgtagctttctaccaaatatattggaaaatttgattattaatgcataaattaatgccaaaattaaagagaaaggacttaacattttgacacccattgaaaaatgaccacgtttttgtaaaaattctaaaatattcccctcataatcttactctctcttctcttttccttttttccaaatcctacaaatttctatttttaccatacccaaaaactttatcatttgagcaatttttagagtcattcttagtgaaagatgaacaaatttctatgaaataagatccttactacaagtctattatagaaattggaggcaaatgttaaaatttttaaggttttagaaatgtgtaagagattttatgttgaatttattgttaatgttgatttattcaagtatattgttgttttgttacttgtatatacattattagggacactttgttagttagttgagtctgttatgattgttattttccagtttactgaattgttatgtttgttagctcatctacttaacttctagtgatatatataaatcacttctaatactcaagttaaagaaatgaatacaatataataagaattttttcatctcaacctttttctctatcttcttcttcgctcattttttatctttgaattctttcaacaataaattgaaagattaataatccttacatcgtattagaatcttttttcccatttacagcgaacatgacgagcataagtactcaaaatcaggtgaaacaaatgaatctaaaaaattccacctctagttttctggtgaaccaatcagcttcaacaaccacaactttgatgcttttaataaatcaaaatcccaatcctgatgaattcacccttgtgtacttcacacacaatctcctagtcaaattaaacggtcacaactttctgttatgaaaataacaggttctagcattgatccttgggaaccgtttacagaaattcattcaggatgttgctctgcctctacagttcttgagtgatgcagatcaagcctcacgagcatataatcagacctttcttgactgggatgttcaagaccaacttctgatgtcctggtttctatcatccgttattgaaagcctcctcactcgaatggtaggtttccagacatcttgcaagatctggacaacccttaagaaacacttcatgctgcaagtgtcttccaggattgtgtattaagggattcttacgagattgtgtatgaatataatttgagccaattttgagtatagggagagtaattaccaacaattattttttccttgcctttgtaatctgtggaagtgttcaagtcttcattgttggtcatgtgatgtgtggcaccattgtttatgtacaagttgtagacagatctggtgcaatcgaggtttgtgagaggtgagcttgaggggtttcatatggggtggaggaagttggctcctctgcctttgccaccataatttgtgttgattatttttctttccccacgataacttcggccaccattgttttgggaacctcgagtgctattgttgaaggatagattggcaagatcagcttgaacgtttgtgagagaatctgtggtaagttggttgattttcatttcttgactttggagcataagttgtatttcttgaagagttagatttttagatcttgaagtaagattaactgtgacggtctcatattcagattccaagcctctaagaatgtacaagatcagatcatcgtctaaaagagattgaccagcagcaccaagagtatcactgtattgcttcatttttaggatgtattcatcaatggacagggaacttttcttggtcgattaaagcagacctcttatctggagcaatctggctctcgatcttgtgcgaacaactgttcgaaagttgtccagatctcagtagaggttcgagcattgattgtcaaggctgttgcatcatctgagttgtcatattctccttaggcgtgtgtccttcgtttcagttagttatttttctgttagaaagtagttaggatggtttttagttataactacttttctttccttgcattatgtatataatcccctgtatcactctcttgaaaatcaatgtacagaatcttctttttattctcgttctttagctcaaacattgatgacatgaccaaacattgtctcggttatagagttcattagccaatgcattagaaattgatcgaatcttaaccaagtgaagaatgcagagtttggaacattacctgtaagattctgaggaggttgaggatttgttcccagaatgcatccatgaagttgtaagctcgagctgctgcaagaaccaaggatctccaccaagtgtagtttgatcgattgagtctcaaattgagtagtaggagattgttgtttggtaatgtagctttttgaccagaaattgcagctggagcttgccgattgattggatcttgatctccattattggccattcagctctaacaccaagaaagaaaataaaaatagagttgcagaaagaaaagaaagagaaagaagagagaaataaataaaagtaaactgaatgaagatagaaaagaaaactaacttctcaacctaaactgttaaggcaacccttatatttataaggatgagaatacaatcgagtacaagaggactgagctagcaaactattgttacaaacttaactaattaatcagttagttatgaaaataataaaaactgtttaactaactaccgactattaatttactatcagtatagccattttctactatttcatcatactaaaagggaaatagcacattttgttactactacaaactgatttatggttttatgaagtttattttctcataaaaataattattaaccactagtaagcaatactattagttatgttgatcaaagtataacttatggtcgggcttaaagagaaggtgtatattattttctatgagtacgtatagtgctaagtaaaaagagtggcaaatgttatttatttcttttaattaatatttaaatttaataaaagagtggcaagatttgggacaaggttttctacattaaaataaaaaacaaattagtaataaataaaaagatgttgatgacaaagggtgggtataggttgtatttgtttgcagagctgacttaaaaatatcgcagcttaagtctttgtacaaggtcctttatatcaaaaggccttatttttaattatcattttatatgtatatatatatataatataataaatattttatttttataatatgtagtataaaagcatgagataaaatttacctttcgaaatctcttgggggcctggggttcagaaaatctagagaaatcaaccaagcctttttggctaagtgggggtggaacatccttaatggaagtcagtctttgtgctgtagggtgtttcaagcgaaatacctcaaaggaaaag

SEQ ID NO: 15058 - DNA, 2815 bp, Cannabis sativa
tgacatcacaaattaaaaatcatatgattaagtgattaactttgagcatcatcctcgaaaggctcattattaatttcaacatttacttctggtgcttctctgtcttctgattttgaatccctacgagcataccaaattgccatcaaaatgaagaaaacaagattgactacacacaaaatagccaaaagccaatagtacttatctaaacgactcttattcaaagtgtattggaaccaactaggcttaattcctttagaactagctttaccaacaacataaactgataaaacacttgctaaaattccaaccccagatattccagaagcaaatatagtcacatatggagccatggtttgaggtaattgattggctaacattctagttatgttattctctaaaattccatctaaccctccaaggagaagatattgtggtaacaaccaaaacatggtcatgggaactgtttcttctggcttgtcaactaagccatgacttacaacaactcctaatcttcgttcctccaccttagctgctgtgatggagcataatatagcaaatatcatcgacactgcgatcccaatttgagcaacaaagccgcggtttaaatttgaaatacgagacaaagatcttgcgaattgtgagtaggaggatgcgtaataagatttcgattgatcgtaaaaccaaaggaagattggaattggaacagttaactttccaactttttgattcatgtggtttgcttgttcaatgaagaaagtgtttccaagggaagatactaatcctaccactaggaaagataagcatatgggaatcatacatatcatgctcttggtttcttccacctcggaaaccctacaaagtctccacttattcttctcttgttgttccaaactttcactttgaactataattgcagccttgtctagacacctatatatatgtgtaaaacaattatagttatactttcatataaatatatagaatgatgataagtgcacactacctaatacatgcataaaacaataacacaatgatcattgaaataaatataattagtgtaagatttttatttgggcttgattaatagttaatgggcttagtataaagtctaagtaaagcagaagtgtggacttttctaattaacaaaaacctttgatgagtagctcagtccaaatagggttatgtagctaagtccccttcctaactttataaatacatattgtctcatcacaattgtatacttttgataatcaaatataaaataaaaactgcttctgatttaattaacgacctatagcgaggaagatttagttgataatattgcactatcaaattgaagtcacatatggatcaatcaggtatgcatatctaattattatatattattattttatattatatgcaaattgatcttgggtttattattaatttatctaacaattagtactaaaaagaaattgtcatattttaataagtaccttaggcgaggagtatgaggaagagaaggaagctcgatttgatgtttctcatataattgattggtgtctgttgggagtttatggaataatttagaggcaggcgatgaagactctaaagacagtagtaagaggacttccttgtggtttggcatacttgtaagaacatgagctagtcaagaaaatagtggttgcaaccacagtacatatagctgggattccaaacctcaaagaccaaggttttatgaaagtaattgctagaataatggctatgtagacaataaccataccaaacattccaaagcagaaagaccaaatctgactcgcttgaacttcttcttcttcttgtgtttgtctttttatagtggcatgttcaatcatgagtgaatttagtgatgttgagtgaccagccattcccatgacaattagagctaatgctgtgtaaaaaaggaccttttgtgcttcaccaatgcactcaggcttgtatgcactacaagttcctgttgcatctgccaacactggtggagttgacattgtaataaaccctaatccctacacattaattttataaaagttatatttattaatatagaaatgttattagaaacgtaagaatttctaacattttatgatgtcatataatataaaatatcacgtcatataagacaaatttatcttgtcactaagattttttttttttttttttttttgaaaacaagtcatgtattatagcagaaacaatttacaacctaaaagcgcctaattaataaaaaggtctttcaatcaaatatctatacaaaaattgttaattcattgaatatatcctcattttttattttgcctttgtcaaaagcacttaatctatttacttgtcactaagatattttttcatcctgatatatatataaatatattatattcaagtgtaaaattttggttaaaatatactcaagaaaaaacctcaatatatatagagtttgacattaattttaagggagattagaagttaagacttcctctaataaggtataaaatgacatatatttatatatatgcattgttattggatactagtagtgctagcacttctagacagacctgtctttaatatttttgaggccctattctaatttaaatacttagaccctaataaaaaacgtgtaattgtaaataatattttcaaatattatcatatactaatatatatttgacaaaattaagcacaaaaaaactcaaactaatatattaaaattgttattcacttttgagtgaaatataaactgaactcctgatatatgtatatcaaataatttttccagcaactcttaatattaatgata

SEQ ID NO: 15059 - DNA, 5625 bp, Cannabis sativa
  modified_base (5593)..(5598): a, c, t, g, unknown or other
cctttgatgcaaagagtgaacattgcataccccaaatcttcccttacctatgtatagtaatttctcacttaatactaccctcccaaacaaagacttcatatacccttattattcactataagctagcacaccccactaatcctagagcctaacacttttcttgctttgtgtttagtgaactgtgtgctgctctctttcttacttcttgccaaggttgattcttttataacagctttttgacctgtcattactattgaattgttaatcgtaatctatttgcataattgtgtatttgttccttctattgtttttatttaagcataaaatttgcatattcaggacattaggtttgattcctacctaccagtttacttatcaatttataggtcttatctttgttcctgactgctcttatcattttctattatccttaataaacaaaagaagaaaattgaattggactttttggtatttagttagttgtaaaagtctttaagttatggttgttggagtatcattggtgcagaaatctgataatgaagtatgtcatcctttcttaggtgatttgggcttaacattgttttggctcatgtatagcttgcattttatccatcccgaattagtaatgtaaataagttggtactactgtttgagaccgcctttgattgactaagactaattccatattattttcaacatttaatttctggtttccattttaactatttctaagcaatgtatatatttgcttcaatgcagacgagtttgaattcgtaatgaagagctctgatgacgaaaaagatttggcatatgggaattatgtcccgaaagaagtaagccgtggtttaggatattctggtgcaaaattcgttgatgaagtacttaatggggaaaatgaacgttgtctcgagaattttcgtatggataagcatgtcttttataagttatgcgatattttacaagccaaaggcttactgcgccatacaaatcgaatcaagattgaagagcaattagctatattcatgttcattgttggtcataatctgcgaactcgagctgtacaagaattatttcgttactcaggagaaaccatcagtcgccattttaacaatgtactaaatgcagttatggcgatatcattagatttctttctgcccccaggctcggagtttgttcctacagcaatttcagaagatcccagattctatccatattttaaggtaaaagaaaacccaagtgttaagtctgataagtatctgtgtcttctgatgtctgttttgttttgcttcaataggattgtgttggtgcaattgatggaatacatgttcctgtaatggttggtgttgatgaacaaggaccttttcgcaacaaaaacggctcactttcccaaattgttctggctgcttgctcattcgatcttaagtttcattacgtccttgctggttgggaaggttcagcatcagacctgcaagttctaaattcagcactcactcgacgaaacaaactgcaggttcccgaaggtgtgttcttgtcccgcttctcggactatatgatataattcatgatatttaagaataaaaatgaatgtgaaactgatcttttaatattgttgatactgttaagcataaccctatatttggtagaagaaaaaagggagaggaaagaaaaatggggagaagcgaaatgcggatagaaccaccaaaattttctcctctaattgggagagaaaattgaagagaattttcttacaaaacaacattgatgtaaaatgagaaatgagaaatgctaaaaaaacactagtggtacttagccggcgttatatcgctgttggtacaattaagtttcgggtctcataatttcatgtaataatttttataaaatatcgctaaccacttgtaaggtgccatttttaagtagtttctagtaccactggtgtctaatagtaatgttcatgtaaaattactaatttattttattaaaagaacaattttgttaataatttaagggtaatatagtaattttgtaacaagttaattttctttcttcgtaccaaacatagtgtaaatcttgatgatgcaggtaaatactacctattggacaacaagtatgtgaatctacctggtttcatggctccatatccagatgttccatatcatttgaaagagtttcctgatggttaccatccacaaaacgcgaaagagctatttaatcagcgccattcattgttacgaaacgcagctgatcgaattttcgggtccttaaaagctcgattccctatactaatgacagctccaccgtacccgttacaaacacaagtgaagttggtagttgcagcatgtgccatacacaactacatccgaaaggaggaaccgagtgactggctttttaaactgttcgaagacgatgatttaccacaagaggagtcttctccaccgccgccacctttggtggaatttgatcagcaaccgatgaagaatgtcgaaaattctactggtttggacattcattttgatgaagaacagatagaattgtctctgcaattgagggattctattgcaactgaaatgtggaatgattatatcaatgatatatcttctctgtagattctttgtttgtgatcatagtttcaggctgggtttaaaaaaattggacataaacatgtgtcttctttttttttttttgtctttttaatttcttgggggtgtaaatttggaacaaaaaaatgtttatagaaatgaaatatactattagaaggtctgaaacggagattcgttgaattgaatgacgaatgtaacggatgtcggcccaatcagaaagaaattatgcaaattttttacagaattatgttattagaaattaatccctacgatcgaagttatatactctataacacctttattcatacatgtttcatgtgaatcttacttttttttttttcttaagaagataaaaaaaaaagtgaaaataagtactcatttggtattttgtgttttattgaatttaattcaaattttgttacgtaaattgttaattatatataattgagaccaataaagttatattaattaaattattattattttaattataaatatgtataattttaaattatttgatagtaaatgttataaattattgaaaatatagaattttaaatttgtatttcgaaaaatttatctttcaaagcttctctcatgtattacttacactaactatgcatgtttttctcatttcgataaatcacatatgtattgggttagaattaagtacaatttttaataatttacataacactaattgatcaaatgtagtaagattctgattattggatcaaaaattttaatatttttatcaggatgtcactatatcaaacccaaatatataatagacaatatttgaaatatgtataatattgtagacattgtaattatgtaccactcacaattctcctaactctctttttacaactatctcagtaattgaaaatccttcgagcaaacttctcttctctaaaagaatctactttagtattttttttttctttacgttatatatagatatatataaaaaatttagagattaacacacatttaatattctattacttttgcagatactactatatttaccatactaataataattattaaaataatttattcttacttaatttttgagggaattattttttaaatttctataattttagtttaattataaattacttaatataaaattaagcaccttatttatttatttattttgaaaaagtgagtcacgagtaattgtatgttaatttgctttgcttaaccagaaaaaaaaaaagcaatgattcatattcattcattattttattaggtacctctacaactcatgctttttctcttatagtccagtctgtatttttttcttttttattattattattattttaaatttgattagatgaaaagaagaaaagaaaataaaataataggatctcttttttatataagtatttatttattatttacttaatttaaactaaaaatctattttgtttgtttaataaagatggagaaagaaaattaaacatgtaaaatttcaattgaataatattttatgaattattttgatttgaaaagaatggtaaataagtaattttaatttattatttttataaatatatataaatgattgtggattaaattgaattatgcaaattaaaatgaattgagtatttatattaattaaattttaactcaattaaaatagaaccctaatttaaaaaatatattatcaagtgaatatatatatatacatttttgtaagaaagtgaatataatattttcatacctattttgtttgtaaaaaataagtattttattattattagtaataatttaatattggattttatatttaatattaataaccttttgactaaactatccaccgagctaaaacatataacacttgcataattgcattggtgttgggcactcgtactaatagaaatgctccacatcattactccaaaaatacctctaaaaattagatatgattaattaagatttttactttataaattttaaaattttttcatgccgttaaaatttcttctcaaactattgaaaatattgattatcatgacttcaatctaatcccgttcaattttactaacgtgacgattgtctatgtactacagcgtgcctctaaactttaatatgtaccaaattatactctttaaacattcacatatacaaatcgtgtctactgaactttcatctacgtcagatatccgttagtaaaattagtcgaaagttcttgaatataacaatctcaattaatcgagagtgattttcgacaacctaaaatattcgagagtacaatttaatacatgttaaagtttagggactaataaaaaccctaactagtctctttttattaaaatttactattaactgtatagtatgtcacctcttgtgatttcccacacccaaacatatcactactacactcttactagtgtcttactattctctctatcttccacaaaaagaaaaaaagaaaaaaaaagcttgaaaataaagaagaagctcatcatatccaaacttctaaaaaaaccatcacacaaaacaacacaatgctgaacacacacacacaacttttccttttttgttttgtaaaacttttggagcacaatttaatacatgttaaagttcgaaaaataaaaattttatttaatccgacagtcaaacatatagtgacagacccaaaattaaaagtgagagatatttagtaagacaatggctaaaataaacataaaaaaaaactatttttttagtgagatttaaactattgacttctatactatatactatctaacttaaccatatatttataaatatcatcttttattataaatatatatcgtaattaactaaaatatatatccaattttttttcaaagagagaattccctgcttcgattctatgtgagttcgcccctgcccgatcagaggcaaactcacataaaggtagggccgtcttaaacattttggaagccctgttctaatttaaaatttgggcccctacaaaaaaatgtaatttnnnnnnaatatttttaaatattatcattcagtt

SEQ ID NO: 15060 - DNA, 11252 bp, Cannabis sativa
aattcttcacaccttttccttcactattgagtcctatatataataacaatacccctattacaattacacttatgccctttttattatatcccaatgcctatcagaatgtttacctggggagtatatggactgtttttaatgtttacctgggcaaagccctgagctggggtgtatatatatatttggttaacaaagttgaaaaattacacagtaaaaaaaacctcaagcttgtagctattttaacccaccttctaattgggtatctattatctagggggactattttgggaagtagacaaaatagtcctgtccccaaaaagcatccaaacatgaaaccggacaaaactgtctagtcccttcccttagtcctggccactaccactagaaaaaataattctactgacgaggcagtgtaccagaaaaaccattcaactaagattccagaaatttaattaaacttctacaagagaaaacagctcagaaagataaagaatcaaatatcacagcagaaatgttttcttatacccaaaagagagacacaagtgcaatgaagataggaataacaaaattcaaaaaggtcacaagatctgagttttaagtccctgctgagtacctaaatagcagtgctatagttttttggtcctcaaatattgtaggggttaggcaggggaagcctagtttattttttaaagagagagattcaaaaaggtgcaattctgagaaatgaatgtacctgtatgtaattttcataacaccattgcgttgagtaatttgtttctttccacgaactgtaaacctaaaaaaaataattaaaaataaaacaaggcgaatagactttcttaaataaaaaagttgcagctgtgctcaaatttgttcatttttagaaagggatattaacccccttccgattattactcttgccgtattaaaaacttaaccattagaccaacccatatactagttagtgtttacaaccaaaaccaattataaatctaaatgaacaacagcaattcatcagaatacatacataccttaagcagtgcaaggtgatctccaacattcccagtatgaaaattcaaacgtgcattgtcagcatggacttgtttgtcttttggtctgtaaaatattgaattgccaatagaaagcatggcagcaatggaaataatatcgtctgagcacttgtacttctctgaagcaacaattgcttttgacagcatgggatcaagaggaaattctgccatccgtctgcccactttagtcagctcacccactttgtttaaagcactcaaggcaaaaagcagttctaatgcttttagtagtgcttcagaaggtggtggatccatgaaatcaaaatgtaacaggtcatgaataccaagactcttgagcattagcacaacatttgcaagattagttcgttgaatttctggtacagtattgtcatctaaatcattataatagttgtaagcagtatataatcggaagcactttcctgggcctgttcgaccagatcgacctgccctctgatttgctgatgccttggatattggactgattagcaacgattccattccagtcctcggattgtaagacttcatcttgcaaaaacctgggtcaatgacatatttaatcccatcaattgttaatgatgtctcagctatatttgtggcaaggacaaccttccttgccccttcaggtgttggttcgaatattttagattgtagctctgttggtaggttggcatatatggggcagatgatcaactcagcaatctttgtaccaagaccccgtattctatgcttcataatttcttctgctgtctcaatttcttcttgacccgtaagaaacaccaatatatcccccggtgattgcgtcacatggatttgaagtgcagtcactattgcagcatctaagtaatcagcttctggtgcttttgtataatggatctctacaggataccttctacctggaattttaaaaattggagcagaatcaaaataatcactgaacttctctgcatccagggtcgcacttgaaatgagtagctttaaatctggtctgaaacgagcaatatcctattttacacacaaatgaaaagagggggacggttagacagccttaaaaacatatacttataattttcctacaagtacttcatctaggacaaagcagaggtggccaaaagtgtttaacaccaatagttctacatattcacaaggcgcaaacacacagagtattcttgaaaatgatatgtttttcaatggatcttgcaattaaactcataacaagatcatgagaattcgagtaacttaacccaaaaaaaaaaaaacaaaattggagtttattactgagattttgagcttacttttactaaaccaaaaagaatatcagttgagagtgtcctttcatgggcctcatccaccatcaccacgctgaaattttaaaaggcatagcaagggatatgttaaaaacaagacgattagccatagacataatctgacatagtatctatgcttacctgtagcttgccagatctggttctccaagaaattccctcaacagcattccatctgtcatatattttagaactgtcttgtcagatgtgcaatcttcaaaacgaatggaataaccaacctgcacatgacataaatgtagttattattgccaagaaaaatcaatttatgattacctatattataactcaaaacttaaaaagaataaatcataagtacccataataactcaaaacttcataaaaggaaaaccattagtaccaccacccaaagtatgcagttttcactaccttaaatttattagcctcgttaacataaaggacgaaactatatcaacaaacacagcatacctcatgtccaagtttaacacccatttcttgagcaaccctggcagcaacactcatagcagcaactcgtcgtggctgtgtacatccaacctgcaaaagtttaaaagttatttaaaaccctcaaacatacatctccagcccactttattgccatgaatgagtaaaagagttttcaatcaagcttgaacaaagaactagccacaacagaattatatacattccattacaaaagtttagtttccaatgacacagactagtgagcaaacataatataaataggtatcaaacatgtgggtttcaagcccacttcattaccataaagggatcaaagagttttcaaccaagcttgaacaaagtagccacagcagaattatatgaactgccattacaaaaatttagttttcaatgacacaaagactagtgtcttgtgctcgacaaatcaagaaataagaagtggaagataaaaactcttaaaaagttcaaagaaatagattgtacacaaaccaaataatgtggaacaaagagatcaaactaccatttcacagttaagagaaggggaaaaaaaaaatctctattttaaggtctataaaatatcaaacatagattacaaaacttctcctcaagtattcttcagataaatgagaattataagaaaaaaaaaaaatcaaacttctcttatctgctgtcagcaactcccaaccccaaaaaatgtaatttgaacgcaatgaactgtaaaattgcaatttcgtcgccaattcattagctaatagtaatctagaagtttaaaaaaaaaaaaaaaaggttgcaactttacttgaatggaaaagtttacattaagggccaatttggcacagttgtactgtggggaaaaacagttgtagttgtactatggaaaaaacacttaactaagtatttaataaattataaattttaaagtgctgtgagttattaagattctattataattatgataatattataacctagttcattataatcacaaatatattaaaaaattatgatatataaaatttttattttctatattacatttaattattttttttgtaggtataaatttatacgcatttgataaaaataatttataatatttttatcacttgtaaaaaaaaattgcagtttataagaaactctaagttacgtagtttgtttataataaaaataaaaatattttttaaaacaaaataaaaaatttaaataatattatttattttaaatattatttattttaaatattttttccttcaaaaaaatatttttattttttgtaatatataattaaatatatttatagtacaaaataatttattagtcttttaattaaaataactttttttaaaagttgagttgtaccagctttagcttttagctgtagcttctccataaattttataataagttgttttttaaccgcttgccaaacacctttttatcacactttttttaaaaaaacagttttttttcaaaagctgtgccaaacagaccctaaatgtagtcattaaaactgaagttatttaagaaaacataacactataacgtaagaaaactaaacctttccacgttttgtgtatccagcttcatgaagatattgaggtatttgtgtggtctttcctgagccggtttcaccaacaatgactagaacctacaagccaattattctataacataagaggataattataccttcatagataagtttctcaaaaaattattcaaatttcagggttgaatgatgtttgcaaaggacaaaatcaagaaatttgctcatagtcaaggtttcaagcatattaaaacaagatcatattcagaataaaattgaaagaaaacctgatgatcattaatagcttggagcaactgatcatgatattgatacatgggcaaagttttcctctcctcctgaatgagaaaacaggtagcattatacaatttaaaatataatcttctactctgccattcaaatttcagatacaactatccagtggcagagcaataaataaagtactagtagtgaaactaaagaaagacaaagaacatggatcatagtgttccatagcatctgcaactgaaataaatatgcttttaatgtaacataattctcgagttatttcatacctaaattatctaatatcaagaaatttacacattttcttcatgatatttcttcctaagcaaagtaaataacttaactgagtctttgaaaaggaagaagacaaatcacaacattaagtatttgtagagtgccactaaaaaattctacctgcagcttctcgaaggctgattgtgccattgacttctcatgtaaatcatcatgttcaacagtaaactgcacaaaaaagtgacaaatgaataagacattggcctcagcaaacaagtatgaaactaaaacccctaacgtgttaaagaaaatcagttcaaagcaaataacccaacagaaacttatcaaatttatacctcatcgccatccatcactgaggccttgataaaatcaatctggtcctcaaacacaaacctaaaagttaaatattatgaattattacatacagaacatgctagcataaacaaaggtagcttcaaatttcaatcacatgcatctacaataatattgttttcctcaaaatgaaaagaagcaaaactaagagaataaacttactgatagtcatcagtcgtttgttttttgttttttgaaccaaatttcaatgttgccttgcctacaataatgaactcaaaataaataactaaaatcataattggagccagcttataatagaagaatcttaaaacttcagcaatatttcaccaatttgatgttcttcccaggcttcctgttctgcaaaagggttcattttgtccccagcagttgggtctctatacacaaaaaagaagaaatggttcacattatacataaatgcatttcttgattataaactaatatgcctgacaagcatattgtaaatatcaataaaagtcatacaaaaggttttcagtatgtgagcttatcatagttgcggttcaaattacacatgtgaagggaaaaaatgtgacaatgtaaacatctccatgcattgctgctagaatgctgacctatagcgttgcacagcaacagaaaatcttttttcctggttaacgccaccatcctgatcatcataggcatctggcatcctgtactgtttttcatagaggaaatctagaagagtaagtttatgatcttctgagctattaggagcataaatatagataagggcataaacagctgaaaatatgatgggcataaatttatcaatatgaagaaaacatgaatcaaaactagcccattacaaaattagacttcaaaaaagaaaatgaagacactgaaagatcaactacatgagaactacaatcaactgaataagtacataaacattgtattttaaaaaaaaaaaaaaaatctctctcctctttctgagaaacatttatatgcatacaagggggttccatggccctttggaacatggaaagcaccgaaaccccactggttttagaaagaaacaaggtcattaccccagtggttttggctggaaaagcctttctgatccatttgacgatcagggactccataatgactggagttttagcactgataccagagatggcaggtcagttagaatctgtgaatccattgaacatttattcatggaatgtaattacactcaaaaaatctggtcttccttgtacaaggaatttgagctagtttgggtcttgcgtcgattggtgtctcaagctttgatgaccgaaccagtgggaggcaaacgaagggttatactctggaggattgcaatatggctatgatttgggcaatatgattgaaagaaatagcagaatattcaaaggaattgaaagttcggcggaggttctttgggagaatcaaattttggacagtatagtgggtctaagatccaaacattgtgagaatttatcttttctagacttgagtagggagtgaaacactgatgtattagactctaaggctagatttcttctatgtcattattttccttgttttgaatgtttaacaaggtattcctctgccacaagtgaggttttcaatacataaccaggggtcagtctaagaaaatggcctaaaaaaatacagtataaaaaatgaacaaattactagaggatgtctaccatggcttgaaaaagttcttaattacctcgtttatatcatcaattgtctctgactgcttcttcacaagctcatatatttccttcttatacctatggaaaaattaagccgataaagctataatgaggtcaccttcaatgcttgtgtacgtgttgtatgcatgtataaatttacaaagaaaaataaacaaatgaatgaattgagcaaaggctcatgagcagatgccacaaacatttcacaggtctttacatgtaccaagcagaaggaaaaccattcatatgcttggttacaatggatagttaaaggaaataaaataaattacctaaattcacgactttctacttcagtcaccttcacattgtcaaatagatactgctcatcttctatataatctctgatgcacaaacacgaaattggaataagccaatgcaatcaattaacaagaggaattcataagagaaacatatttgcatctgaaacttgcaatatttccatacctgatttcctctagtttcttttgttctcttttcttcaaatattcttgtcttgaaaattttctggaatgagggcgagaaatcaagaaagcattatgaaatatttagttaaaataactagtacaataaatcataaaaaataaaataacaaaacaaaacaagttaaatcacaaggtacctgtaaaatagctcataaaaataaataagcaagttaaataaaactataattcagtaaaataaaaaaaataaaaaaataaaataaaaaaaaaaactggatgtacaataacaaaccttaaagtatcaagatcatcttcctccaaagcattagaccttcgaatagcctcctctgtgaaacataacagacatcatgattagccaacttaagccaaatatattatgaatacatatgagtgtgtgtataacaaaatgcaatttagttgtaaacacactgccatttatgccctgaaatacagatggacaagtcttaaaatgcatgcagcaacaattatgcaaaactccctattatttcttaccttcatccttttttgataactttggctccgttagctgtttccatcaaaaagagggagggaaaaaacaaaaattagcaacttagatcaagacaacattctgatttcaatctcactagaaatagtgacggaaatgaaatagtaaatttattacttgaaatagtaaagcccagcacaggccatagaaccaccatttattgttaaagcaactaacattgatttaccatcaacatttatcaaagaaatatttttatgagaagcaaatttaaaacatctaagcttaggctaaagcaaaaatgagcgtcagcaattcaatatttctgatatcaacagcttgaatgagaaatccgaagttacataccttgcgggtggctgctgcatctcgttcttttagatttctctctagtttctctctctctttctgatcacgtaacatttcttctgactgcatgacattataaatacatacctaacttagcataatagaaaaaattacaacagaaaaacaacatctatttactttaccagtagaattagtagaaagatgcagaaaacaagatgtcaaatgttttcataacatttcaaaaagactggtatgtaacatcatggaatcataacattaatgagaggtactaagcacgagtagccatgaaatgaagaccaccaggtgcaaatctcaactatcactgaaacattgtatccatagattaaatcagatatacactgcctagtccagtactaattagaaattctaaaattactatagtgaaaactatgatgcaagaaagataggataccaatgtttctacaagagcctgcaaatttatatttatatttatatataacagggactgaacccctcctgctcccaaacacactcaaacacctaaccacttgagccagcctcaagtgaccacacatatgaataacaaaatacctcggaatcatcgtcttcatctgagtttgctcgtcttttaactagtctctgattttccctctgtgctatgtcctggacatcacaccattcagtcaaaagagaagtatcattttagaccaaacatcatttgcaacgagctacaaaaaataatgagcatatctgacaaatctgaaaaactcaacctcagcatcgtcatcgtcatcttgaacatcagccttcttcctaaaccttttgttacggaatgttgctcctctttcattagcagaatcaacagaaacaactccactagcagcaccacgattgtcatcatcatcttcgtcatctgcatccagtagagcatacgtcttcctcgcaatcattgccgcttctttctcctgtgcttgataaacctaatgttcacaaacaatgtagtgagtaaacatcaacaagtttcatcatgaataaacaacagcatgcaatatgcatgatcatataataccgcaactcaaaactcaaaataacttaatcccattatttcaaaaacttacacttaatccagatgctttatggggcaccctgttgtagatttcttcagcaaaagcacgtgtttcgctagatgaaggtaatccagactctacaagcttgctccacacatctgccggtgaatttgcttttttagctacaagaaaccaaaatgatcataattcatatttatgtttctagaaaaatcatagctcatattttatattatatcacattttgaacaacaatcatccattaattcaaaaacctgaaaagatgaatcaaccatatctaaggtaatggcctaatgagaaacttacaaaacccaatgacatactgaacgagagtggactgagaatatcccaacaatgacattaaattgtcagatacccacgtcttcaaatttccgtcgctccccatttttgctgcaacaaaggttattttttctcaacatcatacatagtttgcataaatcaaagtctcaaacaaatgtactcatcttataatttccaatataacttatttcaaaaatatacgtatttacggcaaattccataaatttatcatcttccaaacagtaacagaaatcaaaatgataatacattatcatcatagatgatcttatgagaacttttctatcaacaaaatgatatcatttctttgccctttcctttttcactttttaaggcaatttaaatactagggcaaagaaatgatatcatttcaagcctatagtatactacgtacttgattcagatccatttactaagaaatgttcaagcctgattgcgttggcaaacaaatataaattagttaaattatagcctgccaagattgttgtccaatctccaactgtaactagttctaaatcaaatcagcataacttcaaagagttcttccatgtgatactgatatagtgagtttcataaatcaaataacagataaagaacgaaaattgacttagacttcacgtgtagttatttaaaacctagaattaaagttcagctcaatattcaaaccacaagattagagaaaaaccctagaaagagtgtagacaaataagagagagaaaccacaaatggaaagtttcagtgaccgacggtggcggtgttgagttgcccctttcgctccttttcaaatgctattcggcagcctgatgaaaaccagtagtagtagtagaagagggtaactgcgcgggaaaaccccaaagatgagagaaaagaagagtttcatggaggattatacattggaaacagagataaataagtggaaaaaacgaaatcagactacattggtagacattcaacaaggaatcagcgaaaaccgaaagtggataatacatatagcagtaatacatactactctttaggtgtcaaaactggaatttctagtgctcaacaattagaaaatgacgatggaacttcacctgtgatgagataccaacggcttttcagagcacatctgcagaactcgagcctttcgttttcttgtcgtgtgtttctcgaacgcctttgattttcaattttcagggcgttctctaaaaaaatacatatataataaagacttaactttaatttgctgttacatataaatactttttaattttttgcggtaataataatacttaagttatatttttagaacttctgtagttactagttaaataaattaccacgtgacaatttctaattggttcaagtcattaaatttttagagcattgctatgaggcaccagtggtgcctagcacct

SEQ ID NO: 15061 - DNA, 12903 bp, Cannabis sativa
gagaaaactaacaaaaagttgtggccaattaaacatgaaggcattgacaccagaccttatagcagttagtgtgacagcaaagtcaagaaaccttagtactaaataactgtagaagatataacaaatttcttccacgcacacatgtcaaaaaaaaaccctgaaatttcaaacactgaaaatcaaactatcataagcaacaatatacaaggtgcataaatataaaataaattattattattgttattttaaaaagaataaatataaaatatatggattttttttaaaaaataaaaaaacataaaagagcatgttaagaaactatgtagaaagatacaaataacagaaagaaagcaagcatcaacaacaaagaaagcagagggaatagagtccgagtcatacatgctattccgaggaagattcatggcaaccagatttttgaaaacttcttccctctcttttttgtgaaacacaaggagatcattacatccgtccatgctaaatatctcgacagctacaggacgcaactggtaatcacgcttcaaaatctcatgaacactattaagcttccacatacgccaaaggtgagagagatgtccaccagtacacactttctctttcccccacgcaccaccattataggcccaggctcttcccccgatccatggcttagcagttgtggccgaaaatgaagtggacttggactggaaatcactgcttccattaacatccttcttaacacctaaagcctgatctataatagagagttcatcctcacattccttttcacaaatggaaccagactcgtcgatataaaagttttcaataacatacaggcaatgttcacctattagaaaaataccatcatgcttatcaagaccaacaactctttcacaattatatctgaatcgaattttttcaaatggttccaaataaggtctaattaggtattctccattatcatgaagatctttatccgccttatcctctgaaacctttatgtcatcatttctagcagaagatgattgtctaggagaacctaggtcagatcttccttgagtactgtcctctatttgaacagatactgcactagacttgccgccaaactcaagagcagagtgcagacttgcatcatttacactactagctctatcatcattccacccattcttaacagatgatgcatctctgacattatcaggttctttgtatactgattcatcatacagctcatcaccaagatcattctgcttggttgcatcactgaaaaaatgaaaaaatgattcagaatcagtgtcagaagtattaggagcgttctcggcttttgttttggactgctcttcatctccaaattcaaattgtccatcaagaacattttgtatagagtcaattttcagcttgcagcgctcgagctttttccgcatcctatatggaccttcaatttgacaaagctgccattccggatcctcagtctccatggatttacgcattggaaatattcctcgctcatgtacaagttgttgtagatggttttgccactcactctcagcatgcaaaatccacccatacttatcttgacgaacaactctaagctcagtggacattgcatcacgtaccaattccaatgcatatctccgctcattcacctgttcccagtgctttccatctgacttcgaagtatcccttgattttcttcccatttcccttcttctacgaccctccatacctttaattctcacacccgggaatttcgcagacccagcaataaactgaacccacattatggctgcacactgctcaagtactttattaacagattgttcacaactctgaaaccaatcaaaaaaagaggataaacttccaatcaataacttatcaaagccaccatgtagtaaatccagctgctgtccttgatttggtttagaaacaagtaagtcttctaaggcagccctacgatgcactagaagatgcttcacaatatccactgccatgttctgtacaatccggcgctggtctcgcaaaagagatattaaattcacacagagacagcaattaagatcggtgtcagtattgctaggacaaaatataatttgcctatgggcaaccaataactctaagactgtgcagatatcaagtcctgaatcatcttgggaagagttagaggacattctcttctttggttcaatcagcaaacctaggcatgagaggagatcttcttcaccaattgcaatcaaaaacgatgggagaaaacaatacaaaatcatacgattagcatttttcaacattgaatgaatgtaagtatcaagttgcctgcttccccgtgtgatggataaaagactctttccagtaggagcagcttcttcaactcggccgtctttgtttgccaattgtaacatggatagcaggaattcaagagttctcagcacaccagctggttggggaaaagcacccatatatacacgatccactatcatccagcataacgcatccaagtttgaggaccaccgactcttgtctagcttcttttcattttcctcatcatcacgcaggagacgcctttcaagaaagttcatcaacctaccaagacaaaggccttgaaaaactaacactgcatcagcatcaacatacagtggaacactttctaagatgctctctacaatctgtgatgatttcaattgctcagtgataaaatcagaaagaacttctgctgtaaaatccagaacagcagttgctcctgcacaacaaggaccaccaccatagccagagtcatcaatttctagaagtagttttggactaaccgaaaaaatagcatttacagctaaaggtccttgaacactagatttcacttctagagaaggttcaacttcaccagtagacaaagaagactccacaggagcagtaaccaagggtgttttatattcattattgccagaactgcccaaccaagaggtcaatgctagaactggagacgctgtgggtgtgagtgggatagagttggacttctctgataaaataggagaatcgagcatagtaaatgaattggaactatgtgaatctgttgcctgtattggttctagagtccctttcaaactacggaagctgaattcattagaacttgagcttgcagaaacctggtcaacaccgtcaatatctaagctcataacagctggagcatcactctgcaccactttgtttaattcctgcagggatgacgtaactttggtctcttctttatcaacaatgacaatgttttgggtgacaggaatatcctcagaacttgagcttatctgctctttagggaagcttccggcactgatagaattattcacagattgatcttgttcatgaggcaagctagaaaacgtattatgtgaactgctggtatcatcagaatcattcatgttcttctcctctgccttcaaagaaagttcctttgccatctttaccgcatgggcagctctgcaaaataccaagtaatcaatttaaacgtacagtaagaatataattgcttcagctagaaattctaaacgataaatttcaccagctttggaatataattaaaccatcatctatagaataaaataaaatgaacagacaaacctaacacatgaaaaataaaggtcaatgcagctttcaagaaattccgctcgtctgcatacagcagaaaaagagggacacatttttgcaagatcaaccataaatctcagaactgatgttgcagcaacaggggcagatgcctccccacccattaagcgtgctgcatatgtcttgtgcatcaatgcttcaccttgaagctctcctatcatgtcagcattttcctcaacaagctctgctacgaagccagcacttacctgtgaaagattgcctgtttgatgtgcaagcactgattgcatgcacaacctatcaaaagttgattttgccatggtaatcacagattctaacagttctacaaactttagttccacattgcttccatgacttggcattagagcatgaaagtctagcatgcggacttccggcagtctaggatacactggcttcccaaatatcaagcagaacagaatataatatatatcaggtgaatcatagaaacttctaagcacccgagccaaaccttgataacctccactactgcgaaattttagggcaaatgtaggagatgatgtaagacagatgccaagcagcgtcatgatccatctcatactggtagggtgaacagcttcatcaagaaaataagttatcaacttggaagaaacatttttatgccactgttctagcaactcatccgattttatggttacttgaagatctataagcatctctagcaacatgttcctgactattacatgcttccccattgactcacgagaaaccgggtgccgagatgttagttcaggcggatcaaatgtcataataacaaaccttactacatgctccagttcagaagagaggaacccatcttctagaattacaccaagcagtacaaccagcttttccaaaacaggaacttcaacatcaccccgctgaagggttacaagtaagtgttgaacaaggtttattcgacgcagaattgtgaggttatgatttcgataccaatgcatggacactagatgctcaagaaagccaaggagagaaatttggattgacagtgttgctgttacccacaatgtccagtccaacaggacatgctcaaccatgtctgcatttgacaacacaatgcaattggaagtttcagcaggtatatcagaattttctagctcagagatattactaaatgaatctttttgtgcagaaaaatcatccatatctccctgagatccaattgaagaaatttcattacggaacttcaaatgaagatcctcaaaacttgtttcatgcatggtcatagcaggcgacaaattactttgagtatatctagacttctttggttcagaaaatgaagcctcacatgcagcaatctggaaaaagatctcaagagattgcaaatcaaacagtgacattctacgacgcaaaaagagtgccaacagatggtatcctcgatatgtttgcatgtccctaatattttgaggattctgatgaagagcgcaggctagcaaggtgagggccatatgcagcatatccctggtctcagcagcttcaactagtgcaaggacaacagtcatcccaccaacagggtgaatagtatcaccaatcacacattgcttacaaatataaatgtccccatgaaggcgtccaaatcgtggtatccctgtaaagaacataaaaaataaataaataactaaaagagcataaagaaacagattttgtcatatcacatttttaattgattcttgaagttaattttatgcctagatgcagcaggaaagattttgttacaaacctccaataggagatgcagcagcagacataggatcgactaaattgagcatggaaaaagtccctgatgctcgaataggctccgcacatgttccatcaaatgcaaatataagtttttttccagagagctgtaaagagagatttccaagtctctccaaatcccaaacgaacccacttccatcggtcttggactctcccagtttgcttggaggatcaagcctttgtgtatttaaggccaaggtagagtcagcatctaacgcatctaagatagccatgctaccaccaccacatgcttgattaggtacaaaacgaagaagatctgtgtcttgaaaaagccctctatatcctctaccaagaatgtacatgaagcaaatacaaccagatgtgagaacctcctcaaaaaggtagcaggagcgtaatttccaggtcaagccactaactcttgcacaagtagctggagttccaatggtaacctgcaaaggttttccaaccggagatggagaatatcccagtttcccagtatgtcgcagttttccattaaggtacatataagcaacgctagcttggaacagcccagcaagagcatttggcttgctgtgaacaactgcaagatgatgccacctgccttcctcaagttctaatcctgaaaacgatagggaacaagagttgctggttgcaagagtaagaacaccatcctcctggagataaagttcagcatagaatgtgttttcattatttgctgcacctacagaaaatattcgaagaatattctgatcatggtttttcccactagagttgttctgccgcttagaagcattagttttggaatgatctgtttcctttgcctgtgactttaagaagttccaaaactgaaaccaacaaacaaatgaatatccagcagctggaggccatgatctttctcccagagagacctgaatggaagcctgcccaatctttctcatgtccatctctataaatggagccagaggtacatcctctgagaccatatcctcattaagaatcaacctttgcatcatgtcaacaagtacatggcctgaattcatcgacctcatgttcagcacatatctaataagcattcgaagttcagaggcagataacctgtcaacaaacacattttccaacatcataagtgaaaacattgattgaaacaaacagataaaacaatttccagaaactaagcagtgtatacctataagccccaagaacttctacaatcttcaaagcatgagaaagtaatggagatgaacccaaaagaaaagggtggatgatctccaataaaagttccacacaaccttaaaatgaagtggaaatagaaaatgtaagaacaatggtgactcgtataaaaatgtggaagaaaaaaaagcataatttgattcgcacctacagaggtcagattttcctgattgaaggggccaccacaagcaagtttttcaataaggcctaagacttccaattgcacctttggagtaaatagcagcaatgaacggatcagaactctaacagcagcagcattgtacactcgttctttatcaggatgaaatgatcctgagttggtaactaaaataaacccttgtgattcattcccattcacattagatgatgtgctactttctgtagttaggaacggtgggagcacaatttcaagagctaattcaaacaacaactgtataatctgcttttcacactccacgcataataagccagactcagagagaagatcataaaaagtctgagatgatactattgtatgcagttttgtcctattaatagcattatcacacactgcagcagttataacacgcaacaaatatgtaaaaaccttagtgtaaacctccaaaggagattgatctgaaggttccccgtcactttggaaactatggagtgtggtaagcagaagagaaaacccagtggcatcaccaaaaactctctgagcagagttgttaacagtcaaaatacgccacagggtacccattgtatcacattttgcttcattttcaagcctatattgagatccagaaacgctgctgaccattccacttttcagaatttcaacaacagaacctaattcttccgaatgcgcctgatgaaaaagagaaacaaaataatcacatttcatcaacaatcaagcaatccaagaaaggcattatctaatttaacaaaactacaaaaacaaattgaattcctaataaaacaaaaaaaaggaaaaatatattataaaatatactgaactgaacagctcgaaaaacaaaacagatatgatcacaaacctgtttaacatcttcaattatcagacaggacaatactcttagtactccagggcgatgtacatcagacacaagaaaagggagaacaactgaaatgccattagccgagcgaaaagctgactgactggattcagttttctttaacaaagagaccatgcagtcccatgcaacagcaattgtattctcaatttcaaatataggaaacttcccggagccagaatccagcagtttgggtgatgaaataattacgtttttactgtctaaatgttttttaaagctgcttgagctagattttttctctgactgactagtatttccactgtttgaatctgagcccaaaagaaacttgttatgcttcaggtcatctagcaaaacttcaaggacaccaacttcacgcaggactttcctgtactgctggtcaaaggacaggagtttaacaaaaaaggagagtatcgtgtgctttaattcggatgttattggctgctgcaacaagcagcaaagtgaaagtaattcttgctcaggaacacagtttacaacagtcacagcatattcaagaatttttaatattatctcttgcaaagatggagggaaaccgtccatatttaagattaaaagtggaacagttcgtaattgttggcataacttatagttatcaagatgacttgagaagatcttgaacattctgtttagaacctctgcttgcaattccctactaccagccttcaggaaaatgtcctgcaacatctgaattgcttcaaggtctttaactttagtatttcccttctcccaaacatcttcagcaaaccgttcagaagacgatgaatggcttctgctattgccactggccctcggatgagaagattttgagccctttcctcccgaagatcctgaagtttcggatgggccagtctgagctagattaacaagaacatcaagcaatctagacagcacaggtgaaagctggtattcaagagattcatcattttcaatgaacttcttagtgtctaaatcaatgagtgcatgggaaccatctgaatcaaaattatgatttgaagaagattcagagcgagatgactgaaaaccatgactctttctcatggatgtaagtgtcagtgcaaattgaacaagaaactggtaaccatgagcattgtgtatatcctccctaagcctgacaccaccagcctctacaagccaaaacaattcaaaaatatgtcagaaaatagcaattaaggttaatacacacacaaaagtacacaaacactgaagtactgtacactcaagctcccaagaacaaaatcctcttacagacaaaagtgaaaataagttgaacaaattaccaggcctgtatgacaattcaacacattccagtaacaagtcaacgatccccatagtgtaggcagaatcaccacaatcaggattgaagtctttaacggccattaaaagaacttttatctgctcatgaaacaaaaagtgagaagcttcttaaattaaaagaactcaccaaagaaacatatttatttggagatttacacatatgttgtacccagctgtagaaatgaaactcgggattcattggatgaaaattaatcagaaaattagaaattacaatttccaccaagagaggaaaatatgacgtgatcctaacccgccaattgttcagaaaacaaaaatgctttaacaacacaatcaaaattcctagattaccagcacatacagatgtaataaaaacaatgtcgtaccagatgatgtttgcgaatgtattttgcagtgcttccattatcactcaccaaaagaagaccaagtatctgaaacaatgaggaatggtaataaaagttacagcttaaataatcgatcaaaacaatcaataagaaatcaacttttccgcgacattgcaaactgcatattactgcataattccaaaaagtgaatgttaactgtttaactcatctacctgcatagcatgcctatgaagttgtatgctgtgcaaaagaacaaggccttccttgtatcgagaaaagattgtcaaagaaccatttgcaaccatctggaagagcaactgaagtgaattgtcttcaatcaaactttgtccagcggaaggatggcttgctagtgctttcattatgtgcacaatacttccctctacctgcccccagaaaaaaaaaagtattagagttaatgaatctatctcacgtgactaataaagtaaatactaaaacaaccagatatgatgtgttacacagtgaaacccctctcacaatgaaaattcaaatctccttccaaaattagtactgcagtattctctactaggaaaaaaaatacaagagacaacagccaaatgaagcacttccatgcattatacttacgcatacaacaataagtaatgcaacaaagagaaccctacctcaagtcgacgaacatcagcaacaccgctatctttttcagctagcactggtacttcacaatcagtagccttttgtcttctatttgcttcatcaggatccaaaagagcatagagaatgtgaatgagacagcagaatattcccgaatcaaggagagattgtttatcaataggctgtaaatagcacccaaaaaaggtggataacagttacaaggtgttataaccaaacaattaatagaccaacagtaatttctgtgtggcacaaactatcacattcattatgtcagacaatttcacatggtaaaaacatgtattaacaatgtggcaacaattacagaagcactgaattactcatgccatgcacgattcctttgagctactcactccaatcaatataaacagtagaacagagaagtagattatagtacacaaacacagaataaaagaccaccacactacaaattgacaactgaaaaatacaaatgagaatgacaataaagatattcaatcaagcaaagattaagaaattataccccagatactagaacttctaccgccctcaataaatttgatccagggctaatattatcctgcaaaaaaggatgtgaggatgtaatttaaggaaacaaaactatatttagagaggaggggggactgcaatgaaaaaattaaggcagcaacattaaacacacaaaccttgacttctgaaaagaactttagcacttttgctacatccaaagatcttgttttgctgccaatttttaacttttcgatatctgttacaaatgctcttccgacaacaaatgaaaatatatgtgtttcaactaacctgtaataaagcaaaacatgcaaatattggtcaagaagctccacataaagacagtgtgcactgattttgaatagaaatataaaccaacagaacaaagccatttttcattgtaaaggcaactttaaaagagagaatacaaagcaaacaaacgtaaatatcacgtgctctataccatatacatctcatctgatcccactaatagcatattagaatctatacatttctacccatacatgtgccatcttgagttgaatttgatacaagtaatgaggacccccatattctagaaagaaagcacaaaaaatatggtaaccaataattatatatgcaacaggatgcataaaaaaagaagacaaccagccagtatgtatataatgctagccccaaaaataaggaatatcacatcaaaatggaaagaatcaaaactatctttactatttatatgaaacgctgacttagcgaactaatcctataaaacataagtgttaaagtctaatgcagcaaatgagattttgaggataagcagtaatacatggtcactaattgagctacatcagcctgctgcttcactaatctacaaaaagcatcaactgttaaattcaaggccgcttctttctcctgcaaatacaaaaaaaaaaagtatcattagcatacatgtcttggcaagcaaatagcaaaggaccaaaataattaagtaaaaaccttttcagagctggatgaccgaaactcttcccaaaatctcttgaaatccaactccaattcatgtttgtctctgctttcacaatgaagattaaattaaatgaaagttcactaaaattgtaatcttaagggggaataaaagatgaagaaaataatccgttcagattctttaagacagtttaagctaccctgctacgtcagtcgcaaatattctttaaggtagtaactgtattgatgtaatttctaatacaaacactaatttagaaaaaaataataaaatactgataactaaatctgataattttttaccataatagctactactaatataatcacaataaaaccacagcaaacactatattatttctcaacattttttactgaattatgaaagcaatgtccaacagtagtgcaagatattttactatcctccaacaatcaataattatcattattcccttaaagcatgacttttattatacaatcacactctgtatatcatatcctggtttcttttttattgtttttggcaagaaatgaaaactgtgattgttttaacaagacaagtataattaaaagagtttaaatggatatgtttctctcatcttctcagagatttgagttattcttgtttcttgtcttgttttggaacgagtttttgcttgtggctggtaggagactttttcttctcctgtaatgtcccttcatttgtacaattttgaggtttcctttttaagcctttacaaaaaagttattcttcaagataagagataaccaaaaagcccaaaataaaaatttccccatacatgtcatccccagatgatatgtcgtgagagcctcaattagactttttagcctaggaaaatagcaaataaacatgccctatcaaccccaataaggtattaaagattcagcaagtaaataagttaaaaaaaaaaaaaaaaactgatgcttctgtggacatgtttaaagaaaaaaacataaatacaaactcaaaaccaagttcatcaatcaagaaacttatagacatgagccccactttaataataggtgaagccaatgtaaatcaaacacactaaagactactccagacttatgcacattagatatgaagcaattgtcgcccaaagcagccatttgccacatttgtcgacaaaataacaaaatcactaaaatatttactctgcatcgattttcatggaacatttaaaagctataagtttgaagaacttatattctttatataagtagatgaaaaagataaacagtattaaccaaataaaggacgatatccttcactaaataggtttgatcacctg

SEQ ID NO: 15062 - DNA, 16514 bp, Cannabis sativa
tggtttaaacataagaatagaatcaggagaattaatccaagaacaaaccacagaagaatccgactccacacgcaccacagaaaatcccaatcggttggcccaagccagacccacccggattagattttttttcttcaaattttaacttgtatcaaattattttctttaaatttttttaatctttaaaaaaatttcttagattattgagattaataaatttaaaaaattttgtttaattttattcaattttattattttattgattgtttatgtactaaatcatgctatttaaattttaatatttactaaatcatgctctcaaactttaatgtgcaataaattatgatccttaaactttaatttatattagacattttttactaaaattagataaaaattcttaaattcaataattttaatagtttaagagatatttttaatgacattaaaaatttttaagtagcataatttaatacatattaaggttcaaaaagataaaaatactacttaacttaaactatataagatttaaaccaataataatatccattaataactttgaatatttgtgatgtaataataaatagggttttgaattgtgggttggagtgtcatgtagttgggataacctagaaagcagcatccacgtgcaccagaacaacaaaaaagaaaaagaaaaccattaattggtccattcatgttggctcatcttctagccatttgtctttggcctttggcgaacattaggaatgaagaggcgtcaaaatcaaaatctctcaatacatatttggattggatatttggtttagttccattgaattatatcacaaatactaattccattaaaataagttgtacgtggccctaaccaaattattaataactatatataaaactaaaaagggatgcaagggtagaattagcagggagtgctcctctcctctcctctcgtctccgatttctttttaagattttaatcttcatcttgccactatataattttcattgagaatagggtggaaaccaaaatatcacttaatacaaaagtaaagtttatattataaaaattaaaatatagacattatttattattcaatatattaattattatttaaaatacaaacttaaaaatttataaaaataacactaatgtattaaatacaaatataaattataaattatatataaaaaaataactaaaatagtaaatggatcccgagcaaggacggaggtagaaaatgtttgtaaggggctaaattgcaaaaacaaaaaaaaaaattaagacgccaaaaactaaatttttaataacaatacagaaaaaaaaaattacaaaattataactaaaaatttgaagaaaaaaatatttggggagaggggtcaaggcccctccttcctgttaggacacgaagtgtcatctctgtccccctcccgtttaataatcggggacaaaagatgatccttgttacccatttagacgaggaatcatcaccctattaagggcaggtccccttagggcccatctcataaggaaaatgtgtacatcacttcactacacttgatcaaggaaaaagttgaggaatacctcttttttgtatctattaatcaaaaatattattatattatcattcaaatgtacccacttttgtaactaatttgcccagtaaatttttaccctccacttaagtctaacacataatttatataaacttaaagggtataataggaataacatttataaaagtgggtatattttaaaggatataaaaataaaggtaaaaattgaaacaagtaaaataaattgggtatacaatcaaatttcctccttgatcaattgataagttggactccctatacataggggtgttcattaaatacccaatctaattcgcaaagtgtagatatctgtacttgtgcggattgaatattgattgatatgtaaaagtaactaattcaatctgatctgtatatatttatatatatattttaaaaaattatatataaaattaatatttaacgtaagaaaatagtaatttaaagatctaatacatatgatactgtttaccgagattttcagaaactggttttaataagagttaagaaattaactcacgtaatcaaaagtagagatgtaaatttttacgtggttcaggtgctaatgaactgtagtccaagagtcaatcgtatttagctaaatagccttgatgtattacaatggagctttttacaaccttaagaaccctaacttcttgctatagtgtttacacaatgaataatcaaccctttgcatgagggtatgacgtagtatttataagctagaatccaagttcgggtatatccgtgacctgctaggatttgcatgtaagcctagcccactaatggggtaaatacgtgatacgttaactttgggcccatgtatcgaggcctggctcatggggcggaggtgatccatacgcttggggaccacacgatatttaacagatggcttgttgcgcagctcttgtgtactgtagtgtcagaaccatggccgtcgaacaaaagggaggtttccttttggtaggacgtgcatccttaggctctgacacaagggacaatccactgattcattagaattttgtgttagtgggccaccacgtcctggactaggattccgggatgcctcttcaactgccctttttagttatattacagatgctcatccaaagggtcccatcgacttctccgtattcgagcaggatactcttctggattcaaagagatatggtcttggatataagtatcctaggcctcaggaaggaatgaggcccatccttccgtatagattgggccagtagtcttgttagggcttctaaccaggccttagacgattaatcgtgtgtagggaatgccacgtctctccttccagaaacacggataaaattttccccccaagattttaggactaaagagttgcagaggcttgcggttttctctctaaatggtcatggacacgtgaaaaattcaacaaaggagtgacctttttgaattttgtattctttggccgtgaacgactacggacctttggattacagtttgcagagcatacatggcactagtttcttggtttgtgaaattttttgtgtgtggggaaggcgcatgaggcttaaggtagtgtgttgatggctgagtcatgtcagcacttgtatcaaagtgaacgttctaatttgaaaatgacttgattctattgttacgcattaaaggttgacccttctgttctctgacggttagattatttttgtgttttttaagaggccacctgagttgttgatcgaggaggcacatgaattgtcacccttttcttataaatgaagtgagaaaacacagttcatcaattttacctacccatttcatattctgagtttaaattttctgagagaaaaaaatcaaattttgcttctggtgaatgtcaatttgttcgacgattgccttaaccttcttctttggatttacgcaagagaaaatttaggagcatcaccaccaaatttgatagcttctcttctagatccatcgaggctgttggatctccaagtagagatcgacagactactcgcttaggattgtgagcttcaggctagggtttaccgtcttgaggaggtttctgttggcgaattgccaccgaaattcttgcctccttcatatcttttgtcatcatccagtaagtgcttttacccttctcaaaattctagaaattcttggtaggatagatatatattttgttgatgatttaggcgacaattttcatgtgggctataggagatagcgagtatgacttaggttcctcagggtcgttactatggcattgtttgatgttcattttttgtgcaagttgagttcagaataccatggagtttgtttgaatttacattcctctgtttggaacccttacgatatcaaatgaagcattgggaaccatcaattcattcttgtgttcccaatctaattgtctaggagcaaagttatgtggggcctttgcttccatatgatgggtccattggggacctatacaagtaattttaggggagactctcccgttcccctaatatttcccttagtgcgagtatttaactacttggtttttcttttgctttctctctaattaatcattatgtcaaacgtcttcgaccttgaagtggtggagctgatcgaagagaaaattaaggacgttgctccggacggggtaccgaatgaggagaaattcaaggaggtagctcctgaagtattatataatgcttcctagtgggatatggaccagatccccaaaattttttgcaactacgagatgttgaagtgatattccaagtaacgaggagtttgccacattctgagcctttgctggaataggctttcactccaagggagtcacctgctgcgttcgcggacggattcagcacctggagctaggcgtacatcgtatgcggagtgcatcacctgctgtgatgttactttgcaaacttcgaagcattaatggggattgctcccttccagctcattctgcagtcgtacaagctgctagtcggatagtacatcctttgcatagatcaaaaaatggagtttccgtaactagaggatatactatacttttacagtgtgaggtcatagcccatgcagaagaaaagatctaagattgagttctacaagctggagaggcgctccaagatggtttgcccatccagtagtgtgaagcatatttcagactgtcgggactactggttctttaagtccaactttcctttgaagggatttcatacactgccacttgacttcttggttacgggtaagcttcaccattttccttttctttgaaattctttccgcactcaaaaaatggtttgctaatgtaattttttttttttttttatctttcaggcaatattacacctcctagtcctactgacttcttggtggcaagggaggcctcgtatatgggaatgccttcgtcaatgttgaaggtggaaggttggtcaccacaaccaatcttagaagagttaggttgattgccccgcaccaaagttgtaatgactgtatacttagaatatggattaatagataattatcattaattatatatagtgttgtgggccctatttaagaaatgggcatttaagttataatttctcaattctgaagattttattaaattctaggtgtataatttataatacgtatgaattttgatattttagtgatttatacccagtaacaatagaaatgtgatgattttgccaatagagtcacatagttatggtttaacactatttgtttagcggggcaagattattggacatttagaatattgagtttatgcggggtaataattttttatcattttatcccaagacatttatgtttcttaagaggaaagaaaggggtattttggtcagtttgtcttaagttgattattaagtaagtttagtggatttttttagataataccttaatttattggctgatattataagataaaaaacaattattaagatcagtttgattaattagagttagaaaaaaataaaaaatcaaacctttttacccttatccgttcctctttcttggcctctctagaaaccaaaggaatcagacccatttcagttctaattcttaagtaattgcaacaagtttgaagggaaattgtttgataaatcaagataaagccccatcctccatcttcattgtttctaagttttaagcttgattttgttacttggttttgctactgtaattctgttagggtttgggttagttcgaggtctgattgtgaagtggttttaagttgttttttattgattggagttggttttggttattgtggtgagagtatagcaagtttgagttttggaattcaaagctttctctacaatgacatcttttagttctgagatttaatgttgtattttctggctaaaatatgtttacttggatgttatcaggtgttttggagtgttgcgtgtgatttggatagaattgaacttggaattaggtttattttttattaaaaaaaaaacggtctatcatttttttaagaaatggtgaaccattttttcaggaataaccccaaaaagcggtccaccgtttagggaatcaagttcactagatggtgtggtttcgggaacctcaatttttgtaatttctcaatatttaaggtattggcatactatttatcgatagagaaactttttcagcttaatatttagctttatttataattttcaccaagataaaaataaaataaaataaaataataatctagattaatatttagccttatttacagctttcacccacttaaatatgatgtctagcagtgttgtaacttgtaacttttattattattattattattatttacattttaaatgtaatatatatcccttgagttgttgatgtaatcatttgaccaacttatttgcttcaaagcttagcaaccttctaacagtagtaataataagaagaaaagaaaagtaatgggtgtagcacagaatctagtatagccttacaaaaacacacacactttatgtcccctttattttaatctatactaaaaaggtaaaaaaaaaaaaagatgaatgagaccatttatattttatttctcatgatgatgttgcccacgagaaaactaaatttcataaaaattagatttatggctaaatgttacaccaatagactagtagtctactattatggtgttttaattacataatgcatttacatcaaaaatgatgatatataataatctatggtcatcagttttctcaaccaaaatgtatcatttttcattcggtggtcggccactgccaaataatttatctgactgaataatacaactaatatttaccaaaactaaaaataatgtatcttatttatttgtttttggttactataattcatttcattatattgtcttaccttgtaagaaatattcattaccagttcatcatagctaagtaaggccacaattacaatgacttgctgtctcaatttttgttcttcagagaccaaaatgcttccaccattattgatagtctcaaaacaaaaaattctactttttttctcttcattaattttttcctgttattgtcaaaaatttagttctctaataatttcaataataagaaattcaatacacttcgttaaccagtcatgtcaaaatggactaggtcatgctattaattgtgttaaatgagaaaattaatacccattattatagataaataaataaagctttcttttcttttcttttcttttttttttaataaaaaattagagaaaaaagaaatagttatgtgagaaacgacagaatgggccgagtgatttgaacaatttagtgaaacggagagacaagagcgtggaaacaaagacgaaacgacaaggtccacattgtatctggctggcaaaaatcaaaatggtccgaatttgaaaagaaagaaagagataaaaaaaaaagaaaaaggcacaccaaattagtgtcttagctatacacacgcaagttgtataaattaaaattaaaaaagtaatttttcttttttaaaaaaattaaaatagttatactcagagagaaaagagaaggaataattattaattattaatttaattataataaatttgtcatttaattattaaataggattagaaaaaaagcagaatatgaggaattgggatccgagaaggagaaagagaagaagaaggagaagagggtgggttgtgtggttgtgggagactggccgtgcctctgtctgtgattgtcacagtcgtggctacgagaggtgggctccgttgccggttgcctgggtcaggtcctgggtttccccttttatattacagtttacaaccactaatccatgttcgccattttctagtttcttcttcctcttcttcggcccacagcccttcattctctctctctctcttagttttttttttacctcgttcgagacattggtaacctgaaaagattctctaattccgcttcacgatttcttcgaaaaaagctctttcattggaattgttcagaaatccaacgcgtttgcctccttgctcggtacatgaatctctttcttgattagtttgaagtaaatcaagcaatctacgcttttcttcttctttttttttttttcttttagtggtgggagatgttgcaatgttaatatatttggtagttgatccccgattctctaattatcccgtagctttcattttgaagttgtaagcattaattgatcttgttctggggtttgtttttttaggcttgtcattggggtgtgtacgtaaacagttaagcattgcatcgttttgttattaaatgtaatttcatttgctgctgatctattaaagtttcattttttttttgtgtgtgcgcagattgagttgcttttgtgaggttttatgcatcaacacctgaaagcaagaaactctgatactcaatgtaaacttatatttgaataccctttggatcatcttcggattccataaatagatctacaaaaacttccaaagttttttatccatttcaaacctcgtgaaatttggtcttatttgtgtagtgatacgagagtgctagtttaatcagcatgtcattcaaaagcttagttcgcgagctcagagagatgaaagaaggcattggcaacatatcaagaagaaggataatgggaaagcttaatcatcggaggagtaagtcacacattgcccctgaagggtcttcgtcaacggtttcatcgtcttggacttgttctgcattggttcagcagggccggtgggcgaacttgccacctgagttgcttcttgacataatccaacgcgtagaatccagtgagaccacctggcctgctcggagggatgtggttgcttgtgcctctgtttgcaggtcgtggagggaaattactaaagaagtcgtcaaaactcctgagcagtccgggtggcttacttttcccatctcactcaagcaggtatttttcttctcgtggtaatataagattgttttgattctattttacccacatgctaatttgtgatttttcttttcttttatgtgattattcaaaattatcagccggggccaagagattctccgattcagtgctttattaagagggaaagagcgacttcaacatttcgactgtatcttggtttaactcctggtaagagctttagaggattcttgtgattggtttattactagtttaggggtgaatggcgctcattctctattgtcaatttgtgttctttcaccactaaagaaagttatagttaaaatctggtgaaatggcttcttctgcccttgattcatgaaagtggtagttacatcttgatctaagtatggccttgcttgtggatctaattagtggagcttttcactatcttcatagtgtgttaataattttactaaaatctacgggaatcgtgggcattatctagtatgacatagcttttggttctgaatataagtaatggtctgataattaatctacagctttggctggcgatatgagcaaactgctgttggcggcaagaaaaatcagacgggcaacaagtacagaatttgtgatatccctggctgcagatgacttctctcgaacaagcagtagttacattggaaaactaaggtgggattatacgcagggtattacaatttttctgttttgttcggttttctcatcatgaattgtataattttaacagatctaattttttgggcacaaagttcaccatttacgatagtcagcctccatgtgaccctgtgatccaaacaaattgtagatcgcggagaagaattcattcaaagcaggtatctccaagggtacctgctgctaattacaatgttgccactatatcatacgagcttaatgttctgcgtacaagaggcccaaggagaatgcagtgcaccatgcattcaatccccatttcttcagtacaagaagggggagttgccccgactccaacggaattcacaaatggccttgaagagcaatgtttttcatccccattgtcagtttcaaacgcaaagaagccacttgttgagttgagctccagtaatctcacagactctatggacttggttcagtgcacaagggatcctcttattttgaaaaataaagctccaagatggcacgagcagttgcaatgctggtgccttaatttcaagggacgagttacggtggcatcagtgaagaatttccagttggtggcagctgctgagccttgccaaaatgtttcagcagctgagcaggaaaaggtgatactgcaatttggaaagattgggaaagacatattcacaatggactatcggtaccctctttctgctttccaagccttttcaatctgcctaagtagctttgacacgaaacctgcctgcgaatgaccattacatactggtcatctagaaactaaactgtaaatatcttttgaaactaagcactttaggcttttgcccttgatcacgagcacaagaatcttagttggtctggcactagtttataatatattgtcttatctgatatgaaagtgtgatgtaagtttaccatttatttatttgcactaaagaggctcagagttttcgcttagagtatgtatgtatgtaaccttactttagcaattctaagcttcactttatgtagcctctattgagctctaccctgttatatttcttttcttttttattttatttttaattcttgctcgaaacgatgataataggaaagattacgtgcggtctagtttttggtatcttacttagtttattaaaatcaggttttaaaagacaagtgcgtaatgggtggcatatttttcttataatataagaagcaaaggctagataagaaccatgcgatctttcaaccagttattgtgatcattatcgatcttactcctgttgtaagaatttattgtatcattttattgttttagactataagaacactatcaacaaatgagtcttgaacagaactcttttctgttttttttctcccaaatttgtagcagcagcaatcgtgtcaacgctcttttggattttttgggcttgagttgcttggttccataaagagtttttaaggcattgtcgtctaggggtcattgtaaactcaaccttgcaggtttgggtggattttgagttacaatttcaactgcttgacctcgtcagttgtgtactgagagtaggtcaattgaacacccggattcttttcttcgattgaagcattgaatacaatggagttgttaacgctctgtgcattgctattgacataagcttttggtgaatgggcttctcttatcattcggtctatatgcctctctcccgagcttgtttctccatcagtggtgttttcatttttagggctcttctctaagttagtcttgtaactccgatgaatgtgaattgattcttccttttttgttgattcagagctcatgtgcattgccgctcctttgttttcaccagttaaggtaacgacaataacaggcttttcatccacttgggttctagtggtgagttttttaacaagcttggaaatgtcttctatgatattcttgtgtagagaaacttcttcctctatggtcaaaacaggcttttgaaaagaattgtttgtatttccacgtatcggatgcgatgatttagcaatttcggcatcattaccaatataagtggtggtggctatagtcttcgttctgtcagaaacttctcgtttttgttgcccttctagtgcttgaaatgtaacattatgtttctctaattcgggttggagcttcaaatctgacttctggggtgggacatctaccttgttagcttcttcagagagtgacatggttgtttccaaaggcattggaacttcttttagctcccttgcagcaagagcatcttgagaggtttttatccttttagtttcagatgtgattttctcttttgattcagcccctcgcaatgacaccataaaagctacttctttctctagttcttgctcatgatttgatgattgaacctgagctctaacttgaggtttctcaggcgaagacggagattgagatacaatgtcatcctttgctttttgttgagtagctttgctaattggagaagaaacccccagattatccatccaagcatgttgagaagtaggggactgagattgaaatgaccttcccaactctagttgagactcaaaagtcacacgagattgtgaaggtgatgttgcccctgacttggagtctctttttgaaggtgacgataacacagaggttaaaccaccatggggtcttacttgaggtggtgaggtaggcttggaactgatttgtgattttcctactgcaagagatggagatggtggtttagttacatcaatttcagcaaatggggaagaagtagcttttgaggcctccattgttgcaaaagatggtgattgagctttaacaattgcatttgcaggtgttgaagttggcagggcactgacttccgaggattcactggttgtactagatggcgacgacaacacagatgttaaacctctatggggtcttacttgaggtggtgaggtaggcttggaactgacttgggatttccctactacaacagatggagatgatggtttagctacaacagtttcaacagatggtgaagaggttgactgggaagtagcttttgaggcctcaattgttgcaagagatggtgaccgaggcttaacaattgcatttgtaggtgttgaagaagttggcagggaaatggcttctggggattcactggttatactagacggggattgagttttaccagttgtgggcagttgtgttacttttgtagagttggtggcagtgcttgttggtgatgggggttttacagctatatttgtcgagggtgaagaagttgattgaggagtggctgatgtggacttggtgaattgaagagattgattctcttttggggactcggtggcgaactgagatggtgtttggagtttggaattttgagatgatggtgtttctttttgtgattcatttgctaaaggagttggtgtttgggatttggaaattggcacaaatggtgtttctttcgagaactcagtagctacagaagatgatgtttgaggtttgcttgttggggcagaagatgtttggggtttggtagttggaaaagattgtgtttcttctggagattcagtagttgcttgagatggtgtttgatttttgattgttgggaaaaatgaagtttcatttaaggattcaatggttggacgagatggtgtttgaggtttgacttttggggaatcagtggttgcatgagatggggtttgaggttggcttgttggggcatagtatgttacttttggggtttcagtagctacacgtgatggggtttgaggtttacttgttggggcagaagatgtttcttttggtggtttgatgactgtactaggtggtgatagaggtttgtctgtggggacagaagatgtttcttttggtggtttaatgactaagctagatggtgattgaggtttggttgttggggcagaagttgtttcttttggggagtcggtggttgcacgagatggggtttgaggtttgcttgttggagttgagtatgttacttttggagattcagtggctacacgtgatggggtttgagatttacccgttggggcagaagatatttcttttggtggtttgatagctggacgagatggcatttgaggtttgaatgttgggttagaaaatgttttttttgaggattcagtggatgcatgagatggggtttgaggtttggttgttcgaggagagtgtgtttcttttgtggattcagtggctgtatgagatgagatttggcgtttaccttttgcggtagaagatgttacttttggagattcagtggctgcacgagatggtgttttaaatttgggacttggagtagaagatgtttggggtttgagagttgggattgatggtgtttctttaggtgacttagtagctgcaccagatggtgttggaggttttacagatggtttagatggtgtttcttttggagactcattgattgcagttgcaggagaaggagatggggatgctgatgatggttgagcttcagctttagaaggtggttgagactgagaaggagggggctgtgaaggggctctcccagctggtctagaagcacgtcgtgaaacggatgtaggacgagagctttgtgtttgttgctctgtagagcgctgagaccatgggagtcgaaagcggaatggttgtcttcgttctgccatggataattgtgatggaattggatgattatttttgtcacattttgtatatcgattcaagtgtgctcgcacgtatacacatatatagcgccatacaaccgaaaacttatacttcagaaactttttggggattaaaacattttggcgttaaagacttttattctatacctttcttctcttctctttcaagggacaaagaaatattagattattttatgttcagacagattttacttcatttgggagactagcatctcgtctgtggtgctctccatattccattttctatcactttgctgtatacatctgtcagcttacatctttttaaacccgtagcctttttgttatacatggaaagatattaagaatatttatttaattaaaatctatcttagccttgtcattattctttcttgggcattgactcgtgtggttgaaatctagaagtagaatgtgacaaacttctgttatttgataagataaaaattcgatgccccatcataacgcttattaagattaatcaaacttatataataagaaaagaaagttgatcaaataaggaagctagttttccatatttggcacgttaaggtggtttcttgacaaaattaagacctaaaacttatctaattaaaaagaaaggttctcttgattcactcattcaagaaacgaattaatctaaatgacattcgcaagtaaagagattaagataaagattctgctgcttcatgtaatatggaggaaggattataggtggttactggtccgtacatttactctgtactcagtattttcaataaacttaaaaaaaaaatatttaaggtttgtctattgtctactgatctgtttcctataaactttcttcttctcttcttctttaagtatatgttgtatttattagagaacatgtttttatcataacagaaaaaaagatgcaaagaattgtgaaagctgtgaattcatgccagcaaatggtgaaagctgcaatattagagcattcatcacatgggagagacaggaccaaaatagagaagatattttcccgttttggttggtctttatccgtacaagagaaaggattagaaaatgtaacggtggcagaggtactcatggccaaaggtggagaaaatacaggctcttggctctgttgccattcagacgacatagtcaatgatgccgttaaaaatgtaggttaaaactaattaacaaatatttcatattttgtcttcctttataataatgtgttaattaattatatgtgaaaaagggtttatcctaattacagatggctcgaaacaacatcggatctttagttgtactaaagccgggacacgtacaacatgttgctgggatcattacagaaagaggtgtaaacatctctgcatttttttttcttttgggaaatttttgttttgcattttcccaagtcaacgatatgcttgtctttgagtttgactcacctaactttgtgtcatgtatctatgcataactcacacagattatctaaggaaaatagttttagaaggaagatctccaatacatacaagagtaggagaaataatgactgatgaggttacttcattttttcttgttctttttcttctagaaaacgtttatttttatatccctataataataagcttggcctcgaattttgaattcaacagagcaaattaattacagtgaaatctaacacaaacatttttgaagccatgcagattatgacaggtaattaatcttaattcattattgatgcataaaatgcaatcgaaattcttgtcaatatcacagtactctttctttaaaatgcatgcagagaaacaaattaggcatgttccagtaatcgatggtaggttggttggcatgatctctatcaaggatgttgtccgagcagtggtgcaacagcaaagtggggaacttaaacgattgaatgagttcattaaaggagattactattagattcgaactataatataattatgactacagctaatgaatgttatcatgtatggtatcaaataaattgtcttaaagcatttaatatgaagtatcttattctgaatcatagagcataatcatgtgttcattatcatataaacttaaaagaggagaggaagagcatggtacttctttaattgtctgcataacaagcctaatagttaacaaagccgtagttatggtgaaagtagagagaaaggactctgatctttaaatgagatcaagattatcaagctttattttttataggctaattagtaa

SEQ ID NO: 15063 - DNA, 8308 bp, Cannabis sativa
acaaattttcacttacaaaatttaaatttttgtttccaaaacacatttttaaaaaacacaatttttgaatcacaaaccaatcaaacccttagtttcccaaggaaaatgatgattatgacatacttttgtaggtgagtcagttacaaacgtgaagatagatagcctctcttacacatttttatttcataataaatgaaaaaattgtaccttcagctttcctattacgaaaatctatgcaattgtgcctaatttttgggtttcggattaacacccgaattaatatttgcattttattaaaacccaaacccgacacccatgtggagcattttcgggttggacctggcccgactacacgggtttttaatttttcggctttttttcggcagcgggtcggggcgggttgccgggttttcgggtttgcgggtctaaatgttcagccctaagccgatctccataattcccaacctcaagaaataatcttccaaacaaaagaggcattactaagtcacgttagcctccaagaatgaccaatggggataggaaatgcctgttagaaacattgtggagagggaaagatgttggcgtacaacctcaatgcttgtttttcaaaaatagccttattaaattaaccaaattttaaaaaccaaggcctctatattttgtggtagcacaatttctttcccaagtgagccatgttatattatttggtgtaatattaaattgattaaaatattaaaatgtggcttatatatttatgtaggattagtcattaaattatattataaaatttaattaaacactaaaaaagtaacaaaaggaaagttacaaaatctgaaatagcatttataatctatgaaatacatttacttaaattgtataaataaatgagttattataaaattattaggagattaatataagtgataatatatctattataaaacgcttataatatttatattattaaaataagtgttagaatatttgtgagagagttagcatgaagaagagttacgaagatcttcattgttctttgttagaacacatcaggccatatgtcgcctaaacatgcatatgggaatacttaaggagtgttacgagatttcaaaaatggcgtgcataattcatcctatgcaacatgtcacttgaatacatatttttaaagaacgtttttcacctcttaagtggggatgttttctatattcaagccaacgcattgtatcccatttctgaccatattttgactagtaatagtcatttgggtgagagattgaaatgtaattcacctacactataaatagagacctaagtgtttcatattgggacacactatcaggagagcatattgctagaaattctctttaggcttgataaatccaaaattatttctattccttcattttccgtaagggcttgtggtagaaagaaataagcttttgggaaaatgtgtaaaattttgttcaaatttggtgatttacttgctatacacatgtggtgtatataatgtttagaatgctcacacatcacttgctatacatctcttattttagatggcggttctcgcggagcatgcaaataagtgagctttatggcagttcagcttgaacttttcttggccacccgacagacactggaggcccaaattgagaacatcaagaaggaggccatggaaaagatcaacaagaacatccaagaggtcgaacagtactatggtgaagcagatgccaaggctaataagaaatatttgcagaagttcaatgactataaggaggactccaagaaaaaaaatggaggaaaaggtcaaggcccattgcgctgagctggaatctgcattttctacccttgcccatagctcaaggaggccaaaggagccaaggaggcctttaagaaccaaatgtctgttaaacttcaagaactttagggcaaaaacaatatcatcaaggggctggaggccaaggttgacttagctgaggcacttcaccggctcgctgaagaccaggctaccaccttggatgctggcatcgttgagaaggataggctcatttagatgaaagccaagactatacaatattgtaggacataaagtgtaataatctaaggtttaatattcgaattagtagccctaactagattaattatgtgataattaggaattatattattatataatttaatatgtgaaactgttatgatgtattgcattttaagaccctgttggtgtgccaagagaattttcataattttgacatgaaaagggtaaaatcgtaatttaatgatataatgtgtttatgtactatattattatatagtatgtttattctgtctatcaataggtatttctgacaagttagcgagagttacaattgagtatttttgtccgaatcgggttcggggcccaaaataaatgagaaaatttgaattaatgtgattaattttatagttttgtgtgagtgaaatgacaattttgcccttgtatatatgtttatggatatatttggccttgggggcattttgttcttttaaccacataagttaataatcaacaatatcattttttggaaaattagaaaaccattttctaggtatgaacccctcttagccgaccccctctctctcaccctctctatttgatttcaattgatttggaagaaaagagcttgatttttgtgtgattcttgtgcttgaagcttgggaaaaaacttaaggtaatgattcttgatctttttattctgaatttctgatatttggagctcttctaagttgttctttatgttcatatgtgattagatgcatgttgttgagaatagtatgatttgtggtgtttttggctatattatttctagtagattcatgctaggtgcatctttgttgtcttgggaagttttggttgagtttaggatgtgtaaatctaggtttgcactgtgattttctgggctaatcacttgacattctgggttttgttgctttgaatgtttaagttttaaagtttgtgttatgttgtgcatgtatggttgtgtagcatgctttaggtgttgtaactatgattttacgctttgtttttggcttagaattgttgttgatcatggatagggtgattgtagttttgattttgagtttgtgtatggtgttgataaggttttggtatgatttggaatgatttttgagtgttcgagaaaatggtaatttttggggttctagggtccctcgccacagccacgatctggctcgccgcggtgtggtccaacaggttgggcagccgaggccatggcttggctcgccacgcgaggccctatttttttgagaattttcagtttcttgtttttgctgtaacttttgactcgggactccattttggacgttcttgatatcattagaaagctcgttttgagctcaatatgttaatctataaatggaatgaaaataatgtgtttatgtgaaattgaatttaggattagccctatttgtgaaatctcgagaacatgtgactaagattatcggcgcttgctcaggaacactcaggggtttgatatctccacatacttgaattaccatgtaagacagtaagctagcacatagagttaagtgtagcagcaatcatgtatgttattatgcgtatattatgtgagaaaactgggattagggttattaccctaaaagcaaacagttttgtgatctagggttactactctagtatttaaatgattttgaatgcaatactatactatatatgttgagataaagaattatgcacataaggcatcattaggatagactcggtaattagaatcgagataaaccgttctaagaccttatgtaaatagacgtgtaagcgtaacacgtaggtctatgtcaaatagacgatagatgcagtggcatcaataattatgaggtttttgattattatgcatattattatttatactgtcttgctgggcttagctcacgggtgctctactgtgcaagaaatggtaaatctgttattgatcagccatgagtttgagggcttagctgtgtattgtacatgttcgagccatactagaccacgaaggttgggtttactagaagaaagttgtaatctcagcttttaccgcttaggtcagcgtgtaatgataacttgtaatattttgaaaagtttttacgggatctcgaaacaaaatgtgaccttttgaatgtttgtgaagttaaataattacaagttataattttactctatatttattttaaagtttaaaattctactcttagctttattaatcccgttttagcgggatcaacatatgtttagtcaccgttcatggtgttcctattgttagggcgttacaatttggtatcaaagcgccaaggtttttaaacttcctgtagatcagctgaatatgtacaatcatcttcaaagacaagctcgacttgtggtgcagttagtattgagagtaaatgctttactgcttttgtgatttatgtttaccattttttgttgtaggcaacatatgagcatctagaaaatgaaatgttgtgtgaaaagcatgattagtgattaaattgataaatgtttattttaaaagagaaattatatgtatgagttaggattaaggcaataagtgtgtaagtgtagtttcggtgcctaactcgccggggttgtttatttcagggctatttgagaaaaatggaccctaatcaatcatctagaccatagggcgagcacgtagagcccggtaatgaccaaaccaatccacaagcacagcatgagcctctgtagaatccatgagataatgcggaggttaacaatgctaatccacatactgactggtagcaaatgttcctcgaaatgtgaagcatcatactttgtcaagaagatgagttacgtttgtttaggtaatcggcccaggcaactccagttgaacaagtgttaccacaagctcctattccagtggtgggtaacccaagatttgtactacaacatcgagacttagtttttgagcattttgtcaagctccaacctccaacatttttgggaggtactgatatcattaaggtagagcagtggatgggcactattactcgtatactggataatatgggggtgacatgaactggacgagttgattatgctgcattcatgtttcaagatcatgcccgcgtctggtgggatattgtgggacagactcgagatgttatcatcatgtcttgggacgaattcaagagcctgtttgaggaagaattttataacattgccatcagaacatcacatatggaagattttgtgaaattggctcaaggtaagaggatagtggctgagtataccctagagtttgattgcctatccaagttcacttgtgacctagtaccaacggacttcacctggaaatagaaatatttgaggggattgaatgccactatcagtcaggacttgaaaaattaccaccgatcatgatacgttatacaagaaagtggttgagttggtactaattgctgtagaggtagaacaacatgtgattaaagagcaggctgctaaggatgtcgtcacggcttcaaaccctagtgtgggtggtagtgtcagtaaggggactgacagtggtaacccggaccataagcggaaggctgaagcttccagaataccaggaggtgatagaaagttttgtggaaatagaggtggccatcagggtcgtgtgttaacattaagaacttacctggagtgtcctaaatgcaagaagcaccatcacggtgagtgccgagctaaaacatattcctagtactgtatggtgagccattttattagagactgtccgtaatccaagaaataagaaccaaagaagaacaacaatcaaaacccagggcgtttgtttactatgactcaagttgacgctgatgctagtccattagtggtgacaagtcagttgtctataaacggttgttcttattcagtattatttgattttggagctactcattcttatgtatcaagtagagtaattaagagttttcataaactgtttaatgtgtatgctttgggggtttggtaccctgttaccctctagagacctaattgtatctactcggtggattaggtctttgtcttttttggattgatggttatgaattaacttccaacctgatagagttacaattatctaattttgatataattgtaggaatggatttcttgtccaagtaaggggcaacgattgactgtaagaagaagatggtagtgtttgaacctgatagtgctaatctaacggtgtttgttggtaaggtacacggatagcgtatacctagaataacaatcttaagagctagagatctgatgtgcagaggttgcctaggattcctagtaactacagtggatactagccaacctatgtcaactagacctgaaaatacgtggttggtgtgtaaatttctagatgtatttctaaaggatttacctgaattaccaccttccagagagattaaattcgttatagagttagttccaggagcagaaccagtttcaaaagcaccttatcgaatggccccagtagaattgaaagagttaaagatcaaacttcaagaattactcaacttgggatttatcaggctgagttattctccttggggtgctccagtgttatttgtgaaaaataaagatgcgtcgcttcaaatgtgcatcgattattgggaactgaataatctcactatcaagaataaatattctctacccgaattgatgacttgtctgactagttgaagggtaagacagtcttttcaaagatcgaccttcacttcggtgaccatcagttaagaattcaagaagaggatatcctgaagactgcattttgtacttggtatggacattacgagtttctggtgatgtcttttggactcaccaatgccccgactgtattcatggatcttattaaccttgtattcaaagatttcctggacaagcatgtaagagtgttcattgatgacattctggtttattctgaattagaggaagaatatgaattacatctcagattagtacttcagcgattgcaggatcaaaagttctatgctaaattcaagaagtgtgagttttggttatcacgtgtctctttcttagggcacatagtggataaatatgggatcaaggtcaatccggccaaaatcgaagctgttcgggattggccaacaccaaaattagctactgaggatagaagcttttggggtctagctagttactatcatcggttcgttgaaggtttcttgaaaatagaaacacctttaacggaactgacccagaagaatttaaaatttgtttggacagatcggtgtgagaaaatttttcaagagttaaagcaacgcttgattactgctccagtattaactctttcgtttgataaggaaaagttcgtcatttattgtgatgccttgagataaggtctaggttgtgtacttatgcaaactggaaaggtaataacttatgcttctcgacagttaagagagtacgagcagaggtaccctactcacgatctaaagctcacagcagtagtatttgcgctaaatatttggcgacattacttatatggcgagaaatttgagatttacactgatcataaaagtctgaaatacttgtttacctagaaagacatgaacatgaggaaaaggcattggcttgagctggtaaaggattatgactgtgaaatcctttatcatcctgggaaggccaatgttgtagctgatgccctaagtaggaaaggtcagaaccagatgaatacaatgaaatagatatccaagcaaatggcagatacaatgacccgagctaacatcgagtttgttgtgggatggttagctaacatcaccttgcaatctactcttctggaaagaattaaagaagcaaaatatcaagatccatatttcgtgaagtcttgggacaagatttcagctggaaagactaatgactttacggtggatagtaacgagatgttacgatttatgaactgtgtttgtgttcctgtggatgatgatatcaagagagaaattcttaataagtctcatgcaactccttattctattcattcggggacaataaaaatgtatcaagacattaagtccatgtattggttgcctaaaatgaagaacgatatagcaaagtacattgtaaagtgtttaacctattaacaagtgaaagctgaacattagaggcctgcaggtttgctacaaccattgaaccatccggaatggatgtggtaagacattaccatggactttgtagttggattacctaggactacgggacagtatgactctgtgtgggtcatagttgacaggtttacaaagtcagcacatttct

SEQ ID NO: 15064 - DNA, 8396 bp, Cannabis sativa
  modified_base (5669)..(5671): a, c, t, g, unknown or other
  modified_base (5935)..(5935): a, c, t, g, unknown or other
tctttaatagacttgtcgcaaggattgatggcttggggcgtgatttctggtggggatttgagaaagggaaccgaggaatccggttgaaagcttgggataagatttgtcttcctaagtccagaggtggtcttggtttttgtaaaactaaggagatgaatctagccttcctagctaaataggggcagaattttttatgcgaaagtcaatctctttgctgtgatattctgagagccaagtacctcaaaggaaaagagtttcttaattgtaagtacaagaacttagattcttgactttagaaaaatatggtcaaagctagtgacttcttaagagaaggagcttgtaaaatggtctatgatggaagggataccaatatttgggaggatccaatggctacccttggcaaaaccttctaccctaagtccaatggtcaccctgagtgtggcttgaggaaggtggcagacctcatgactagctcaggagactgggacaatcagaagttgaattgcatgtttgacagtgaaactacttctgctattttgagagggggtagaccctctggtcaagggaaaaataattagttctggacaaaagagcgcaacggaaaattctcttgcaagtggcataaatccaatgatttttttagtgacataaatacccaatatttgtaaaaccgtaatttttctctagtttcatcagtatatactttgttattgtcttaaacagggcacttataaggcccaaattatatatcattggatctagacagaaacgtgtagtgtgagttacttccaaatcttcttataaattcaaaacggagtctgtacagataaagttggagaaaaattatagtttacaaacattgggtacttatgccgctaaacaaatcattagatttatgctacttacaaactcaaaactttgggtacttatgctacaatttacccgaatctacatgcaataagttgaaaaataccttttcttgtatccattaattaaaaatatcctcatattatatttcattaaaatatactcatttttttgagtgggttgctcaatataacctcactcagcatataatttacattaacctaagcggtctaatgaggataggtctaatgaggatatcattaatgaggatatcatcatgaggatatcatctataaaagtgagtatatcttaaagaatacgaaaaatagaagtaaaaactaaaacaaataaaataaaataggtatataatataattgctaaatttatttttacctagcatatcgaataatattatttataatgatcacgaaatttagtttatttttatttaataaatgatttttttttaaaaaaaataattaataaatcatatatttgcctacaagtggtgattgccacacatatttggattttgaatttataaaaggtaaataaatatttattttcttttgacatattattgcatagaaaattgctaatggatactaccgttgtttagtatttttttttagtattacactactattaatagtataattaagtaacaagtcttatataacttaaaaaataacttttaaaaaagtatctcgttaaccaatcataaagtaccacctataaaaaatattgagcaccacccctgccaataagctattatataacatatatatcaaatcacatgggtacgtgggcaatcatagatcatttgtttggtcaaaggagaaacgttttgaattaacttggtactctactttagcattgcccacttgcatgtttgttttttcagccagccatgtatgtctactacaatcataggcagagaactacattaactggtggccatggtcccctaattttttaggaatttttataatctgttatactaaaaagtggagtttgagtcaagattgtttggtagtagtagtatattcaattatttacttaaaaaaaaaaaatagttacttaaaaaaactaaatatatgatgaaataaaaaaaaaactaaatttaatattgaattacgaactcatttatgtggtattttatatatataagttgtatagtggtatattaatatttttttttatattaggataataattatatatgcacacacaaacttaacacatatgtataggacaagtaattccaaatcaaaattattttagttaaaatgagtataacttgccatgttaatgtatgttaaatttttgtgtagtttatctgtatacataatgtgctttttcctcaaatgtacacatgatgttattataccaaaaagtataaagacaaaataataaaaaaaaaatatattgcttaactattaactcttattttcgttcttgtctgccacttctataatctatagaaagattaatgaaattaacaaattattttttttattattttttattatctatatcctatttagcatcttcttgtctttgtctttaaattatatatttattttactttatgtggttaataattttttctttaattattaatgggtttcaatcccaagtttgccaaactctaccatttttcattctttttacatataggttgaaatcaataaaattgataaaaaatcttttgtcaattttttttggttgacgaaattcaatattacaactttgcaatggtttaatttattactataaatcataaaaagaaaaaaaaaataaaatactactttagatttcttttaaaataaaaaataaaacatgatgaaaaagtgatatagacacaaaaccaaaacgagtgtatatatatatatatatatatattttaatattactataggtaaggagatggatagttctattaagaaaattttaatttttatgtataatttttatatatatatatttttaaaaaaattatttttacaaaaaaaaaaataaataaataaataaaagagcttgacttaaatatctaaacatatatatattttttttaaaaaaatataaacatatatatttttttaatagaatatagatatagtgtaaaaatagattttttttaatatttttttcaattaaatagttaaattaagcatattttttttttaatttttctttattattttattattggataaaaatataataatttaatatttttaaaactaatatttatagttaaaattatttagtaaccaatcaataatcaatgtgtaatgccccttgaaaaatatttctcatatatattatatttacaagcatctttctctttgttgatgtgcagtagctagttttatacatttttcataattttggggacaaaactaatatgatcatgtgcagtagtgttactgttagtgctacatatctcttgtgtctccattgtatgggtgtgaaaatctttgagcttatcttgggagataagaggcaacaaaattatgtcaatgggaagcatgtatttcaagaaaaaaactattttgttttaggacttcatttctttggtttttctatttcctctttgtaattaataatttccttttttagcttttaattttgggagtgcaattaaaagttttgttgtctattttctaaacatgttaaactttagagtgtgtgaaagtgaaatagcattatgggttcctatgaaaccgacattatgaaaggtatgaatttatatataaatgtcgtattgtaaatttagtataagatatttttgatagaataatttaataatctaaatgcaccaagaattctaatactgaataaaatagaagtgtttaaataaaagagaaaaaaaaaattagtgagatataaatttgttctcacttttttaaaatatctttataccatatcatcaatcaattagtgattgaccatttataaatttattgacagattcattaattaattgatttatttatttataattaatatacatttcatattattattttatgtctttcttttaatatttttttattttatattattattttatgtctttcatattattaattattttctgtaatttggtggatgcttaattttaactgtttttggtgatatgatatcttggtatttattcagaactttagtttaatatggtatcttgtagttggttaaggaggtaggcaggtaaagatagcgaattttaaagaatttctggttgagaggtattagctttcttgaggttgttgtgatgtgtctttggttaaagaaatagaaataccgatttgatggatgagttgcgtcattatttatggttttggtgcctttcaaggctttcgcgcctgatatatgccgacccctaattatttagggtaatttggttaataaaatttcaaaatatcatgaattgtaaaatattataaactttaaagttaacaagtgtttgcagttcaaattttactattgtgttataaaagagttgactttagttaaagtatgatttaaggaaatatttaaagaaatttgtgtattatttaagaggattaaaaatttaaatggtaatagatgtggttgactaatctttaattaaatggatttggatctatcaatttgcaaatagggagaagttttaaaaaattattagtaatccatctctaaagatatgatatgaaaattaattaagtaaattgagtagcaataataattaagagggctcttatatacttcccttaatatatatttatttaaaatggacatatacataattaaatgataaatatacatcggtttgaacatatatttataaagagaaatttgattaaatatgcttacataacgtttaaaatttttccctaaacttataattactaatatttgtaatctaggccaactttaatgttattctcaaattaccctccccatttacatcacccccctctctctcttctcttcccattctttctttctcatcggaccccatattggaccccgtcagatcccatatcggacacaatcagaccccgcatcgaacctcgcatcaaccccacatctgacccccccaatggacctacgtctcctacctcgcaaccttacagattcattgaacccctcagaccccatccgagctacatcgaatgtgcatcgaacctgcccaaatcacagatttgacattctaaacctaaatctatccctaaatctaataaaatctatctttataacagtaaaatcacaacaaacctccgtgcaccgttagttatgggttgagtctcactttggttgggggtgcgctgtgggtatgccgtgggtcggtgggggtgcgccgtgggttggtgggagtgcgtcgtgggttggtgggggtgcaccgtggatatgccatgggtctatggggtgcaaatgagatgagtatttttgagtttaatgtaaagtgaacctatttttaaaattttgaaatacattaatttaggaaattaatttccccattattagtatgcataaataatcaaaatttccttcataaaacactacttttacactatctatgtttaaatttaaaacatttatgtatagtaacttttcatttctggttttaaatttaattatagtaatatgcattattatttttggaagtttttttatttttacattgtaaaataatttcttttatatttttttacaaaattctacataaaaatacttatagccaggaacagacccacaagtaacaatgtaggggctactaacaaaaatattaccttttaaaaaattaaatgtannntttttaatttgataattatagaccaaaataatagaaaagtctccataaaattaaataaatctagtaagagtaattataatatatgtataaatattttttaatgataaataagtccccacaaagtaaaaattctgggtctgttactgctttaacgaagtaacctaaattacaattgaaatccgtataacaacttacataaaaattactggagaaattaactatcaaaacaactcaaatcgtaaatttaaaaaataaaataaaaantaatatataaaataatttttttttatatttttatggttaatttttattactcatacatgcattgacacaaattcacgagtgaatagtgattgtttgagctcgaagattgtatcatgatcaactaaaaccatatcacatctttacatatgtggtattttcttttttgtcaaaatattatcacgtgtctatatttatgtgtatcataccttttacatatatgtgtcaaaattatagtattttggcatgtagtttatttacattaattagtttatacatttatatttgcttgctctcattaatttttttttcgtcttttcttttcttgtttgtaaaatttattgcttcccatctttagatataattattataaaataaatacttacatatgaaattgcatgcatgtgatgaaagttaatagaataaggttccaaattatttgaaccaataaatttaaagggatatgacaagtctatagtgtgtgtgatacatgaaaactccacaactactaattaattaataataatttggtaagaattttaagatttaataatcaagccaatcctttaaaaaaaatgaagcgaatatatttagtattatttaattgtggttcatttatatgcacgtgacttatattattttcattttaaaaggaatctattgaaaatattttagggaattatcttatatattagtttttttttttttttttaaatttatggtatgagactgagttatttggatagtttcaatatgacttgaattttggttgcaatttaggttgctatattagttgttatgtggatttccgtaaaattacaaaaaaactactctgaagtgtaaaaatataaaaacaaatttttttaaaagaatcatattctataatttttttttactttttaattttttaattgagataaaaacaaaaaaattactttcaaattttttttacaattttttttatcaatattttatcttagaactcgaacctagactcaaaaccagatttggaccctaatcctaaccctaacttacaccctgatcctgaaccaaacctcgaacccaaatttagacccaattttgaactccagacttcgaacccaaacctaccttcattaagaaaaattaaactgtgacattaattaataatattcttatatatattgctttcaaaaaaaaattaacaatgatcttatattgaataaaaagtaaggtatgcatataagttaagtgataaactatccccatggcaattccaagaggaccccatgcagttataattatgaacttttttagtcagtcctctattaatggggcaaaagtttgacagagccatataatcatataataataatagttatatatagtaaacaataataaatacattcagaatctaaaaggtctgcgcttaacacgtcattcaccatcgatttctcacttattatttgcggatgatagtcttctcttctgtgaagctacacaaagttcggcaagggcgatcaagaaagttctggatatctaccaccaagcatcaggtcaactcttgaatactacaaaatctgttatgtctttctcccctaataccactcaagcagctcaggatttctttcacaacactttgggcatgcctattagtgaatgtcatgagcgttatcttggattaccagccttctcggagcgagataaaaaggaaatgttcagtgatgtcaaagaacgaatatggcaaaagcttcatgcttggaatgagaaattattttctgttgggggaaaagaggtacttttgaaggcagttgtgcaatcaattcctacttatgccatgagttgttttcgtctgccttcgactttctgtagccaattagaatctatgatggctaatttttggtggggatctaataaagatggttccaagatacattggagaagttggaaattattatgtaaatcaaaatttgaagggggtatggggtttcgatcctttgttcatttcaacaaagctctccttgcaaagcaagcttggcgaatctttaacatgcccaattctttgctaagccgattgttaaagcatagatatttttccaataatagtttcttggatgcaaggctcggtcactctccatctctcacttggcaagccattcattgggggagggaattgctaatacaaggtttgcgttttaagattggtagtggtttcaatgtcctttctggctcagataaatggattcttggacataatgatttcaaagctattagttatcaaggtccatctaatctaccagtagccaattttataacagaacaaagagaatggaacattgctcttttggagcaatattttttgcctatagatgtggatagaattgtgaccattccactcagttttttcccatcaactgattgtctcatttggcaccacactacaacaggctgctacacggtgaattcaggttttcatttggcagaa

SEQ ID NO: 15065 - DNA, 6501 bp, Cannabis sativa
cactggattggataaattagcctgcctaattcaatccagtcctgcgtaccaaacgggccctaatttcattggaactgcttccaatttcctccaaatcttggcaggtgcctcttccttgtccacaaaattctattggataaattgaacatgataatccctattgttgtttccaacaactcttcttgctaaatttcggttgtattgaaaatgataatccctattattatttccagaaactcttcttgttgaattctggttgtgccttctggccatcgactagttcttcaagaactttcaacatcctttattgacattactcattttattaataaaatctgaattaagaagagattgagttaaaggattttcaattgggttattcaaaggaatatccaccaaatctttaatgccataattctcttgctgggaatcagcttcctccatccttgcttgtctttctttatcttcttttgttgactttttttatcaagaaccttgctctgataccactttagaaaattttgagactaaccctacacaagtcaacacttacaaacagatcataaggtcaattttgaccttttaacgaacaaatgtttggttcgaaaaataaccaagtctatctctgaattcacacatgaacaaataaacaaaactaaatctaactttaccaaattgaacaacaataaaattaatcaggttctattcttatgagcaagaaagtagatttaagctagcatgcaaagcaaaattaatggtgtaaatggtgatgaattatgcagatgtaagaagtagaagaagagaagagattaaaaacaagaatttatagagattccccctaagttgatggggtactccttctttgagctcacctcaggaatgagcttgcccatgcactaattcaatccaagcttcactacaaacaatggagcttccagttacaaatcaattggtaagactcgaaacactagatgccctttcttctgtttatactttctctcaacactctctttctattactcacaacttactcttttcactttttctcaactctaagttcttatcttgagactcaaagtaattgaagggctctctcaaaaaatcaactcaactcaaaatttggataaagagcttctatttatagaagagaagcaacttggagaaagatagtgtagattgttgagctggcaggtataagatcgagcctctagctttaaattctttatgttagctgttttatatagcttgaattttgttgtaattagtttgttaggttcttggtagtgtaagtaagatttggttgtaactgattttttggtttagacagtttacgattagatttaattctaataatttatttatttatattgatatgtttttaaattatttatcaaccatcatattttttgtgttctttttaacaacttgtttttcgtgtttggttgtgtatattattaatatatttaataaattaaattcatacaaaataaaaattataaaatttaagccgctcgcgaattaaattacagtaaaatactataaatatttaaaattttaagtcatacattaattttggtattttaaatagtgatcttgcattttccacttccacagttttattgttttcacttttcatgacagatacaattattgttgtttgcaagtttttgcatttaaacagtaataatataaaccataatgaaagagaattatacattgcagcaattacttatatagtgtaaaataattttgtaaataaaataatacaattaagtgataattaatttgatgcaatagaatgttaattgtaatagtatttgtatttgatgtagaaatgtaatagaataatatatattgatcaaaatatctttattgtttttaattatgagaattaccttggtttttatatgtaattatcattccaatgtaacaataatggattacaaaagttaaaaaagaaaaaaaaaacaatataatgaacattactattatggtaaaccaaacactaccttagagactaaaaaattgacagtataaaggtgtaaatagctaattttttttaattgtttttaacagtaaacatattatctaaataataataataataagtcatctatataaagttcaccatcaacttgagtgttaaacattcacctaagataattatgttgaaagaaacgaaccaacagttttttctttttttactatgcaccaaatttcatctttcaataaacgtaaaaatcaagaaaagatagaatacttttgttctaatattaatagtagttataaacatatgcaattttaaatctaaatatcagttgggtgatagagatcagggacttgagtaggccaccatggatgcaaaagagaaacaacacttactcttgaggcgtatattttaggtggaagattacaaagaatttcaatatgactctgattctggccaagcatttgacattgaaagatccttatatcctccttagctttaagagttttattcgataatgagaaaaagaacacatctccatcatccggatgaagagcatgtatagtaagaagcgaagacaagctcatacaacattccgacatcttcatttgatcgtgataatgcactaaattccaattacacatcttatcatcatcaactaattcccatgccttgaaaacaaagaattgtttccttttataccaaaagaattgtgctagccgcaccttcccccgaaccactccaacatgtattcttgaacccaaagaacgccagtcatggcctaactcccgaggcaaaccaaccaaatggtattgttttgaacaaatgtctaatgcaactaggccttcagttttgtacacaccatatggccagtatacaattccattgctaccgacaatgggtgttcgataagagcatctgtcaaagagggccacttctggaaaattaaaagttgaagaactccattgtcctgtctcagaagaaaaaattgttaaatgaagtagaaatggtggtgaaacacttgttatatcatccacctctgtgcttatttggactaccttatacttgatcttactatactcagatactactaatgcatatctagaacgacgatgaaaagcgtttggagaacgaggaagctcaacaaactgccttgtaaaaggattgcaaacaaacaaacatcctttacgatatattccaactagcaacaaatcctcaaacgacgactctaagtataaactattcttgtacatcttccaaggtaaaaaatttaatgccgcttcttgaccatagtgaagaatctttgatctctcagaaatatactgctccgcaaagaaataatgatcaatcatagctaagtttgtaaatagtagagtgaaaggaagagatggagatgatgatgacgatgatgatgagttacaaagccttttctgacggtgataatgattgaatctatgactgaaataggctttggaacgagaaataattgagaaccaacgcttgcaaacataagagcactccactatacatctaaaatcaggaagtcttagcaatatttccaataatatatcatcaccgagagtagacattagtgacactgaacatccttgttcatttgttttatgacttttcctacacagctgatgaacaatggttttaatttgagctacacttcttttttccaaaaaaatgataaaattaaatgaagagctattataagtgaattacctgattatcagaagggggtatttggtccattaatcgttcttgattcttgatatgagtatgtaattaaggaggagatccacaactagcttctaaaaaaatgtactcattcaattaaaataagaataaccataagcaaagaaaggaaaactcaataaataataccatttatcttttcaaatcaactgcaattgaaaaatttaaacaatacatacacactaactctctactcttcaaatattctctaattttccaattctatgacagtggcatatagatagtttagaagaataaatgctttaatttaacaaaaacaagtaccttacacttaagatcagatgaatgagtgaatatcaaaactaggctgcacaattaaaagaaaaatgatgttaaacttaacaaattgatcatatttttaatgcattagtttcgaaaacaaagcaatgaacaaaataaacattaattttcgtacaaactaagggcagcggcaaacaatgtgtttctttctggaaaaaaaaaaaaaaatccaaatctgaaaagatccacattcctacaaatcttttacattatacatatggctacggattttatggaggcaagattatccggtcgtctccataaaacatgtaagagaatccaaaagagtagctcaaatggtcaggtatgtggtttgctccaacaaggtccgaggttcgagtcctctcctgaatacctacatagcaattgttatagtttcctggttcctaaatattgaaaggtaatgtgaggatcctaattaaaaaaaaatatgaaaacatgtaagagaattgttaaaagacattagtattccaacattactctaaagttagcaatagtataatttaataccattttcagtagcattagtgcctaatgacaatgcaaagtagcattgtaagctgaaaagccatatcatctatccaaaattgctagaggtatagttgggaatgactacatgaaaagctatatcatctattttatatggtgtgaaacagaaattgggttcttcatggactaaatagagcagatatacagttaataacaataacaattattatatttactgtgtcaaattcaaagaaaattattacagacataatttgggtttttagaaaacatgtttaagctttgcagattattctgtatatctagcatctatgtaaaaatgtcttctcaaccacttgattcactcatttaacattttcctttttaaattgaaaaattccatcatgtattgaacaaccatttaatcaatcatcaatttaatagagactcaaatatatgtagatcgtcatggcatatacaaaaactgaaaaagtagatcaaaataaaaaaaaataaataaataaataaataaagaaagaaactactgactttcgtccactgcccacttgaagaaggattataccagttcttctacctgtgcatggaagaagatggttgcgtttagaaatgagtttgaaaagaaaaaaaaaaaatacagtataaaaaaaacaaagaagaagaagaaggaggtaatttctagtgggttgggtttaccgggcttggcttataatatgggcttgcatacaaataaaacttttatttacaaaaatatacatatttttgaaaagagaatttcataataacacactacattttaaaacacagtgtatgtacctaaatttctatgtttataaccggcataaatttaatgtttatttttagctgcataagtacctaatatttgtaaaattgtaatttttttttcagctttatgagtatagactctgttttgaatttgttgaaagaatatttgaaagtgattgttactgtgtgtttctgtctacacccaacaatcttgaatttgagtcttatatgtgttctgtttaagataacagtagagtctatattgatgaaattagagaaaaattacagttatataaatattaagtatttatatagttaaaaataaatattaaatttatgtcacttacaaacttaaaacttgaatacttatacaactatttattttaataattactcataaatttattttgtcttatttgactaattatgaacataataagttaatactaatttatactttatgttttataaaaattatcatttgaaatatttattttatcaaataacaaaattaattatgtattttttaaaataatataaatcccaacttagctcaattttaatataattaattccaacatattttaataaatatataaaatataattaattttgtagtaacagatttagattagatttttattaaatatttttaaaaaatacaaaatctattgcaaaatattgtttttaactaggtccgaagaaaatatataattttttttctcttttttaattttcacttatgattatattctgtatggttccctcctaatctgttagccatggagctctcttcgcttctgagtttgggttcatggtcgagggttcctctttccccttccctactaaaccccaatctcttcttccaccgctccaataatctctccctcacttggaattggaaccttcccacctccaaccctcatcttcttccaatcgcagccacttccaccaaccattcttcttccccaaatgccagagcccaacctcattttcgggacttctggagtgattctcagttcgttgaagtcatcgccattggcagtcgcaaggatgcggttctcaatttctgtctcgattcgccatttcagtcttcgtctctgcgatactggtcacccatttaacttgttcgttgcttttct

SEQ ID NO: 15066 - DNA, 5388 bp, Cannabis sativa
aaatgagttttatttagggcataaaacccaacaataacacaagtgactcgtggactaaatctcattaatgtcctaataggtaaaagtatattctctaaacatgtatttataatttatatttaaaagattaagtagttaccaaaaatttcggttaacaccatgcatcttattactagctacaaacaaatcccatcccctcccgacaacaatgtggacgaaattgcaggcaccctaccccaaaaccctagatccttgtatattgtagaaagagagttggatttttatttaaaaaatatatacaatacatattatttgcatagttaatatattttcaactaagtgtacaaataatacgaaaatattctaaaattcaagattagctactaatcaaatgtgtctctattattactaaaacaaattaaaattgtatgcatattttattttgatatattatttcaaaataaaaggctaacattgaaattcaaaagaaaaataattaatttttgcctagaatacaagatattaaaataatataactaggatgcttctataatatattccaaaaaaaagtgcatctatgcatctcttactattttggtatctaggaaaaaaaatagtcaataaattttataatcgtgtgcgttatagttatttaagatatcctataaaatttgtgaaattaagaattatatataatataaaaagtagtgtttaaattatctattttacacacgtataaaataaaagtgttatgtcacatatgcaataaattatttgaatcatgttttcaacgtgttaaatattttttcaaattttttaaaattttacaaaatgtcttaaataattacaatttacatgaatttaaaaaaattaaactataatattattttaaatgctaagtatataacttataagtgaacttttaaaagatttttttttatctcaaaaaaaaatccttttaagagtacatttatgtagttatgaaaagagaaaccaatttaaaagaggaatatgatttttgagtttttgactataccaccctttccgataaagaagcatccacaaattgaatcaagacacgttggtttatttcttttgattttattgtaataaaagtcattttaaagttcatttttctacagagtaaaagcaattatttaattgaggtaaaacgtgagaaattttttccaaaataagcagcatgaatttcaaagaagaaaaattgtaatgaggaacctaatagatttaaccattgagacaagttttgatagagacaagagattaataactaataaattaaataaataaatatatgaagtatatgtcatcaccccctatatagtagaacaacaataggagcacataacaaggaaaaatgtctaataattgattaaataacaaagcaatgcaatgtgtaaatacccaaatcacacacatatataaatgttttaataaagataaatacaccaaatatttaattgagtaacaaattaatgtgtctcgatttagataacaataaattctaattcaaataaatataattagttactacatttttttatagtacttagtacgttttattactactcatataatttgatatcggatcttatacattatttaatactattttatttatttattttttatcgacgaaaaaaaaaaactcttcaaattagtattaactcattatccaacctaaaaatatattatactctatttaattccatccatattttgatcacatattattattaataattaattaattttatatatataaaaatcactaataatgaaagacaagtttagggctttaaataatagtaataataaaaaaaagaaaaaaattaaaattatgaatcccaattgcaattttccatgtcttcctaaatcccaccccataataataaataaataaataaaaattgataagaccaaagagagcatgaaaatgaaaggaaataaaaaggaaagaaggaggtgggttccttgcacccaacgcatctaccttaggtttttggttcggaacttggttcggttgtggactttctaaggataagaacgacctctctctctctcaactctctctctcttaacgccatcatctaccactccctacaagaacccataatttccctcaccgcctccattcttcttctcaaacctaaaccacttaaacacaccccactctctttcttcattcaaaaagcttcaatctttctcattcccaattcaaagaagctgtctttctctggtttagtcaagctggcgatcgaaaaccaagactccactgttcgtgaaatcaagcccaaaagcagaagaatcatggtatatatacatttttagttctggggttttgttaaaagtttgatctttttgtttgattgttgtgatgattttggtatgtggggttttgtgtatttttttagggtgctggaggtcctgatgatgaggacaacagatggccaccatggttgaaacctctgttaagagagagtttctttgttcaatgcaagtcacatgctgattcacacaagagtgaatgtaatatgtactgtttggattgtatgaacggagctctctgttctctctgtttagcttaccacaaagaccaccgtgctattcaggtttggtttcaaattcaatcccaatactattttttttttttgatcaattttgaaatctgttgttttgcctcagaatataaaaatgtcttttttattattcatcttttcaaaagtttgattgaacaatgcccagatgaattgatcgggctctgattaaattgcaattgtgtttgctgtgttatgattgaacagataaggaggtcatcttatcatgatgtgataagggtttcagagattcagaaagtgttggatatcagtggtgttcagacctacattatcaacagtgctagagtagtgttcttgaatgagagacctcagcctaggcctggaaaaggagtaactaatacctgtgaagtctgtgaaagaagtctcctcgactctttcagattctgctccctcggttgtaaggtaataatgccttatttctcctttttttctgtttggtttccgagaaaaataaaatattctcagatttctttctatcaaaatcaaaccaatcagctcagactaaatgtcgtcaatctgtttggtttaaccaaattagttgacttttccgtcgtattgcggccactaattgctggttaccaaaatgtgggacttttatctgaatcactacactttttcaatacccattttcctgcattttcccgggaaccaaacaagtccgagtctttccaataaaaatcaaaacttttattctgggtcagcctaaatttaataattttagagctttgtgttctaacaaattttggttcttttgtctttttttgaccagatcgttgggacctcaaagaatttccagaagaaaaagaagcagcaaatgacattaatggcgtctgattctgaggattcatacagcagtagcagccatggtcaacggtcaaaggttcataatcacaatcataatcatcataacaaggttgttcagagcttcacgccgtcaacaccgcctccaacttccgttaattacagaacggccaagcgaagaaagggtattccccaccgtgccccaatgggaggactaattattgaatactagaagtgtccgtaatttttagttaattgcactattgccccatatacgaacttagttttgccataataccccttctccccaatgcccagagcttttctctacgaaggccggtattggattggagactctacccactactactactattattactagtaatgtatataagacgacgccgtttgggaaagtgcaatagaaaagtaaagttgggaaaggtaggaaataaagacaaaataccaaggactaaaaagaaaaaaaaaatatagcaagtattgaaaaaactcctttagagtttagtgtcctagttttggagaaatagagtgattatacataagttttgagtttttaatataagaaaaaaaaaatgtaaatatttggtttattctctttctctctctcttttcttttggggccttaatattttagagggattaggatgaaaaaaaaataattaatgtactccttggaaataggggaatgtctatatatggaaaaaaatgtaataaaaagatttttatagtttgtatattttgttgtatgtatatacgtatagttatatatttttataaatttccaattatagaagctttagtggcggtggggctccgttttgcggcgggtcccgcggcggccgactcgtgtgtaatgggtgtgcacgtggcgcattgtgattggttgttgaaaaggttggggtttttctcgggtcgcggaatcaaaaaaagtaggtcagccgccctccttacacgattatttttattttttctttgccttaataaaattagcgtgtcagaaaataagaaagtcggtttctttgcaagtgggttttaatttcataccaatgtgggtcccaactacattgttttccacacatttacagcccttggatcaaccgatgacgacgacgatgatgatgatgttttcctttgtccaaattcgttcatcttttttttttcttaatggcaaagaaaataccaattaaattctttgaaatataaaaatggaacataataaaggagagaacaaatttgtatcaaactttgttttacaaatacatatacataaatgttgtacattaataattttacaataatataaaaataattattctattttatacaagtacaccataagataattaagtgtataaagataaaaatatatcgatacattgtaaaaattttctttattatataaaaatcatttattagatatcttataaaattgcaaaacctacgaatgcaccataaaatttcactacaagtgtcttcttaaacaaattagaattttcaaatagtgtgaaaacatttgaagcttatatggataaagacttaataatttaattgtcattgtcacattatttattgaggataaatataaatatatttgtagcattttatagaattgtcttaccaaagttatatttagcatttcattttgagtgtttttttttgtttttgtttttatataaatgataacattagactaaaggcaaacattatgtgattgttaaaatttatttcaataaaatatataatgtgataataatataatgtaatgtatttgaagttgtggaaaagccaaaaatggccgaatacctaaatatgaaatgataaaaaattgtgaaccaagcgtgctacatgacttgtcccctatgttgagaaatatatatttaacttaatatactttattatataattaaagataatatctttaaatacacgg

SEQ ID NO: 15067 - DNA, 4600 bp, Cannabis sativa
aggaaaaatgcagtattcacagacaacaagcatttcaacacacaaaacagcaaaataacaccaacaacccacagatcaagcaccaaaacaacattctaaactaaatataacaacaacagagaagataaaaaaaattaattgtcaattgatgcttcatatatggggagcttgtagtgttggagcttgtagttgtagtgttgtagtgtagtgtagcagcttatactgttgaaaatgagtgaagagaagaaaaaaaaaattatggtggtggagtagagctcggctgaaagctctaggaagaaggaagaataaatgggaagagaggagagagagggatgtgatgtaattggggagggtaaaattgggttttagtaacaattatctcattttacaaattttttaaagttttaaattagttgaccaattttagttcatattatgcataaaatttcaaatttccctaatagttaagcgcttgagattttacacaaaatgggaatttcacaaggatttaaaatctaacgatcaaacatcagattctaaaggtatcttttgcaactggtaaaaagattagaatcacaccaaatttgtataaaaagttatagttcataaattagcaaaaacactctgttaatgttgcatgttccaaaaatacctttgaaaaaccaatcctcatctctgagaatggatttgccaagtcctcacaatatcgaaaattactcatgttttcatcttcttttgtcactaccattgttaattcaagtaaatttaatgtccatattcattccgcatcctccaaatggtcattaattccgatataattctagtctctttcttgcttttcaatatcatacttttacttctacaattactttagctaattgtttaccatcttctgttcatgaatctagcaatatcataaccctatgattttttgtcatttgtcttatttacataacttatccttcaattaactttatgtttagttaacacacttgtaattaaatgttgtatttcattttagtctggtcattgtttattttaggatcttatgacaaaaaagattattggtaagagatatgagtctagaaacctctacattcttgatacaccgctcccaatttccattgcttgttcgagtgtcacttttctttttaaggttcattgtcgattggaccatccatctctttatttgctcaagaagctttgactataatatagtaacatgtcttcgttagattgtgaaaaaaagtatgaagtgatattacataaatctcatctccttacgttacattcatactcagcttcacaaaaaagatttgggggtgctaaagtatttttgggagtttgaggttacaaaaaaaaaaaaaaattatcttcctatctcaaagaaaatatgttcttgatttattaactaggacaaaaattggggcaaactcttgtaatacttcaatgactcctagtaaacaccttacaagagatggagaattatttgaagatcctaagagataccgaaggttggttgggcagatgaattatcttacagtgatattcaattagtgtgctaagtcagtttatatcattattaggtagccttaggaaattttttatgttacttaaaaggagcacctaaacattgaattatgtatgcaaacaatgaatactgttatattgagtatttttcagatgcaaattgggtagggtcaaaaaatgatagaagatccactccaaattattgtacatttttcttttttgttaagtacaaattattgtacatttgttggagggaatttggtctaatggaaaagtaagaagcagagtgttgtgtcacaattcaatgcatagtccaacttgtgtgagataatgtggatgtatcagcccttgactaaattgggactcgagattttaatacccagcaaaattgtggcatgacaactaagttgttcttcacattgcatctaaactatgtttcatgaaagaactatgcacattgaaattgattgtgattttattcaacaaaaaatttaataagacttgatctctacataacaaagactagagcactgaggggatatcttcacacatcttttaaatggggtttaagtgaactatttttgtaccaaattttttttaaaaaaaaaaaaattgtaacaaattggacatgattaatatttatgctctaaattatatatagttgtaaattagcattactctgatttcctaatttggtatagtttcctaagattgataaaatgagattgatctcattgcaatggcagcatctataatattgttctaatatcaatagaagatgattaattaaacacaataccagtcaaaaaaactgatgctgcgcaaaagcatttacatgcccaaagtttgagtgtaattgaactagaacagtttctcaggtgacttcagtgtaacctggtctgtctgtcttcatctgaaaaaattacctagtatgcatataacaaaggtgagaatgtgttttcttcatactagtggagcctacaaaccagttacctagtatcaatctgacattacttgttagacatgaggaagattctaatttgaaagcctatccttcattgggaggacggatgttataaagacgtgccaagcgcttagcagttccatcagacatgataccatccatcaactcgtgcttcttataatgtgctttgagttcttcttgctgcttctttgcaagcttctcctcttcttgtagttgtttctacagcaggaaaaaaaaacaataaactatgtgaaagaaatagtaataatttcaaaggcaagcctcagttaaataacaacttaaattactgctaatcaattgagttttcccctttcagaaaaaaaaaaaaaaaatcaattgagttataataagctcatattttgtgtttcaccccagacatttcctcttcggctggcagtagtaaaaaaaggtaaagtggtgtaaaggtgtgccgttttcactctgtttaggctcaagataagttgcctttatagaacaatgtacaacttatgcatttgcttctttcaaagcaacaaccatgtaatcagattggaaagctgtagaacagtctttacaatatttattttattctatactcttttgctcttactaaattacgatttctaaatcctagtgtaataaaggaaaaaaaaacaaattaaattcaaagaatatatgagttgctggtaggaaataaagttgtattgtatcctagaagagaacattaccttaagcaagaagtcagcttctttggaatgaatttgagaaagatgcttgagtttctttgctatctcgaaatcaggatcgtcattatcaagccaacgacaatgtatttttctatcaggtttcctgggacgatcatcaaacatattctccacagcagcagatgccctcacaggtctaggcatcccagatatcatgaaagggaactctgttatcacagagataacagcatcagcttgttttttgctctccatttccactaacgcacactttgggatattcccaggcacaatgtagttcggaatgaactgtacactatttacattaccgaactgatccagagcatttttcatcacaggttcagtaacctgtggtgagaggttgtcaatataaactgtccgtttaactttctcctgaaatgcagcgtactcttcagaggtgcccatatttggaataccaaaaccaaaatcaacaaatgaaattataaagcagctgcctcttccttgtttggaaatcacgtaaaaattctgcccaaaatcaacaaatcgaactataaggactggttaaaatcatattacaagatcacaatgcaaattgcaaactacatccgtaataagtagtgaagacactatcgaaacactaagtggaggtttgcatttgatagtctaacaataattacatatgttcatgtttataccattaacatttttgtaaacacaatcttcaaaaagactcccatgacaaacgtaaaagagaaaaagaaaagccacaaacaatttacaatttatcactctactaaacggtcaagaattttcttaaattgaactttaattttcgatatcatcttctaaataaaacaacaaaaccctcatcaaaaaccttctgacttaacgcatttgaaacaaaagccattaatgcaaagaaaagaaatcttagaattccaactgagacagcagtacctcctatatataaatcccagcggggccggccttaacgagttgacacagaggttcttgcgggaagggcaccgcgatacttgagcgtccgtgagaaaaccgtccgtgagaaatgagcagactaccgtcaccgtcaataatggatgtcggagagggagagtgggtggcgttgagagaaagggtaggtgggcgcgttgtagggaaaagagaaggagaaagaatgtgatcaaaccgtttgggcttttgccttttgtaaggtctgttgataattgcctttttctgtcaattcccaaaaatgaaaggagtatttacaaatacatatactattaaggactaaaaacaatattatcaatactaagggaccaatttgctatttacataaatatggtgctagaactctcgaaaa

SEQ ID NO: 15068 - DNA, 2090 bp, Cannabis sativa
tttggtattaaatttagaacaaaaaaaaaaagggaaaaaaatgtcgttgaaacggtaaagtaggcggtctatgttgcaggttctgttataaaatggtgctgtgattctgatctgaactaattgaggaataggggcttgtagctgtttgctggactaaaaagtgctaaccctaatatatcctgaagtctgtcatatgtggttctttacaagtatttttgatcttttctttattattcttttcctctggtattgtaagatttttttctgcaatttgtatttatatttatgactacataaaaaattggagtatagtgttagcaactaatctttttttctttttaaatctatttatttttctgagctattaatttattggtaatgaaggttgtctagttcaacttgtaaaattagtgtttgttttatttagattgagcatctattttgttgtatgcgaggtatgtggttgaaacgtgaaaatatgcaaagagaaatgttaaagcgcaccaatgtagtgtttagtaattttttatatgttaatatcgttattggttcaactaagtatcgagttttatatagtttaatgtaataattttaggaagtatcgcttgctaatcgtgaggcggatatgtttagaaagtgttagacactattagtatctaataataatgctcatatgtaaattggtagtgctatgaaatgatacacttaatacgcttgtatactttttattgttttgtctgatagaagcttgcatactattcatttcatcaaattagttaatgaataggcatttgagatattttatatatagatgaaatgactattaatataattggagagagaataataattttttttttttgaggtaggagagagaataataattaatggtgtcattatacaataaattagttgtgaaatttaattgttttattaaaaaaattaataaaaaaataactatattctggaaacgtaaataatttaataagtatataattttaatttattcaatatataattatataagtagacttggctttttttttttatttgaggaaaggaatagaaaaaaaaaatgtcagtttaaaaagaaatataaaaggctaataattgatattaatgttaaattaagaatacaaaatttgttaaaaaaaaaatataaagttaaacagttggagagagaataatattttggttattaatttattgttatttttattggagagatagaatggaattatttagttggagagagaattgaataattgttaatggatggatgttaacgttaaaaaagagttaatgaatttgttaactactttgatgaaatgacttgaaattattagtggcacagggtgggaatagggaattgaggacaacaatttttttttcctaaagataatccatgcagttgacttcttttcttctttttcttcatattattttctcaaactatactgatgatccttttccttggaactgaaagtagacgatttaagattattgattaaatgcaaccttcttttattagttttagtccaaacttttattagtctgctcaataaaatctaccagtgcattgacgagagccacaaaggcaactcttcttcttctttgtattaccatttgcatcatgaacttgatcaataacataatggtaatcataggttaactattcaaaatgttgaattttctcagcagcaaaaaacattatgtgaggaatgctctcatcctcgtgaccatacaagatttttttgcataaatattcaaagaacaactatggttgatgaatctccctacattaccatactctgctgcatcaatggtgaccccgctgccatcatccacatcttcgcaattattcatcaatgctggtattcgaatcatgatttttttcaatatcaaagaggtagtcatcataaccagcttttttttttttctgcttcctcatccataaggagttctcctatgtactcgcatataaaaccacctaaaggaatggattctcgagatctcaaaccccatccccttaacttggttttgaaatgttcaagtttaaatttgagaccgtactgactcactctattgtg

SEQ ID NO: 15069 - DNA, 7911 bp, Cannabis sativa
gttcaattaaactattaagtttttgttgtgactaccacaagatttatcttattctcctaattatggttaggatatttttaattttaaattaatcaaaaaaaaattatatgagagaagagaacaatgactgaggaaggttttgatccatgcagaacgaagagtagtaggtttaaggaagcgaatcgaggagcttcgatccgagcttgaaggtacaaatgcagagctcgaagatgttaagcgcgctaaagaaatcactgagcaagagatcaaaggctatgaagttgaattggcgttgagcgaaacatcaattcaaagtcttaaggtttttctttttctcctttcaaaagttgaattgattttttatagaacatttgtgtaatatgattaaattaaattccagtcaagggtttctctgattcaagacgaaattgcgaccgttggatctgatttagaagctctgaaggtactgagcaagcctccttagtccttactgctattttttcttgttcttggtgatttcgggaagaagattaggaattattttccttatttagacttatttttcctatgtttgttcttttgaatgtccacgtttgaaattgcttgtttcaatacgggaagaacaacgaaggagccttacggtagtctttgatcctaaatgttcttttaatttttctcaaatttgattgtaatatttattaaaaacggctacaatttcttttgtggatttttcatgcagagatgagtttataaggcagatgtttgagatgaatgcaatgataaggttgccatgttgttatgttatgtcttgtgcaaatgcttagtaatctttcaagtagaatttctttgataataattgtattgtgagttcagtttgcccgatacttgggttttcttgggttttattaatgcaggaagtttcaagagacagttgctagcaattttcataaagagtgctcctttggaactgttgctggtactagcttggttttattgttctactttctaattctaacatgtattacgttttttgctgttccctttataacttagaaatgattgtaatattgtttcagaagaaggctataaactttcagtgaaggagcctaatgaagtcactttcacatgtcatgaggacatgatagcccaagtaatttctcagataactaaagaggaagaagaataccgatcagaacaagaaattcaaaagcaggtgataaattgatcatttgaaatggttatacaaatacagtttcctgaattttcatatttgtcttttataataatctgaaggtggttgacacttgtgcagacacagatggagttcattaattgtgagaaaaaggtgtctctgattgaggtcattatgaaaacaactcgagcattgcaggacttgacaagatatcctaacagaaatgcatagaaaatttacttgttgagcacacgttgaactttttttttttttgacgcgacacgttgaacattctttggtgatcaagacagagaaatttctacattggatataatcatcactaattactggataaatgacttgataagtgcatacaaatgattttgtgcaagctgttacaaatgattcctaggagtttttatttgtttccattttctgaaaaacaattcctatggagatggacaacttccttcataaccacttgctcctttatttacgaaaggagaaaaaggaaaaataaaatgttaagcttcaaaattgtcaacaaaatggatgttccaaatatcattttatttttatttacaagagatggaaaagggaacacggtatagctttttctggttcctgttattactattttatttgagttaattctctgagcataattcttaccaaccgaaattgtccttgactggaattaagcagacttctgaattagaacaggtgtacgcttccattgctgaggagttgcagagaagatgcatttgtccaaactgtcatttggaaaacgtcgacatcctcagtggaattcttcagccaaatgaggcaaattaatctttgtaagcacttcacttgattttcttccattgcttgtcttaccaacatttataagtgaataaaaatttgtggagtggatgcatttccaacattttgttactcttgttttcaaactttatgtcacaaatgaccatggaaattcaaatacatttacttttggcagaaaggagatgtcatgtgccattaaaaattctgtgatgttggtttccaaagctgtatagattgttgtgtaaaacacatttacaaaatagcaatgctatagctcaactacagtttttgattggtggattttcatactatatttcatttatcctcacaatatttggtggattatcggacttcatttttggtgaattgtacatcttaattaatctttatcctcacaacagttcagtccatgtagagtgtctgatttgcatttttctaatgataaaaaatgattacaaataaagtatctatatatatatataaaaaaaaaaaaaagaaaagaaaaaatagcagctgctgcaaggcaatctttataggtcagctgcattcactttctgttattttctctacaaattttgcatgtctaggcgatgcttctatgtctcttaccattaaagaaagcaatgttgacttggcttggtcaccatctctgctttttccctgcattgttgatattataacttattttagaatgaaaaactaatgtatactgctaatcacagcaacttgtcagtaaaatgttttttctattgtagaaaactcacaatttggtcactggaaagtatggtggaaaaaatgctttgcagaccaagtcttgtagtgttaggtttcaccacttcaatttgtgttgagaatagggctgagacaggccggtgatcagagaacttgctttcactgcggaaataggagagttgcttcacaccttttccataccatagaatcctgtcacacctgtggtcattaacatttctcacttaaaaatccatttgcagttgagagatatatttgtgtgcaaaaatattagagaaggggagtgagagagtgagatgatataccatgctggtgtcctttgcttctctcctgatctgcctggaagaccacccgagtaacgattacagtttgcttgagaatacttataggtaggagcgaattctatgtcgccctccttccaaccctgaaatactccatcatattccttttcccttcgaagttgatcaaactcttgcaatgctctccagtcttgcttctttattagttgcctggcaagattgtcttctaaatacagcctatagttgagatccccaaaccagaatatccgactgttcattacaaattaagagttcatctcactttgtgttagttcaaaaacaaaataaaataaataaattgtgattatataattccctctaaagtctaaaccccttattttctttctaccaggcttctttcacttcaaccatattgcaattccttctgctttgctaatgcagtagagaactcttaaaattgttagtagataattctgaaaagtgtttatatctcttttacattttgttgcattgaaatgtttgaaatgagtttaattctaaatctttattgttggactttttaattataaactgtaagaatcatgaacttgaagatactatttccttctccaattgagttatcattatttgtgactgtcaattgttgatataccgtatgggacatggtaagttttgagcaagcattaaatatgtagaaagtttcagtttactggaacacttactcatgtcctaagatggtaagaggatgaggattatcgtcgtctctagaggaactagggaaaacagttcgcttaaaaatctccgatacttggtgattcctccgtccttcatcgccttttttctcgccagaggctaaatgcgcagcaataaagcagaagctagttccatcaatggccatgctaactgaaaccgagcctttgtttcccaagtatcccatgataccacaagccacagagcaaactttaacattggaaatgcagtacttcctaagcaactcatccttcatccacacacttataaaaactccaaccatcttcttactagccattagtttgtacttgctcccaaccttcggcatctcacgcacagttctcgatcgctctctccatggaattggaatctcagtatgaccgctaaagcttgctctcctatctgcctcagaagctggtacataattgtagttgtcacttgagaatcgagttaccattggtgttaaccaagggcagccatgcttatcattgagagttttccctatgagccggttccaatttgttgcttctgttggatcttctgctccaatcacagttcgggtctttaaaggtacaatctcttgaaatctacaaagttggaatctctatgccgtcaaaaagatactttcttcatattaaaaaaaaataatttaaatcaaataagataaggaaaaagttaaatatattttgactttgtaatgacgtacccgagaacataaatgtcagccgcatcttttagattcagccactcatccaaatctacggccaaactccctatgggagacctcccagccacgttccatgttcccacaaaaattctaattaaaattatataaaaagtattatggaaaaaataataattcaattcaatttgtctaagttcgaattctaacctcaactcattagtatttgaagtgcatggatccgactccatcgacccaacgagcatctcatcgaggtattcatcactttcatcttcattcccatctgaagtaaataaatgactttagaattggaaattaattatatataaaagaacaatataacaaaccaaacctgaaagttcacttgtttgatacagatcaacagctctcttggacttcctcttgaaccacttgggcatcctactgtttcttaatttatggctatagctggcttgagagagcgatccggtccattccactgtgtcacaaaatgatggaattcatgtatacgattattataggtatgtggttcgagtttccttgtaagcttagcttagacgaaagctggtgcgtggtgagaacatcctttttgttatgatattggcttttagtttagtttctctcaaaatacaaatagaataataagctgtaaatggtctttgtatccatcgccatttatctatctataaagaagaaaagagagaaaaggacattgagttcagaaagtaattatttcttacaacgacaattccaagagagagttgtgtaagtcaaggtggatataggagaagtttcctcaaccctctcggctcttacatttcgtgaaagagagaccataatgaaatattagcctcatattctcctatcatttgttactcgttacttgtttttttcctagttctatctactactcacttaagtctcgtggtattttgggtgacatgtcaatatatatatgccaagtcaacagatcagatttaacaatccaaaaatctaaggatacccaattacatattggtgggttgtcctttcagcctcactacctagaggctagagagttatccatgcacatgtgtacattaatatattgtacgacaaattgtttcacatgtatttaaccattagatatatgcagtactacaaaagttaatgaagctatattatcaatagcagattcaccaaaatcgaaaataaattactgtttcaaaggatttatccaatccaactacagaaaaaccattttagtagatataaactatgaccttcgtttatttatttatttatttatttgcatgtaggttctatcttaaaaaagattaattactgaaatgtacaaaaaggtgtaatggttataatcaaggtaatttgttagagtgatttgtattttctaataccatttattttatttttcaaagcaaaggccaaaatcattaataacaaaataatgtccatgctaaaagggtatacatctcaaacaataaaatagaaatcaaaaaacaaattattcttttgtctgcatgcacagttaattcatgtaaagttactttagtcgtctgatgtacatgaatagagacactcttgaaaatttagataacaaataagacaattgctaaggggatagaatcaacaacatgtacaacaaatttcaaagaaaaaagaattttatccaatgtcactaaaaaaaataaaaaattgatgctattgctctacttcctctaaatgttctaaataaaaataaaatattttgaaccacataaaataccaaaaaaaaaaaatagcaactaataaaaataattaaaaactatttccaatgaaactaaaaaaaacccaattatatctttggggtgacattcttggttgtggttaataagttaaaaataattactaactaaccgttcattttgtggtcttttattattactattaattttctttttccttctgatgttactttctgatatgaccatgtcactatcattacaggtatagccacaccacaaccataataatgcatatatattcataccagtaatgaggactttaaacaaaaaaacttgtggtgtagaatttgggagaaggattattttcggacattcttatagtacggtaaggaccatagcacccccataaaaaaaataaagactaaaatgcactatctctaattaatacactctcagtgctctaaataactgtgttttttttttttgcatttttggtcattgctgaatcaataagcgattttgtattatttgttgtaattgttgccgtatcttttttgcctgacaagtcaggtagttctgcattgtagtataggcaaacagaatttcattatagatggaaaataattagaattgatagaacaaattaaaactactttttatgtttgattgatgcccctggaccaataacacttgactctcatttaattctttgagctttgatgggtttggacattctctacaaacactacaataattggatgctacctattgcaggtgttagtagttatctttctatttcaatcctattaataatgagagatgtttaatacttcacgtgattttacttggaccatttttacataaattgcccattcttttttgttttgttttgctttgttattattaggatattgcaacttaactttttacatgtagttttactaattatagttaattatttatggaagaaaatggatatagtaaaactgattgagtagattttcttgccatgtatttctctaccatcaagtcctcaatggaatcagcttttggttttgagctcaaaaataattgttatcacgattgaggggtcattctcaagctagaggccccacatagactaatcggatctacattaagggagtattctcctaataagctctttagtttaagcaaaatttatgttggagacatgaggcgacttctaatcagagtctactaagattaggcccgtatttagggctctcaccttacggtccccaaatcggctttttttttccgataaccatcgctaataaagttatgtgactgttttaaatcatcgacaatagtggagtattaccaacattttaaacaatcatttactatttccgatggtttaaaacagttacaagtttaaaataaaaattggtttttaaaggttgagcttgaatcggcaattagatcgagttaggcgtctaataccatataaaagaagaacgatggctcaaagtgaacaaattggtgtttgtatattactgaaggttgaactcgaatcggccatggagaacaattagactgagttaggcgtctgtatgtaaggaagaacgagagttcaaagtgaacaaatcagcgtttgtatattgattcttgaattgaattacaatgatctatgagttagctttatataca

SEQ ID NO: 15070 - DNA, 13647 bp, Cannabis sativa
  modified_base (7033)..(7034): a, c, t, g, unknown or other
  modified_base (7684)..(7689): a, c, t, g, unknown or other
atatatatcaaaacttatctttattttcccatatttttgtaaatagcccttatttttatttgttgattttatttaagttgggtccggagttgggcccgggtccaagattgggaccgggggcaggtccaagtcttgattcggtttccgagatctaagtttgagtcaaattaatccaaaatattgataaaaatctgtttaaaaaaattttgaaagcaatttttttaaaaaacatttagattcttaattaaaaaattgaaaagtaaaacaaatttatagaatatgattttaaaaaatatttttatttttctaattttaaaaataaaaaactaattaaaaatatattaccaaacacaccctaaattattcacaacttttaaaaaatttacatgtggtattaaataaaataatatacgtgatcataaaaaaaattaaattattattttttttctaaatgccgaaacactgcttcacgtgatgtaaatttccgaaaacacatataaatataaatgcaacataaattgttgcatagtgtagagccaggaccgaccctaggcataggcgggctaggcccgcgcctagggcccactcattgtaggggcctaaataaaaaaattaccttttaaaaaatatacatatttttttaatatttgttaaaaataccatctatatttataataagggtctaaattttttttttttacctaaggcccatttcaactcagggccggcctagtgtagagcactaagtgtggtagtagtcccttgatgaagtattctttgaataaatctcatatgtttttgaacatattccattcaaactcaaaccctactaaatgtcatttcaaacattactacatttaatacactttaggaatagtttagttttggaatggtattttttttaaaaaaataatttaaagaattagattagatcgaatattttaaattattatttgttttaatcttgctacattaattttgacacatcaaatctttctttctttcttttctttacttcttttagaaaagacctctcaaatcttttcaaatattgtgtttttagttttttaatatagcatattatatagtgcttaacattgtccgttatagtgcgttgcaattagttaacgatttcttatactaattattaaattaaattatgtaaaatccgttttaattagcactaataatgacatgtcgctcttagcattttttttaaaaaataaaataataatttaatggaagtatttttttttttttttaaaaaatatggtttccttaactatccaccatttggcactaattttcactaaatagagaatttaaataataataaaaaaagaagctgaaattacaattcagagttttttttctctgcaaacaattcacagttcttattacaacttgtctgactactgttagaggctcaattcacagttctactcatgttatgtataataatttatggattaacaaacttataatgagacaagatttttaaccaatcatttttactgctctttggtagagtcagaactcaaaatgaactgttctttttacaggttacagaagctctgagaaaagaaggcctagaatcatcaaatctcattcttggaattgattttaccaaaagcaatgaatggacaggttggttactcaaataaatgaccacttattctctcatggtattctatcgatcaataaaaaccctatacaaacaacataaacaatttaaagacaaggtaaaacaatcaccaatccaaaccacttggtttggtcatttggtcaagtttggtttccttgatttgataagggaatatgggcaagaaaatcacatgtagagggatgtgatactcaactgtacaaagttattcactttacccattaaatatttgtggtatccactatattcccacttaaaaaatacaccaaacaaagaaatcactttaaatgcccctacatcctaacacttatccccataacaaaaacaccccctttagtctttcagcttttcaaaataaagataccctacaaagtacaaagacaaagaaaaattcaaaggaaaataagatgaattctacaatctatcctgaatattaggtggtgtttggttggaacgaataaaaatataaaaatatgaatgagaatgagaataagaatagaatggaataaattttagaatgcataaaaaaaattgataaaaaaattaataaattttttctcttgttacattagaatggtcattccatcaaaatagtaaaaagagcattccattagaatgtcattccactttaaagtacaaccaaacaaagaaatgaaacaaaaattatttcctttccattcaattccatttcattacctctaaccaaacgccacctaagtttcaaaaaaattaactaaactagataacataacaagaggtttaatttggagagaacatgcttataatattatagctaatgattatagtaagctagaaatgagtaaaatataattattcttctccttagtttccacttgatatatatgctttgagaatgtacatgagattttggtcaaggactagattgagttaagatgttcttccaataattcctaaatctaatccaacaatggtgttattgaagggaaagtttcgtttaagaaccaaagcctgcacgcaattagtcatacaccaaatccatatgaaaaggccatcaccatcattggaaaaactctggctccctttgatgaagacaatttaattccttgtttcggtttcggtgatggtaaactcttctatatctgttttatactagcatattcttatttctttcaaatctaacaactgatactaaacatttatattttcactaaatagcaactactcatgatgaagaagtgtttagcttccacagtgaccattcaccttgccatggtttcgaagaagtcttgtcctgctacagaaaaatagttcccaacttacgactttcgggttagttcaattcttcttttagaaatgagattcaaattgaactgaatgttagaatctattcacatattcataaaaaatatattgtgtttaagggccaacttcttatggtccggttgtggatgcggctgtagacattgtggagaaaagtggtggccaataccatgtattggttatcattgcagatggccaggtttgaacctataactctctctctctcaatgttttgttttcttacatgtatgatcttgctaagaattgatgtgtttggttgctaaggttacaagaagtatggacaccagtgacagtgaattgagtccacaggagaaggaaacaataagatctattgttgatgcaaggtgggtgattgaaactttgtactgatattgaagttcatctcttcatgtttcgaaaattgaactcatgagttcctagttttgaagctgagaaaaatgaaaaggaaaactaaactcttaaacttgtttgaataaccagttcacatccactgtcaattatccttgttggagttggagatggaccttgggatgacatgaggaaattcgatgacaaactcccagctcgcgaattcgataactttcaggtatgtcattacagttacaaagtttaaacttcaactgattaactacaaattttctaataacatgtgtgtttttgtatgtaagtttgttaatttcaccgatatcatgtctaaaaataaaagtcttgaggagaaagaaacagcatttgctctagcagccctcatggaagtccctttccaatataaagcagcgtttgagtttggtatacttgggtacgaagtgctgaattctgtctttcacaaacaccatttggttaaatgtttttctgcatacatattgattagtgtatctttctattcgataaagacgagtgacaggaaaggcgaaaaaggttactccacgccctccaccggttccttattcgcgtccttcactgccaagagaaccaagctccttaccgtcagactcgggagatgaacgaaatcagatggtatgtactctaatcttgaacaagaatttgtagtttgttggatttgtgaatgagaaccggctttatttttgaatgcaggcatgccccatttgcttgactaatgggaaagatttggcatttgactgtggacacatggtaagttttagcaaatattaatgtcttcttctttctaactcaaaactacaaccaaaacaaaagaaaaaaactttgtaaatatcattttgctagcatgattttcactacactttcttgcagacctgtagagactgtggctcaagagtggctcaatgtcctatctgccgcaaaccgataaaccatcgactcagggtgtatactggatagccagtggatgtaagttgtaaatttcagaccccagttgacagtttggatttgttttatgactaatatttgtgtgacagtatgtttgtatgtacattcctagacttgtgtaacacacatcatatatacatgtatgtatgtatatgtatgtataaatttgttgtactgtatctattgttactatttctagtgttattaagtatttgttaactattgttccaaatccataccttgtcctgttataactattgttcacattcaagggccgtaactgttataaagattactctatatcaacttgctacatagaagtttcaaaaagctcgaaaatgtttgaaaaaaaaaatcaaagacaaataaatgcagagaattgcaagcttaataaatggactaaggtcactgccagtgagagaagtgcaacattaaaactagtatggaaaggtggtggccttttatgggaaggaaaatgaatcaatagaagctccacttatctttgcgacctcatcatttcaattctaaacacgaaagctagcctagccccgatgattaagcgaagactaaggaatgcgccaagctcaatactttttgttgaggctcaggaatcatacattccttgtgttaaaaggagataatttcatctttttaacatgattatggttaacatgagctctagcatttggccttccaagtatgtggattgggtggtttggacaaaagaaaatcgcagcaaaagcctcttcactgaggtgatctttgtatttttgagcaaaatgctgtaatgatctctcatgtggataggttgattaaaatttaaatgtgttttaaaggctagagttttgtgtttcaaaaggggaactcttactagtagggacatagctcattaacaatttgtagtgagggtctgtgtgctctcttgttggttgaattgtgtttggttgtaaagtgctaatttgattattgaaattcattttcttaaaaaaaaacatgattatggttgtataaaccatgtcaaaatagaggccttttgctacttcccatttcttttaccgtagcatagaacattcatgtcctttttttttttcaaaagataattacattaaaaacttagcaatcctcatcaacttgatgagcaatacattgtgcattttcatcaaaagatacaacattcatgtcatatgccttctaatttcacaattttgcattgatttattaatttcttgtcagtttagaattggattgattcactctcttatcgactcatttgatgagaaatttgctcaatttcgtttaaaatagctcagtgtcaagatttttttttataattctttccaagaattttatcttataggttagttgatatgcagcagaaacatcataatacttacaatgcaaagggactccccaaactagatttaacaaacccgtttcctatgcacatgcaaaatctgaaaaatcaagggggactctaaacatggacacaaatcctgcttactctgcttaaccagtgttatcttgaccgatgccttccattaaaacttaacaaagaatttagaattaatactaatttctctagacatagaatgattttctaaaacatttacagatagctcaaaagtcatcaactagatttcctaaaccttgaaatgtaaaatgattcaaataactatcaacacaagatgaataacacaaaatagttttggggaacaaacaagataaggaaattcatatccaatacagaaaaatgaatacaacctacaaaatagttgcataagtccaaaaccaacatttgtatacagtacttgtcctgactcagcttatggtgactaaacataaaacttcatacccaacatagaaaaacaaacgaagcccacaaaatagttggaaaatacttggcttgatgatcatagtcaaaacaacaatagccaaagtacatatagtattcacaccaatattgaaatatattataacatccaaatggcagtggtttgtggtctgtaaactgtctacgttctcacaataaagtgatgagtgtcatacttacttcttaggcagttgcttagtttccaccttgttggtttgggtgttggtgttggtgttgttatcaatgtctttgggaattggctggattctcacatatggttttctagtgagtgtctctcctctcagagcagcaacataacgatcatttgtatcctctttcctttccaactccccaagaaactccgcaagcctttctcgattcgtctgtcccatcatctggggtttcacaatttcatcaaacactttacatgtcaagtcaaattttccaattcatgatagatttcaaacccccaaaaaaaatgtataaaaaacgaaatggtttaaaatttcaattcatgatcaattgaaccgaatttctgtcaccgaaatttttggcaaccaaacagagaaagaagatattaataactctaaggatgatgaagatgaaacttacgagggtatcgggacgagctttgcgacggagttgggcctcgagctgctcattgcgagagttggtggcctgcatgacggcgtagcctatgatacccggaataacaccgcatacggtggcaaaagccaagaagaatggctttgagtccctgctcttcctcaccatccatctccatgtctcgctcttctcccacagtatcgacattctctctctctctctctctnnctctctctctctctctctacacacttctttcacctgtaatgtgaaaatgaacagccaggtctatactgggcccttggatttgagtccatctcatgagttttcggcccacttaattctaggttggcccattcgataaggaaaagtcgacccgactccccgacttttcataaatatacatctttttaattttttaaagagaattacacacatttttcaactgcttttttcttcaatttcagtaacttattatttatttatttttttaaaaaaatactttttgaaattacaattttcttacaaaaattctaaataaacaaaacaatgtgaaaaaaagacaactataaggtaatgaaaatagtagcaagacattttttcaattgtaaattaactgtgacgtttggttggaggtaataatgaaatggaatggaatgaaaatgaaacaatttttattccattcctttgtttggttgtattataaactattggaataccattccgatggaatgacatttccatcattttagtagaatgactattctatttgaaatagaaggagagactattctatttgaaatggaaggagagaccattccaatgcaagatttgaaaaaatttaataattttatttatcaattttttttatgcatttnnnnnnttattccattccattcctattccaatttacattctcattcctgttaagggtgataaagttagttaaggtggttacaacagttagttacaactatctatgtttagttagactaattcccttatttctctactgcatataaatagctgcttgtatctcagtactctgtaatcaattcaatacaatacacaattctgtttcaacatttctctctcgttctctctctctctctattgattagtcttgacatggtatcagagccttgatcgttcttttttttttctttaatggattcagctaccagcggcaatggtggcaatggaggagcatcaagatcgaacgctactcttcttcctcgttcacaacccgtatcgttcaatcactcactgtctatcaagctcgatgagcacaactacttaccctggaaacaccaggttcttgcttcaattaaaggaagtcgtttacaaatgttcctggataatactcgaatccctcccaagtttcttaatgctactgatgaagccaacaagaacatcaacccagcctttgaagattgggaacaacaagacaacttactggtttcctggcttctttcttcgatgtcggagaaaacaacaaatcggatgatagggtgagaaacaacagctcaaatatgggaaactctgaatgaatactacacagctctaaactcagcaaacatagggctatacaagactcagctcagaaacacaaaaatgacaggttctctcaatgactatctgttaaagatcaaagggataattgatcttcttgctacaattggacacaaacaatcggctcaagatcacattgaagccatcttcaatggacttccaccagaatatgatgtctttgtcacttctgttactacaagaaaagactcctactctgttgcagaaatggaggctttattaatggcacaatcggtgagaattgaaaagaatgccaaatctcttgacatcagtaaaagtgaggctaatttagctcacacaaggccattttatggaaataacaatggcagaccttatttccccaattcacacacatctggtggatccaatcgtggtcatccttttcgatctactgagaatccaactcagatgcaacattcgtctcgaggtgttcctaactcaagccgtggtccaaatccttacaacagtggcagaggctatggttcaacaggtcgaggagcctctcaatcttggacacaaaaacctcaatgtcagctatgccacaaacttgggcacacagtcaagcaatgtttctatagattcgacaaatcttttactggtcccgagtgcttcaatcagttcaatgcctcagccaatgttgcagaaatgcaagcttgtatagccacaccagaaattgttcaaaataacagttggtacccggattcaggtgctacgcatcacctcacaccagatggcaccaatattgcctcctgcagcagctattctggccaagaacaagtctttgtaggtaatggtactggtctcgacattgaaaacattggtaattcctctctaatctctcccttctcttccaaaactttgtctctaaccaatcttcttcatgttccttctatcactaaaaatttacttagtgtatctaaattttctagtgataattctgtgttctttgagtttcatccttctatttgctatgtcaaataacaggacaccaagaagactctattggttgggaagcttgagaatggcctctacaagttttcatccacacaacttactcacctacaacaaccatcttttcctacactgtccagtaattcctactgttttacacataatgtctctactactgattccactttttcattatggcatagtaggcttggccatcctactgccaagattgtaaaacaggccttacaatcatgtaatatccatgtcaataataaaactgatatcgatttttgctcagcttgttgtcttggtaaacatcacaaattaccttttctattttccactacaatttatcatacacccctacaactcattcattcggatttatgggggcctgctcccataaactcattaaatggatatcggtattacattagttttgttgatgcttactctcgatacacttggatatacatgttaaggaccaaagatgaggctttacccacattcactaagttcaaaacccaaattgaacttcagcttggccataaaataaagactcttcaatctgattggggggtgaatttagggccttcaccaacctattagaacaatgtggggttattcataggcttgcctgtccacatactcatgaacaaaatgggattgtggaaagaaaacataggcatgttgtggaaactggcctaactctattagctcaagcatctctacccctatccttttgggatgaagctttcagaactaccacttttttagtaaacagaatgcccactgccactatacaaaacatctctcctttacaaaaactctttaactctccacctgactacactatattaaaagtctttgggtgcctatgttatccaaaccttaggccatacaacaaaaataaactcaattaccgatccacaccttgtgtattccttggttatagcatgtcacacaaaggctacaagtgcatgtcaaaagacaaaagagtttacatctcaagagatgttatttttaatgaaaattgttttccatacactgaatctcaaaagcataccaccacaccaactatacctgtcccaaccagtggcctaccccctgtgtcatcttcccttcaacccactacatcaccatcatcaactagtggagactcaccatctccattcgctcaccctgctgctgtctttgacagcaggcctgctgctactactcctatcggccatttggttgatgttcctattctcaccaccacaaatttaccacctttagacacggttaccaatgttcatgtcactattgcaccagttcctactaatattgctactgcaggtactcaaaatcctacacaaccagcaactactgcatcaacacatcctatggtcacacgactcaaggcagggattcgaaagcctaaggctctattagctcactgtgaaccaagatcagtcaaggctgctctccaaatgccacaatggaatggagccatgactcgtgagttcaaagccctcatccgaaacaacacatggatcttggtcagattaccacctaacagaaaaccgatcggatgcaagtggattctaagaatcaagcacaatgctgatggttcccttgataaatttaaagcaagattagtggccaaagggtttcatcaacaagcgggatttgattttgaggagactttcagccctgttgtcaagccaattaccataagagttgtccttactattgctataacaaagggctggtccattagacaactcgatgtgaacaatgccttcttgaatggagatcttcaagaagaaatctacatgcaacaaccaccggggtttgtaagccaagagcatcttgattatgtgtgcaaacttaacaaagcaatctatggtctcaaacaagctcctagagcttggtttgagaaattatctacagctcttatctccatggggtttcattcttctcaagctgacaactcactattcatccaagccaacaacatgacatgcatctacatcttgatttatgtagatgacattctcataatggggaacaacaatgaagctgtaaacaaggtcattactggtttgagcacaacatttgccctcaaagacttgggtatcctcaactacttcctaggaatttaagtcaccaaaactgatcacgggctgctcctcactcaaacaaaatacttacaagatctcctctccaaagcagatatgcaaaatgttaatactcaaaacaccccgatgaacagtggcttgaaattatctaactacgccagtgaacctatggaggatgtaaccctctatcgatccattgttggcgctttacaatacgcaacaattaccagacctgagttaaccttctcagtcaacaaagtttgccagtttatgcatgctccacttcaacaacattggatggccgtgaaacgcatccttcgatacttagctggaactctcgattatgggctacatttaaaagctgccactgatttctccattgaagccttctgtgatgcagattgggcagcggatcttgatgatcgaagatctaccacaggctattgcatattcttgggaggcaacctggttgcttggaaatcacaaaaacaaccaaccatatcaagatcatcaaccgaagctgagtttaagagtctagctagtactgtaagtgagatctcatggattcaatctcttctcacagacctcagaattcaacaaacatccattccatctgtgtggtgtgacaatcagagtactgtgcttcttgctgccaacccggttctacacgcacgaaccaaacacattgaaatcgatctctactttgttcgagacaaagttctgcaacaccaacttcaagtcaaacatgttcctgcagtggctcaactagcagactgtctaactaagcctgtttcaagctccaaatttccagattttcaaatcaatgttgtttctcaacacacattgagtttgaggggggctgttaagggtgataaagttagttaaggtggttacaacagttagttacaactatctgtgtttagttagactaattcccttatttctctactgcatataaatagctgcttgtatctcagtactctgtaatcaattcaatacaatacacaattctgtttcaacatttctctctcgttctctctctctattgattagtcttgacaattcctattccaatattttcattccttccaactaaacgccacctaaatgtcaacacatttgaaagacactataaaacaataacacgatatattaaaaaacttatcacaaaaataaattaaaaatatatatcagaataattggacaatcccaaaattaactaaaataatgaccaaaaattaactgaaaaataaccaaaaatcaatctgatattaattaattgtaaattggtaatacgattcaaaaaaaaggcaattacaagtacacacaaatacattactccaactctttgcattaaccaaaaatatactcaataataataaagcataaatttggatataatggagtatcgattgattgagtctggaaatagattggatagtaggacgagtaatctaattcaattcttagttacggaaagagaaaaaatactctgtcatctcttatactaccattgatcgatagagtggaacaactggaaaaataagtgaaattagagccgtatatgataggtggtaactatcttgtaacgaccgttaggatatgcagaagatttcacattcccatgctcatttgcgatcatgttattaactcaaaattattactgttacagattttatatatcaatggaagataaatcaagataaattacaatttaattgtaaaaataatacaaagactaaaataagagattgattacaaaaatattacaacacatatacaatacatatatactatatatatatattatatataaaaaaagtagaagagatgaaatacaacacgcatgtaatataatgaagaagaagatatgtatataaatatatatatacccactcataactttgagtttaaattagtaagaattataatgacttaagtattatacttttgtccaaaacttccaaaagcttatttatcccatatctctaagcactaagggaactctcatgaaaataactttagaaattatcaaaccttttagggtttctaacaaaatactttgttgataaaaattagtcactcaaatgaacacattagactcatttctatagtattttaggtgatcatcacacttaggattcacacacaataccttatttctctcatataaatga

SEQ ID NO: 15071 - DNA, 2791 bp, Cannabis sativa
cctgatgattcgagctacctttctcgagtcactattgcaatattttcaaccaaacacacaaactacaagaagaataatgttaaatacttacaaatccccagccagccttggtgaattcttgaccaacaatgctataatcgcaatgtgttgagagaaagacctcgacgtatgcgcgctcatcgacaacagctgcaacgccaccttttttaccaggaccgtcgtgcaacgctttagcataatcatcttgggagttcagagaaataagtcttgatggtttaatgttgtactcctcaatcaaataattcttagcgaatgaaccttgttggtacccgatcggatcatcgcctgaaattaaggattcaatgcctttaatgggagaagcaagttgttgcactgtgagtattgaggtcaaactcgctgtgtagctcgaatttatgatcaaaacaacaaacaaccatataattagcacaaggcgcccgagcgtgctcactgtattttcccctacaaaaccgaaaaatatgcaacattgttaagcaaaagtaaaatttagctgaatcctcttaagcttataagaaaagtgtcgattttcgcttactatgtgaaaagaacaatgttgaaaagctgaacctgcagaatgatatgaacaaaacagtaatcaatcaattgctacacattatctttttcgattcgacacaaacatcttaaagggagaatatcttaccaaagaatagtcacaagttgtttcctaggagggcctcgaaaatcatcgttgagtctgtgttccaaaatccaaacaactgcaccaataatgagaaagaacaaagcagtaatgaaccacatttctttagtaaacggctttaaaaacgcccacgcattagaattcatcttcctcacgggcgctaccactactaatcctgactcaatatagggttgtgtgaagtcagccattcttgttctattagtgattattgcaatgtcacctatggctgcatcatacacccctgctgtgatcattcgcacaagttcagttggatttggattcgtaacaccatccccgaaaggctgcagtttataggggacagcatatgggagcaaattgagtgcagcagtaaagacatcaatgcagtatccagtgaacatgtctgtgcctcttattggagactcaaattcgcgatagctcactctattcgggacaccaattctcaaatggcgtccgttgtttggaaaaacccaacctctaggccgttgtgaagtttgaccgggccaaattgcatcatggagattttgatttgcaattgaacgatttggtggcttcaagtatgtaatttccggtgaaacaactgataatccagagtaattagtccaataaccgatcttccttgtcccggtgccaaccacattgagaatatcatatgcagggttgatgagattcctctttgaatcaaatgcataagggccagtcaagcctgtcatgtttactttcaatatattctcaagtaacttgtctccttcatcgaagatactcatcgaatcaagattcaactccccactttcgagcttctgcaaccttgaatcatttgaaaatgaaatcttccctccttgtttgaaaaaactatcaagtccccgagcgagcaaccaaacagagtcataggcatacaaaccataagtgttcaactcaacgcgattctcgggtggaattttacttgtcaactcactccacctagaataaaagttctttttttgcttcgaatctggtgtatgtatacgcaatgcaagagcaccgtccatgctattcctttgcctttcggttaaacccaaagttggattggattccaatatattggcaagccaagtagtagcaatccaaacataaccggttcccatcatacctagagccttagctgtttcgaaaaccttcaaaccatagctagaataaacatgaagcacaattatacgagactcggttaaagccactttaaccaacaaatctgttatgtcatccttggttggaaaattcttaagaggagctttgtaagagatcttacaacgcttctctgcgagttgatcacctaatgcagtaatcccatttctcccatgttcatcatcaacatagatagcaatcacttccctccattcatagaactcaaccatatcagctatggcagccatctgaaacagatcattctgtgtagctctaacgaaaaacgggaactgaagtggcgaaagtgtagggtctgcaaccgaaaatgacaacaaaggagtttgaagctcatttgcaatatgggatatcacatgagctatttcagctccttgaggaccaattatagcaactgtgtcttgctccataaattttaaggctgagaaacaaaattcacaatccaaaattgtttcaacatattaaaagactataacaatatagagtaatttgcgcaaattacttaactttaactcccggttacagataaacacttaagtttaatttttaacggtaataatacgtaagtaatatttctgagacttccttagatacctgatagttatgtgttgtgtcaagttaatatccacgagttatttttttattggtatattaaatttaaaaacccgaacaatcagggactgtcatatgtccattgacttgacatttaatggtgaggtacatacgaaaatttcagaaatataacttaagcattattaccgtcaaaaattaaacttagatatttatcgagaattaaactttactatttatactataaattactcaactaagaagagaacaagcaagaggaaacaa

SEQ ID NO: 15072 - DNA, 3719 bp, Cannabis sativa
  modified_base (1234)..(1236): a, c, t, g, unknown or other
gtttgggtaattaaataaatattaggtgtgattgaaatttataaaatatatatatatatataaattattgtatttttaaaatatattctaattaactatgtaattactatactaccctagtaattatatagtaatttacaaacaaactttaaaatgtattggaaaaataacagtggaattaaatttggatataatgaattacacaatttgagacatttttatcatcatgcaattatacactttctcattcacatagcaccggaaaaattgagtgagtgaatacaaaatacattgtatagttatctctaattactccataattttccaaaaccccgtcaataaaatttgatataaatggagatacaccgtctagttgtttgtttctgaacaattctagctattcactaaccgcaattcttgatacacatcccttactcttctcttgacttggtgaagaagtggtttcctccccatctcaactgcatcaaattgggctgcaatgctcttgtgtggatggaagatatgtgtttagcgattgttaatcgtaaccaccttggtgaggtggttaggtaatgactaagagcttatatttcgctaaccccctttgtagcaaggtcgtagcttgttgtaattatgaaaagggactctactgtggttatcaatactcttaatagtgtttgtgttatataagagattgataactatgttaactatcgtaagacttttctcatattttattaattgtattttttttaagattgtaaaaacttataattttttgatccataatattgtaaagtgagcgtttacccacaaaaaaattggttaggagatatatcttctttaccgaaaaatattttatgtaatagctaaaaagtctaatttagttttatcaatacttttttttccttaaaaaaactgcaagtcttagaaacatgtcgaatttgagtttgaaataaatattaagataatgtcatttgaatatgttatagggaaattctataatgttcttcttaaaagggatatatcgatacatctctatttgttttagtatccaaaattattttttactcaaattttttctcataattatgtaaattattgttatttaagacatcctataaaactttaagaaattcgaaaaaaaaatttaacacactgaaaatggtgttcaaacagtgtattgcacacatgattattttattttggataaatagcggcataagtacccaannntttaagtttgtaagtggcataatctcaatgtttatttttagcgacataagtatccaatatttgtaaaactataattttttttctaatttcgtccgtacaaacccggttatttttttaaacaggccacatataaaatctagattcttgatcattgagtctagataaaaatatgcagtatcagttacttccaaaaatttcgttaataaatttaaaacggagtctgtactgacaaaactgaaaaaaaaaattacatttttacaaacattaagtacttatactactaaaaataaatattaagtttatattgcttacaaatttaaaactttaagtacttataacgctatttacccttttattttatagttgtgtaaaatagaatattcgaatattgttttttttattataaattattctgaatttttcaaaattttgtaaaatatcttaaataattataaattatgttatgctaaaacaagtacatggtacatcctttaaaagggatatagtgtaaaaccacctaccttatgttatatactacgaattataaataaaacataacatatgatctggagttgttatatatatacaatacaatggttgacccaatgactttacaatttgaccaaaagcattatggaaattgctatgaccttaaacaaaacaaaatgtggttaccttttaacttaccacaaaaaaaaaaaaagagtaagttttgtaacattttcaggcttttacttgagaaatcttaatgggtttgagcatgcttttaccacgcaaagaggaactgttttcagagtcttgtctttgcgacctcaactttctcaaggcttcatgacatggatcaaaaaattcatgtttaagagcttcttctgcagttattctgagtctagggttaactgtcaagcatttgtccaccaaatcataaagtgattttggaatttccttcaagaaacttggtctctttgaactcatttcacaccaatcctcaagctttacggatggcaacgactccaatttatacaagtcctgaaacaaaaaccactcaatttcaatctgctaagttactaaaataagtaattaaaatgatgatgacagtgaatagggaatatacctctggaaatgaagattcacggttatgtagcttggcgacttcccatatttcttcactgcctcttaactttgctatgtccttcatgtttctgaccaagatagtgatatgataaataagtacaattagattaaaaaaaatatatacagtttatagaaacgatttggataaaaagctagtatacacatactgttccggatctccaaaaaatggtgttcttccaaccatgaggtagagtaaggtgaccccagctgaccatatatcgatcttagggcattgatagggagatctcaataaaacctgcaagaaacagaacccttgaaatgagacattataactgtttctaaccccaacatgaaatttgagttgaatgagaattatcttggggcaacaagatataaaattcagttcttgaaaatcttgacccatcatttcactataataaagaagtcacttgagagaagctctaagagatggtattccatttctaaagtggtttatgttatcttcataggtttgcttctaagatatataaagattgaaagatttttttctttttacctcgggagcccggaagcctttggttccaacacaatgaccttctttcttgaatttccgattccctaaagttgaaaaggtaaaaaactgattcaagtaagctttcttactgggggaatccatattgtcaaaaattacagtagaagacatacctctgttcatcaattgagaactcccagcaccaggtcctgttgaaaccaggggcattggagtaagataaacaagtgttttatccacattttgaggagaagcagcgattctttttctcatgggagataatacagctgatgactcatgatttagattttgccttgcttcctgagccaggttgatgagctccttcctaccttggcatggcaaaggttccctcaatctgtcagctgaagtaatgccagagccatctgcaccttgacttttgctaacattccagccacccaaatcattattacgagttttagaaatcaaagcctttttctaatgttcttcatatctaaagttgacttgtaatcatttgttgtcttgaggcgagctgtttctgaagatttagtatttggtaacttcctatctttggtttgagtagaacttgtgctaggaagtttgacttgatcagtgcgagcactacatcctacccttgatttgcctgtgaaacacataattcatcgtcttttttggttagtggatcacattttcatgcaataacatgaccgagaaaatgaagagatagattaagaataggtatcaagattacactaatgctaatttcatttagatctcagagatgaagactcaccaatgtttccatatttctgatgtaagt

SEQ ID NO: 15073 - DNA, 14754 bp, Cannabis sativa
ttatttatataaagattattattcttgattttcaaaaataaataaattattattattggtatgaataattgtactttctaattggtaaaagacctctaacctgtagttgctcgccgcggtgaggccctattttccctaggattttttaattttttatttttgccataacttttgatttgggactccgttttggacgtttttgatattgttggaaagctcattttgggctccatatgttaatatgtaaatgaaatgcaaattatatgtttatgtgaaagtgatgtcggtattatccctatttgtgaaatcccaggaatgtgtgactaggattactgacgcttgcttaagaacacccaaggatttgaaatcttcatatacttggattaccaagtaagacagtagactagcacgtagaattaagtattgtggtactcatgtatgttattatacttatgttaagtgggaaatcaggattagggttattaccctaatgtaagcagttatgtcgtctagggttattactctagtatgtaaatgattttgaatgcaatactatactatgtatgttgagataaagaattatgcgggtaaggcctaattgggttagacttagtaattagaatcaagacaaaccaatctaaggccttattgtaaataaacgagtgagtgcaacacataggtctatgttaaatggacaataaatgtagtggcatcgatatttattcgaattgtgattatattgcatattgttaatattactgtcctgctaggcttggctcacgggtgctttactgtgtaggaaagggtaaatttgttattgatcagccatgagtttgagggcttgacggtgtattatacatgttcggaccatactagaccacgtgggttgggtctaccagaagaaatattttgtcttccagtttttgctgctttggttggcgtgtaaatataacttgtaatattttgaaaaagtttttacgagatcccggaacaaatgtaatcttttggaatgtttgtaatgttaattaattacaagttatagttttattctgtatttgtttaaaagtttaaaattttcgctcttagctttagtaatcttgatttagcgagattagcatatgtttagtcactgttcgtggcattcctattattagggcattatagtagttcatgacccattgcctaagttgacatcctgcgcttaggttgacatcccaacgaccagattgacatatgacatctgtaaaaacatccaaggaatgtaatttaagattcttaagtgatatttaaatatcacttagtctgtttctgtgttatggaaaagcaggtcatcaattctcaaagatgttgttttgtgaaaatgagagactcaaaactcttcatctccgagtgagtgtcccatgttaaaaatgagaaatgcaaagttgtgaatttaacttctctgacttcatggatcttagttattgtgaaaaactagatagacagtcaaaatggaatcagaaccggataagtataactcaacctgggcattgggtactcattcgtaagcacttgggttctcgttttgatacttccatggttcttgaacttgaggacaagtttcttacattgtttttaccattctaggttcattggttgaattagatttgtcatttgagtaatcgaaagcagcgcactaggttcattgtcaacttgggcgttgggcccaacaccaagtcaacttaggcgctaggccttgttgggctcgagtttgtagttttctccctgagtttgcttgaatcttcattattttttatgaaagaaaaagatgctcgaaacactttttcgtgaacttgtttggaaacaacccaggttaacaatatgtcaacctgggcgctgggcccagtgacaggtatcaactaagggtgttgggcccagtgctaagtgtcaacctgggtgctgggtcccagttatggcccttcggaagttccgtttggtccctggaaatagttgaaacataatcttttctgaaacggagaagattctcagaatagttctgggaaaaaatcatcagaattggcccaagttgacatccctaggtgtcaacctaggtgttgggcctagtttttggcacccaggaagtgttatttcttcattgaaaatgtctatttccctttttttgatgaagaagaagaagataaaaaagtctgatcattgatctaatacttggaaggtgcctgaattgataaattatcaacctgggcgctaggtgctcgggcactgggtgatcgggcaccgagtgcttcgggtgctacaaaatgagcttgctcttaatctgattctgatgtctcaaatatgtttgtggtatgtctagttgatgtcccaaaagctaaaaccctagttggaaatgtcaaccttggcactgggtgaaaccctaggtaagggtgttatagtttattttaaccaatagaaaagtacaaattctaactctgttgaaggcccttctgctactgttgaggggaatgaaatgcattggttgtcaccttgtgataatatggtaaaaattaatgttgacgccttagttttcagcaaagagaaagtgtttggaattggttggcttgttcgagatcataatgggactttgttaacggctactgctatagctcgtcaaggagttgtggatccttctttagccaaggccataggccttaaggaggttctcagttggctcaaagatcaagcttttgtgggtgtgattattgaatcagataaccaagttctagttaatgttgtttgtgaaaagaaatatatgtaatctttatttggctttttattgttgattgcattatacttttaaacagtttgagaaatgtgtcattaattttgttaaacggtttgtaaataaggctgcgaattattaattatttagctggagttgcttgtttatacccagattgtaattattgtgggaggtttgttcccactaatttgaaagctattcttatagttgatttacagtagaaatactcttatttttttaaacaaaaaaaaaaatactcttatttttttaaaaaaaaaaaaattaatagttatattaagcaaaatgatcatacatacaccaaaaaataaataaataaataaacaatgatctaaaattcttaataatacaatctcatctattacagagattaaagttagccaataatataacccaatatatatatatatatataatattaatatgcaaaagaaaactcctatgtctagaatttattatgattaaaattaagaacatcaactatttatatttattaaaaaatttattttatatatatgtgatgtataatagtgtaaattttatttttgataattataagtataattttattattttaaaaagtagaaattaaattaaaacattttcttgaatgccaaaagtattatgaggagaattaccttatatacttttttgttaatttttttttttaaatttatggtttgggtttttaaagtagttgcagcgctagttgcaatatgggtttttatacaattttttgttgcaatttaattgttagcgctagttgcaataggggtttctatgtaaaattctgtaaaaatgtaaaaaaaaaaaaaatgttttaaattataaaaataaaaaatttccttatttatatatattttttaatatttataattttaataaataaatgtgtattttttatctgaaaaattatttatttatctatttttttgctaaatgtctattatcattgtcatgtatggattttcccatcctaataaatagaaattttatttagttgaccaagacaaaaaattagttggaaaaattaatagaaaaaaatgactaaaagccatatttaatacgactctaccaccacaacccaaatccatcgtaatcagaattcaccgttttttcttttggatttgaaaggattaacattcaccgttgatctacaatgaattccacttctcataacatgaagccaaacgcagcttatcgaaacaccacccaagtggcgcgtatcaagcaaaatgggccccactaaagtgacggaaataagtgggcccatagcccaacagagtcgaaggaccgcaaggataccaaaattttgcatataaatatgaatcgaagcagagtgcaaggtctcttattactgcctctcttccccattattccataaaaaaaaaatagttattatttttattttttttttgtttggagacttttccaaccaaaaaaaaataattatttgttgtttttcctatgtttctctatagtgtttgtcttctttctctataaatcgtttcatttctgatatattagaatcgtcttcatctccgtttagccttttgagctttccaatcatgggaggtgagaagggaattacgctggagcagatcaagaatgagagcgtcgatctggtattccttcccctcatcttttctttctctttgtctccatgtctgttttgtcttttcttgagatgtgtttatgtttggttgctgagaaagttaaaaaagtagaaatcaagtgaaattttggatatatttaatgcttcacgttgtttttctttaatttttttcttcagttacggagtgatttttaatctttgtttacatataatataatacaggaattacttatttgaatttgttagttgtttctctcataatctttctcgtcaagcgtcaactaagaagtactaatgacgcttttctcaaaaaaaaaggaaaatgaaagtaactttatattacgattctaacgacaggaaaagaaaagaagaagatatttataaaatcacgatttacggctgtatcaaagcttttttattcaattttttaattttctacaattaagccgatgaaaattgatggtgttcatttcaacgacggcgacaagtggaaactttcttgagttacagtgctgtttcaaaagaaaaagcaactgtagttgttctaggacacgtggagtccatcgactgggtccgctactgtcacaagcggcctagatgtccccctccactgatttttcttcatcttcttaattttttttttcttaaattttaaatcctttagaaattatattatatatatatttttttgtgaaaaaaaaaaggttgttttcattagagaaaaaatatcacacagaaagaaaaatagcattttcgaaaggcatacacacacatggaatcagcgccttgacagcgcactcttctttatcgagtgtggctcaaaagagaaatggaaaattagaataaatacaacttatcttttgtctactttttcccactacgcgctatctagcgtgtgtgaactacgtgcttttagtatatatatatatttttgaaaaatattagtatataattaaatatttaattttatataatttaatttaataattttagtgttagatactaatagaatagcagtacttattttttatttttatagcaggacctgatttggtggtgaaaaaagagaaaaaaaaaatacaagcttctggttactctagccaaacaccacaaaatataacatataattattagcacaaattaaaatcagatctcacataattttaaaaatttaataaataatataaaaagtactaattaattacaatatgtttaataacaattttcaattaattttcaatatgttctatatattctttttttgtccacctctttttggaatttgggcatacatgctcacctcaccttccgtggtacctttgtacttttgatatttttgctattttctagggtagtttctatatatatattccttcaaattgaaataatgtttcctcaattacgcattaatatatatatatatatttggattccattcaaaaatatatatatatatatttatatatatttggatctttactgaaattaacactaatttaattaaattaatttgtctattccccagaattgaaatataataaacattccccccgccccaccaaaaaaaaaaaaacctactgaacctaacacattaattattaaaaacttaaccaagacttttctttaagtctcaatgtagagaggggaaactgtaaagtatttcttttttttttttttggattaaagtagtgttaagctcctatttttttacaatctgctgtctaaatatgtatccaagtatatacaatatttacagggcagaaatttttcgccgatttattatatttaaacaaaattttaggtgtgttcttttttaagaattttttttattaataattaaaataaaataaggttccttgagttgagccccaaactttgtatgtgcgcctctgactgaataattacgtaaatatacataagatcacatgatcggcaactgcatacctttaaaaaaaagccgccttaataactaatactttgctataagacaccttattgtatctaacatcacaataatgaaagattaatttacttaataatggtttcggaattaatttttcttatcaaattatattaattcatcaaacgttaggagccttaacaaacactttaaacaaatattacaccattgctacaactaaggatgagttaaacacgtaaaaaggaaagcatttactaaaataaaattaaatagtttcagtaaacaaatattttccaatgatataattaattagagctaatcatgagagaatatcatttatttaactgtatcatacgtcaaggcttaattttcccgtcataagtttagcaataataataatagttaaaaatgtcttatcgatatgagaagaataggtaatctggtgaagtcaggaatgttagttaatgacagattcttatgacttaaatcatgaataatttgttgttggttacaggaacggattcccatggaggaagtgtttgagcagttgaaatgtaccaaagaaggactgtcgtcagatgaaggagcccaacggcttcaagtctttggaccaaacaaattggaagagaaaaaggttgacttcataacttattagtaactgatgttatttcttcacttccaacatcttgtggttgcttattatgatggtgtggtttctttctgtcctaacaggagagcaagattctgaagtttttaggctttatgtggaatcctttgtcctgggtcatggaagctgctgctataatggctattgccttggcaaatggtggtggaaggcctccggattggcaggactttgttggtattattgtcctgctgatcatcaactcaactatcagttttattgaagaaaacaatgctggtaatgcagcagctgctctcatggctggtcttgctccaaagactaaggtaaaacaacagcctcaccatcaccatcagacttgtttggtttttagcttttatggtatttttttttttaaatatgttcttatattcttctattgaacatttaaacttgttataggtccttagagatggtcgatggagtgagcaagatgcagcaattttggttcctggagacattatcagcatcaagttaggggatattgttcctgctgatgcccgccttctcgagggtgatcctttaaaaattgatcaatctgctctaactggagagtcccttcctgtcactaaacatccttcagaggaagtgttttctggttcaacttgtaagcagggtgaaattgaagcagttgtgattgccactggtgttcacaccttctttggcaaagctgcccatttggtggacagcaccaaccaagttggacactttcagaaagttctcactgctatcggtaacttctgcatttgctccattgctgttggaatagtaatcgagctaatagtcatgtaccctatccagcaccgcaagtatagagatgggattgacaatttacttgttctcttgatcggaggaattcctattgccatgcccactgttttgtctgttacaatggccattggttcccacaggctctctgagcaaggggctattaccaaaagaatgacagccattgaggaaatggctggcatggatgtgctgtgtagtgataagacaggtactctgaccttgaacaagttgacagttgacaaaaacctgattgaggtgtttaccaaaggggtggagaaggagcatgttatgcttcttgcagctagggcgtcaaggactgaaaatcaggatgctattgatgctgcaattgttggaatgcttgcagatccaaaggaggtaagccaattgaattttttgtttctttcaacttcttataaagaattctactgatattatgaactggtcaggcaagagctggtattagggagatccattttcttccatttaacccagtagacaaaagaactgctctgacctacattgactctgatggtaaatggcatcgtgctagcaagggagctcctgagcaggtaacctttcctttaacataatgtctcatcatatgacatatggtatggggtgacaaatgtttctaggagaaatagtaactcgcatgttttgcatgtttttaaacagataattgacctttgcaactgcaaggaggatgtcaggaaaaaggttcattcagtaattgataagtttgctgaacgtgggcttcgttctttagctgttgcaagacaggaagtacctgagaggacaaaagaaagtccaggagcaccatggcagtttgttggtttattgccactgtttgaccctccccgacatgacagtgcagaaaccattagaagagctctcaacctcggtgtcaatgtcaagatgattacaggtttgtcttacttgtactatagatatttatatattttattcttaattgctattttttttatttgaatacggatcaattttcattccagagactgtttttaatttgtgtgcacttctcacttttcaggggatcagctggccattgctaaggaaaccggtagaaggcttggcatgggaacaaacatgtacccatcttcatcattgctaggccaagacaaagatgcatccattgctgcacttcctgtggatgaattgattgagaaggctgatgggtttgctggagtatttccaggtaactttgcacttcttcttttctaaaatatacatgcattatattgtactactataacccttttgtctagcttatgtctttgttttctaaggtcttcaaaatgtctaaccaccctgctttttcttgatttggtgtccttgcaatgttgtcaaactatattttaattgttgtagtattgttctcaaatttgtcaatttgttttcttcttctgatgtgatgatctcctttctcatgacagaacacaagtatgaaattgtgaagaagcttcaggagaagaagcacatctgtggaatgacaggagatggtgtgaatgatgcccctgctctaaagagagcggatattggaattgctgttgccgatgctactgacgctgccagaggtgcttcagatattgtcctcactgaacctgggctgagcgtcattataagtgcagtgctaaccagcagggccattttccaaaggatgaagaactacaccgttagtttacctttttatgttatcattctttatttgcaatttggtgaatttcttaaattataatttttacatgcctaatctaattctgtattggctgttcctttatgcagatctacgcagtttcaattaccatcagaatagtggtaagttttgcacagatgaagcttttgaaacacaattgtgacaaggcatttttttttcccaattagtttttgtgtgtgttctcattatgtgtgtcattttgacagtttggattcatgttcattgctttgatatggaaattcgactttgcccctttcatggttttgatcattgcaattctgaatgacggtgagatcacttattacagtattacaaactaatgttacatattatgatgtacttctaaaacgtgaatcttatttttttttttcctcttttatgtcacctataggaacgattatgacaatatctaaagatagagtaaagccatcgcctatgccagacagctggaaactgaaagaaatttttgctactgggattgttcttggaggttacttggcactaatgactgtagtgttcttctgggttatgagtgataccgacttcttctctgtaagtacctgtcttgaatcttctactaacttctaattttcttggttacatataatttcttccttctcctctataatctacttatgtttctacttttacctattttcaattacaggacaagtttggtgtaagatcgttgagaaataaccctcctgagatgatggcagccttgtaccttcaagtgagtattgtgagtcaggctcttatttttgtcacaaggtctcgcagctggtcctttgttgaacgccctggacttcttttactcggtgctttccttattgctcaattggtaagagttttttctatctattgtcactgttttatgttgcactagtctattttagaatctttttatgaggtgtggtgtctacaatattatggtaactgagtctcaatagtgtaagaactgtttagtaacatgtgagttaagcttctttcaagataaatactgtattctattgttcagattgcaaccttcatagctgtttatgccaattggggatttgcacgaataaaaggtcacggctggggctgggctggagtcatctggctatatagtgtagtaacatatttccctcttgatcttctcaaatttgcaattcgctacgttcttagtggaaaagcttgggacaatctcttggagaacaaggtaaggttttgtgtgattggagaataggtcaagtcattgatttaattaaaggtgtcatttttttgttttattgatcgctttcttgtaacagactgcctttaccacaaagaaagactacggaaaagaagagagagaagcacaatgggctgcagcacagaggacactccatggtcttcaaccaccagaatctaacaatattttccctgaaaaaagtagttacagggagctttcagagattgcagaacaagccaagcgcagggctgaggttgcaaggtgagcaagagattgtttttcctcaatattttgatcattagaagaactaccatgattgaatttgtctctgttgctacgaagaagaaaattaaaacaaaaatatttgtttggatttatgattgcaggcttagggagttgcatacactcaagggtcatgttgagtcagtggtgaagctgaaaggtcttgacattgataccattcagcagcattacacagtttgagggcctaagctattaatatcttcagagagaagaaagagggaggcttgaatggttttctaccatagaaagggaagctcaacaaaattaaaacaacgatgatgatgatgatgatgatgatgaactttgctaaagtttgtttctgtctagaatagggtgatatttcctcatgctagaaattttaattagctatttaatattgtcacctaaatgctgaggaaactgtttttctttttttcttttttttttttttttcaagtacaacgatataaatttacatttacttcttgtgttatggtttcttttattaacgtggtttgcttcttgcattatcaccgtacataataggacataatgttctaattttggggatcgactctctgtccctatagtattggtctatattatatatgactctgttactttcgaaagaaaaataaaaggattttaccaccacgtactgaaataaatgacctttttctcggttttgcccccattgagatttatgtgcattttagtcatttcacttgcttcaaaaggtgctttgtcaatttctcccctctttatatatgtagggatactattttgtcctgttagtgtattttaggtgatgtattctttgatgtacggcagccgttaataatgtaccctgagatttataaataaattcacacacattattacgtatcttgggacctacctgtcgtacaatagaatacattccatattttacatttttagtcacaaaatccgctgcctatatatatatatttatatgatccatactctttatattgtggtgggttgaatgttaatgtgtagtatttccacgcagtccagatttttgcttggaaaatttgaggcttttatgcttctaagacacataacttaaacaaaacatggtaagagtatttacatacacgcacacatattttactccaaaatattacacacctaacctatacacctatggacaaattgttattctcattctctctcctttctcattctaatcttctctacccgcatcaccacccacccatcaatttttatttgttttataaccatccattcaattttttttaataatttaaatcttaaatcaaaaaaaattaaaaaagaaattcacttcaagcactgattaaaatccatatttagcaatggtacatgacaaacttgatgcattaagtaaaataacaatgttttaaattaatgattatcgactgtcccataaaaaacttatcgatgtgtaacgatgcttaacgatggtcctatgttacattttttaggcacaataaataaatcaatgcttaccaacagcttaatggtaacgataatggaaatttgatttcttttaggggaaaaaatgatatttagcaatatttaatgatagtctcatgaaaactatatttttttggcaaaaaaatatactaaatcaatgcttaacgatagtcttatgaaatttgatttttcaggcaaaaaaagatgcttagtgatacataacaatggtttagaatgatcctatgaaaacttgatttttttttaatgcataaatgatgcttaacgaaaatcaagcgatggtcctatgaaaacattcattttaggtaaaaaaaagatgatgttaaatcgattcttaatgatggtctagtgatagtcctatgaaaacgtgaacttcttatgcgcaaaaaaaatgtttaatgatgatctagcgatggtcctatgaaaccttaaaagttttaggtgaaaaatgaccctaagtcgatgtttacaatagtcttatgaaaatttaatttttagataaaaaatgatgctaaatcaatgtttattgatgatgtagtgatgataccatgaaaacatgattattttttttaaggcaaaaaacaacatgaaatcgatcttttgcgatcatgctgtaaacatttgattttctaggcaaaaatgctgctaaattgaggcttagctatactaaacgatacagaaaaatcaatgataaattgatgcttaatgacaaaccctatgaaaaattaaaactagtgaaaaatcgaaattttaaaatgtaattcacctcaaactaagaacgaagaaagttatgcctcaacaaaattttttaagaacgtcatcacaaattatcgctaaatcatcatttcaatatgttccattatgcttgccttgaaggataaagttttaatacggttatccttagatattgttaggtatcgattgaacatctttttatactaaaaaaaaagtttttgtaagagtatcgctaagtatttgatttagcatcattttttttttttgccaacaaaatcaagtttttatcataccattgcaccattgttgagtattgttaagcatcaatttagtaccttgtaaggtttatatttttgacagattatattaacagtgattccaatcttatttgcggtgtttatctgttctaactacatgtgaatattctgttagtgtccacgtcagtcagttatgtattaacatctgtcatgaaaatgttgttaggtcgattagaactgtctgtctatatatagctagttctattttgtgacttggttaactagctaattcattttcttagttaattcagtattatcgcgatgtattgtgtgtggtatctggtattgttctttgtttttacaggtctgattgaatagcttggtgatggttatccatagcagaaagatcagagcctgttcgagctgagttcaaactgaaggaagttcagtgttatcttcgtcatcagatctgcagggatttcagattgaagaaaagtgtcgaagaagaacttagctgatgcacaggaaatcttgtgtattcaatcaaggatcttggttgatgttggtaatatttcactaaatgttgtaaagattgtattaaatacttaattgtgaactggtgattgtaatatgaatctttggatttagtagatgttattaccctagttcggggaacccaagcactagtcggctgagatttgttctcagtgcagatgaagcttgtaaatcattgtcttcattactgtttactctttaacctgattcttgaatgttaaagttacaattgctaaatgatttcttaagtaactcggtaatctgaatctagtaatcaatccaagttgttctttcatacctaaacagtaaattttcatgggattgtcactagaccatcatcaatcattgattttgattgaaaatctgtaaaattgcatagtttcaaatctttaaaaaaaaaaataacaaatagaaaatcttgtgcgtaagtgtttgaaattcatgaattagtgttctgactaaaaaaattatttattttaagttttgaattgaatttttaattattaaaatataaaaatgttgattcaatggtgctatcaatatgttcatgtccttttaataatggtggtggatagagagaagaagaaaagagagaaagtggaagaaatgacagagaaaaggggtagggctgaacatcgggcgggtttaccgggtttcgggttggcgggtttcgggt

SEQ ID NO: 15074 - DNA, 5070 bp, Cannabis sativa
aaaaattattaaaaccgcgcttcgcgcggatctattccctagttaaaaataattgtttttaaaaaagtttttagatttagcaatgccagtaattttaggagacatggcaatagcgtgttaatcaagcacttgatccattaggccacgtagtcaaacaacgagatcaaatgaacgaaagtaaaatttaactaccagtttacaagagttttaccttaaattttaaaggttaattactaacaaagtgaaactattgaaaccatgcgttagaattattattcacattttccgaaaagaatcaggagatatttaaacatcataaaacaacttcaaatctcctccaaagcttcaggtgtcctttatgataaactcgcaaagaattgaaaattgttttctttgaatgtttcaactgcgagtggtggttagttaaaaaacaaaaagaagtttgaaacagagacctaaagaaggagaacagtctatggactgtcgtctgtgaattagctacacctatcagaaatcatttgcctctttgcatagatagacacagaactattcatttcttgtcataatacacttaaccaagtctagaattcggaagtagtcatagaaaagtgaagactccttaccctcaagtccatccctgtgatgtctgttactgcctgctaaattattgcatgggctcccaccaactacaagatcaaacccaccaaatttcctcatatattcttccaaacgatcactgttcagttgttgcacgtcatcaaggtgctccaaataccctttctgacttgtttgctcccaccaacttctcactatgttcctgttcacttctgagatctcaacagagacaacattcttcagagggataccaagccggtggagtgctacttccgcaccacctattccagagaagagagaaagcatattgatgccattcgggtacaagtctttcaaagtagataaatggtatgctacagtgtcaacctgaaatgagagaaaatataagcaccagatataatggcagaaagtatttctaaaattaacattttccaaaaagaagagtttaatcccacttctgcaatcaaaaagaaaatgagcgaaggatgccaacattgacaatagaaaaaggtaatatcaattacctggaaagaattaccgagagatttatatctatcggttctgctgattccacctccccttgtatggtttcttggaaatcccagaagcatctctatttcatctggctcaagaggtgcaaccttattccttccaacccagaccagattccacttccggcattcatccatgacgtacttttggatactcataggtggttcagaatctggatactcttcaagagctttccgaatcctctctgttaattttgcacttccaatgcatgtctgcaagcagttaagctttgttcttgagtcccatgaaggccaccatttcttagttaatggtattgcttcatgtatggtgcgtgcaggaaggggaagaagaggaaatctgttctcaatgggaagattgtgaacataacctcttttccttgcggctgcacagaaatacttggaatcaacaaattccggttctacatcatataagaaccgagagatggtggtccaaactcctttgggggcaagtgccacattctcataatagaaatatggaggccctatagcagcttctggtatatctctccgaacccgccggaatgaatcagttggaaccccaaatccaatcattggatttggaagacgaattgtctcatcatcttcagtcagaatcctcttctccaacctcctttgtttagaacattcaagaagtcttcttcttttgtgattagaatagtcaccattaagtcttggctgtgaaataaataaaaaatcagttattacaatgggtctatttggcatcacttaaaagttcttcaagaacctaaaattaatttttaaatgttttggatgaatttttaaaactgcttaatgtgtttggaagcttctttgataaagtatccaccagtttcacccacaagctctctcttgacaaaccaaggtttcttttgaaaaactcttttaaaatagactatccaacagtaattaaagaaactttttgtgtttactgctatattttactatctaaaagactaaaattaaaaacagaagttatcacaaacagggtcctttatactcctaaacgtgttaaaaacttcctaaattaccaagggaaagttcccagaaacttcatatcaaatattcaaaaaaggagaaagaataccttcacttcaaggggataatccccatctgctgcccttgccatctgtgcagcacatataaaatcagtcaattctgcaagtgaacagtcacggcctgcaatgtttaaaacaggtcaaattagaataaagttaatatatatttatatatgatacataattgaccagtataatcactgaaagttcaagaaaaatacccccacattctgcatttgccaagtacgagtgcattttaatattaataagcagaaataagttatatttatgcagtgcccaatatttcaagaataccagagctctatctatgttctaatagataggagcagcaaaatttgatataacctcataaagttaacaaattgagataacaaattaacaaaatgagatgacacatcaaagctttgagacattattcatcatgagaatgcgcaccacatctttctagtgcgattgcagcctcttctttagaatatcccatagccaacaggggcctaattttattctcctcatctgaactaagatttgcaagatcctggaaagcagatcaaattaatagacagtgaatacatgtaacatgaacatataagagccacaaggttcttaaattaaagtaacctgtcaaaatttacagaaggtgcataaattggtgggatagataaaacaaccacaaaactaataattgaagttttagatacctcattatcagaactatcaatatctgagaaatcactcaaaaagctcccctcataatcacaatctgaagaaaagttatcaggttcgttatgttgtacttgttcttcaggagattcttcaagagcctgccaagtaagaatgtaagaaaaagaactccaagattattaaaaacaaaacataactacaattgatttgtcatgaaaggagaaggttgcatcaatatgtgcaagctaatgtttcacagtaacagtgttaccacagtataaatttgctgcgtaccataaaattccatcaacagaaattctccttaaacaaaaaagaacaaaaaatcattggaccagcaacacagtaaactgcagatgaatcctcaagaagaaggatccccttaagcaaaaaagaacaaaattaaggaaataaacaagaaaacatgcctcaacaagaaaactaaatgaccattttattccacctcctaatctgctctatccaaaaaagcaaacagaacatatattgccattgtttgaaatttctagtccaaagtaatcctaatgctgtatgtaacctaaataggcaaaagcaatttagctgatcaaggtattgaactattgatgaatttcgagcaatttcttgaaagtgaatagctactgagatgtgaatttcccaacccgacgcacacaaagtagaaaggccaattgaagtacaatgtctaagcgatggagagaaagagggaaaaatgaaaccaaactagcaaacaatttatctaggtgtgaaataaccacaaaagaattagagatattaactcactgatcaaggtattgaactattgatgaatttcaaacaatttcttgacaatgaatagctactgagatgtgaatttcccaacccgacccacacaaagtagaaaggccaatcgaagtacaatgtctaagtgccggggagaaagaaggaaaaataaaaccaaactagcaaacaatttatctaggtgtgaaataaccacattagaattagaaatatttaactcaccgaatatgtgaggagtgtctccaaaatagtatctgtattctcctctcctgagtaacaaacatattaataactgaataagccacaaaacaattcttattcgcaaggatagcagacagaacaattaccatgttcttgaattacttttgccaccatcttttcagagaatcccatcccaacaaaatgatcaattgtcttggagcatgaaggacccgcctttaagaataaaacaattacatgtcagtctttacctaaagtttaccatccaaacatcattcacacaaaagaacacatgcgtgtacacatcaaagtaataacaaagtatgtttctcaactccaaatgaaaacagcataaagaaacacagattgaggggatgcatgtaaaaccaaatcagtgaatgccttcaaaatgcaaggagtatatgaaatgaaagtgcccatttgattccactaacaaacacattgcttctgtgaaactagtatgacaaaatctttgtataatttaaactcaacaaatttgggcagtaaagtaaggtcttcaaatacattttgcatttataactaaattaataaatttaaaaatgctttgcaaacatcgcatacctccccagagccaattgtagcaactccaccaggaactgtcaaacttgaacaagataaaggtatattaccaatttcaagttcatcttcagtatcccagtcaaagttctccccatctaaatcagaagtattctcaacctgccgaaatttgcgcagggatatcaacaagaaaacacattatattcaagtattaaagttgttcttcataaaaataaataataaataaaaacacttattttcttgatcggccgttacaagtaattttgagatgagaaaaaaagtaccatttcgcccgaagctttggctggcccagtcgagagacttttcgctgttcaagataatcataatattaataatttagaaataaattaattataaaaaagcacaagaattcagaagctcacctacttttctcataataaatcaaacaaattgataaataaacaaaacgaaaacactcatatcatccagagtaaccaaacaaaaacgaa

SEQ ID NO: 15075 - DNA, 4279 bp, Cannabis sativa
aacaacttttgttaatttagttaatatataaaatattaatactatatatgatgttctaataaaaaatattatttctttaacatttgttttgcaccacaataaaatttcactataatcgcactacaaataaaattgacttaataggaagcattttctttttttttcaagaaaccggaagctttttcttaaccttcctgttaaaaataaaagtaaataacttctttttattttttactataattttgaaaatcattaaagaaacaaaaaacaaaattgtaggaaatccttacaaaacaaaaaagaattgtaggggatcaaacgtagccttgaatgagtcacttgtgaacacaatccaacatttcaacgtatattttcaaattttagagatatgacacgatgaatcaataacaaaaactcaatggatcacaaataaaggtagagatccaaagtgctggctctacttaatatgcaatgtaacaaaatgtttaacctttttttttccacaaacacaacaaacacattgttttgagggttgacatctttatatggtgaatactaattgattaaagtcctcaataatatcataaccatgtaaagtaaactaaataaataataataataacaccaccatagcattactttataattcatgtagtaacgggagtacatttcatattttatataataataatataatatggaaagagagaaaaactgcggctacattgctttttgcctctattgcagccacttcagcctcttaacttaaatggctagtttggtaatttcactaaccattttcccacttacaaactcaaaaaactcataacacacccttcactttcactaacaaaaaaaaaagtaaaatgatttcctacccctgtatcatatttcacccaacttttcccataaccctaaccccatatcattctattacttttttttttcactcccaaacaaacacttcaaattttcctgagaaaatagcagaaaatctgaaggcgggaaactaaccccaagaaagaaaaaagaaaaaaaccaaaaacaaaaaaagtttaaattgaaaacaacaaagtagaagggaaaaggaaaaaaaaaaaaaagtgaggggtattaattagaaaaggaaagggtatttttggtatcacacacggaaattctttccagtaaatgtttgaccaaattgccagctgggtggggcaatgttccaggaagtggagctccgcctatcactggcccgaacccgaaatgaaagggcctggcccactaagaccgcattggactgccaattctggccccagtttcggctcatgggcatccactggctcttagaccctttaatgctcacctgcacgatatcccctgcacccgcgacgttggttaccaaaaccaagttgaagtaacggaaaccgttaattgtgaacctaattccacctgtctttctacatggaatcctgtaataaataacataaaaaaaatattaatattaatattcatagaaacaaaaagattttaattgattttatcatataacggtgggagtgggacccaactcacacgcgtgggagaccgtaacaaaaataaaattcgtttttttacaagacaactcaagcagatttcccgggaaaagatttacatgacgattctaccccattggaaatgacaaaaccacgaaacgaaccatgacgactcctctttcttcgaggcttgttttgctgaaatcgtgggcgaattgaatttacctaaatgcccttgactacttgggtcacacggcagactaggagggtatctgggtcattacgaaagctaaaaataggggtgaaaaggatgaaagaggttatgtatttggttttattaggagggaaaatgacgtaaaagccccttactcattcgcaactgactattacagctgctgataagattctgtcgtcgttctgtttgtttcccgagaaaattcagtattccctgaccgctagttctctaggcagacacacgtacgttcgtatacgactttctttactaataataaactcaaacagtgaagtgtactgatgtgataacccatgaccatcttagaattacaatttaatccctcagatttacagagtgtacaaaaagtaaaggacaaaactcaccggcggtagctgacgggaacgattccggcacggtattctgcgattttgagaaacattggcatagctaggtcgaagtgaggacgaggagggttgcaccaaccaccattgtcactgggttgagcgaagttaggagggcagaaattggtggcggtgacaaagatagaagggcttccggggtgacaccatctcgggtcttcggcgcactttagctcaaaacaagctccgcaacttaagccattgttgaacagagctgtgctcagggcagccgtgttcacaccatacccttgactgtaaaggtttccgtaaccacaagctccacctgaaacaaaacccagagaaaattattagaaaaaatgatgttagttttgaaaagaatcgagttacactgatgggttcaagagatctaagagagagaaagagagaatgttacccattgttccagaagcgtcgctgccgccataaaaggtggcgtgggcgttttgccaagagccaccagtgtaagggccagggattcttgcattggctaccgttaggagaaatgtgagtagtgctgtgatgtagaggacagtagcgaacaccattgttaacagtgggagagagagagaaagaaagaggtgtaggtttgatgaggacgaatggggaaagcgggaagagggtgggggtacttatggaggtggaaactcccctttctctctctctctcttaaatttattacacccttaattaatgcttttgtttctctctctcttacatttatttacttttttttaattatggtaaaacaaacaaatttttcttttttcaaaggggtgaaattgtttggtctaaggaagaaaaagaataaagtatggtaaatttgcaaaactatgttgaattatttcttcaatatccttatgacaaaatacttccctagaatctattaaaaaaatactttgctagaaattctcaaaaaagaaaaattacttggttttaacaaattcacgtattaactttcggccccaacaaaacaaaaacttacatgataattttgtcaccgattgaaagggcaacaaggatgatattatgaagtgttattattaaccctaattgttgacattgtaactaatgacaaaatcatatacttgaaaggtcaagaaataatcatgttagctggtgtgaaaccaaagttattattaatgtgttataaagaaccaaaaaaagcaataacgaagaaaaatggtgaaggaaaaagtacatatgtgagatgaatagtaggctcccaaaaatagttgaaaatgaagaaataatacgtttaagaaagaaaaggaaataataaaaaataataataataataaatagacaagtcagtgccagtggagcatcacatgcttctctggtcatctaccgacaaaaagagggtctacttcaaatcttttggttttctttctctttttcttttatttttaaaataaaataaaaataattcatgattgaagagtggaattgcttagtgaaaccctaaaattggtcaaattttgcactgggttttgtctaaaactcaacttatttaatgatgaaaagctcatatatatatatatataacccttgctacgtatttatatagcctttttgatttcctatgaaataaaagatacataaatgttcacttagtgtagccaaatatttaatgaaaagcttcttctcctcctatgtaacttggattttgacttattggcatcacatttaaaattatacccgaaaattggcaagagattttgaatatgtgggccaagaaagttacaagttaacaacatgaatattattatttccattttcaaaataataataataataataatttctttcattacttgtagattaaagtagaccttcgatgtgggttggaaagtgaattgattaaaatttgagggtaaatagcgttataagtactcaaagttttaagtttgtaagtggcataattttaatgtttatttttagcggcataagtacccaatatttgtaaaactgtaaattttctctaatttcttccgtacaaactctgttactttcttaaacaggccacatataaagtctaaattcttgatcattgagtctagacagaaacatgtagtatcagttacttctaaatgtttctttaataaatt

SEQ ID NO: 15076 - DNA, 1959 bp, Cannabis sativa
taaagtttaggtggtttagccgccaatatcccttttagttaagcgcttataaccttcgctggatgatattatacattttttgcaaagtgcttttattagaagacaatgtataacagataatgtgatggttgcctacgagttacataatctaagagcattgcataaagggaagaagtgtttcttagttatgaaattggacatgagtaaagcatatgacatagtagaaagggaatttctagaggccgtcatgttgaaattaagatttgttgtcccatgggtatccttattgatgaaatgtgtacgttcggtacattattctttaatcataatggaaatattggtggtaaaatcattccgactagaggattacgtcaaggagatccactatcaccctacttattcctattttaatctgaaggattttcttctcttctaaactatgcagaacgaaataaggttatattgagttataaagtggcacgatctgcccctacaatttctcatttattctttgtagatgacagtttacttttcaatagagcttctgtccaatcgtgtgaggcattacaaaatatttttaatctatattcaaaggcttctgggcaggtatgattctctttattctacaagatctgtgcatccctagtactaatattaagtgtatcagggattgttaccttgttgtatagactaattatgctttatccctacattcttctaatttgatcttatattgtggttaatacaatattcaacatccagtctactacatcagcaaaagactcattgaagctgaaggccggtagccattgatagaaaagctcacctattgtctaatctttgaaacacgaaagctaaggccttacttccaggctcatcctgttcaggtatacactaaccaaccattacgtcaagtactgcaaaaaccagacgcctctagtcggttgctcaaatgggccgtggaattaggccagtatgaaattatctttcagcccccaacaacgattaagggtcagattttgtggttgaatgtacgggtaaagaagagagcattttagaaagtaacctagagccagtacaagtacctcacccgagcaatggtgaaaacaagtcaacttggaagctacatgtggacgggtcagccacggatcagctgtctggcccaagaatcgtccttgtcacacctggggggcaacatctgcacgctgcggtcaaattcagatttaagacatccaataatgaagctgaatatgaagctcttatcgccgacctaaaacttgctcgggaattacaagccgaacacattgagatcagtagtaactcacagttagtggtaaatcatgtatttggggagtacgaggctcgaggggagaagatgatagcatatctaagaaaaatacatgatctgctcgcacaattcaaaagctacgctctcaagcaaattccaagagaagaaaacacaactgctgatgcattagcccgacttgtgagcagcaacataaatgataaagcaaatctaatctccatctaatttctagaaaaaaacccagtatcatcggcacagaggagattgaaatgattgatacatccctaaactagatgacaccaatagcagcctacctcaacactggggaactcccagataacagaaacgaagctcagaaaataaggagaaaggctgcacggtacatcattgtagagggagttatgtacagaagaagattatccatgccactactcaagtgtgttacacaagaagaagctgcacaacttttattagaagtacatgatggattatgcggcaaccacgcagctaggcaaagtttatctaagaaaattttgaggcaagggtatttctgacagacaataattgaagactccaaggcctacgttaagaaatgtgacaagtgtcagagattttcaaagataccccgtgcaccgcccaacgaactaactcag

SEQ ID NO: 15077 - DNA, 7902 bp, Cannabis sativa
agagtgaaaaaaagtactatacttcgtcaaattagtctttctctgttcaaagtgatcaaatttatctgatttctgatcttgcttccttgtagagcctttactttgaactgcagaaggcatattttccaaaccagtatcagaattctctgaaacattgaccatactcttgctcactcgttcctgcaaagaagcaaatcagttaagaacattcacatccatttggaaaaaaaaagggaaacaaagttataataaggctaaaaatgggaacatgtatccaccttggcatcaccaaaaaaggatcttaatccttccaaagacgaaccaaaattgtcatactctctgaaagatttcctcagccattttgacatggatgctgtattcctttctctctgataacgttcatctatttacacagtgaaagaattacttgatgaatcaaagatgtgaagcatacataattcaaacaacgtcaagattccaaagtgtaaaatctcaaagaaaaatgtttagacatttagtagggtatagctagataaaagtgacagcataaagttgaaaagacattctgaacttgaatatgcagctggtaaattttcccagaagttgtttattcataaatgtatggcccaaggagtcggttgaccttttcagaagtaactacctacgtttctcattaataatatcccacagacaccccaataataatattctagaatggagaaacttgtcaagaggaactctcaattattcaaaaaaaaatattgtcaggttcgatacatttacctaagaagataatggcaccataatcaaatcggtggcggatacaacgtcctaaacaaaagaaagaaagaaaaaacaagatagataattagcatcacaaactcagcagccatttcacacaccaaaaaaaatcacattgctgcaagcttctgttaatgctatgatagtttggtgtacctgctgcttgatttaaagctctgaatgcttggtggctgtaccagtcactaccactcaaaaggttcttggatgatttatatgcatcattatatttcatttttagcccaacttgaatatcatttctgacaaaaaatgatgacaatcagcaaatgtatttttgcataatctttccaaaaaagacgagaaaaagaaaagccttacatgttaggaaatggaatgcccacaattatctaaagattagttaagttaattacttaatctcagatcatattatttaactcccaaaataggcagttctaattgaaattcatacatttataagtataattaaatgaccaaacagcatcaataccaactggtttcaatgaatgacaaaaatcccattttatcactctatactttgaattgccaaaaaattccactgcattttgcaaatgagatcaacactaaaattggtttgctattatcaatactaggcttctgtcaaaagcattattgaactcctaacccaaaagcataactaacagctacataagagaatgcaaaaaaaaaaaaaaaaaaaacaaggatacaacagctcgagcattgtcatctgagaaatcaattccttctgaaacctgcaccaatgtcaaagcacttgagaaaatgtacacacattagatcttaattttccaataaaaaaatgtacgccatttccaatttattctcatttgtttttccccctttctccacttttctggcgagggaggctgtggaactccaatttagtgagtcagaattttgacctacaggtgaataattttttatgtactttgttcccctgttttaccaattattttatatggacacacatttcacctaaaaagacatgtttgagactatgttgactgcatcatagttcattaaacactaaacaggaggggcatatgcatgtttttttttaactgtctaaagattataggataaaatatatagacctttccacggcacactgccaagagagcagctccttccctattagcattgtctgcactccggattgcactgaagcttttagaatccaatttcttaggtcttttctttctcccagaaataggtttagatgcaccatgaattgcatcatagtaacctttcaagacagactcaaaatcctcttggcttcctcctcttggctctgcacaaccaatacgcagtccagctaagctagattaggttaccgcaatgcaaaagcaagtttggcataaataattgtgatgaattaaaatcctataatcgtgataaataaagttgaaactgaattatatcccttttacaaaaagcacatatccaacactcatttaggctagcactttttaaaattccttaatgaaaacttctcaaaggaacagtctcctgcatgatttaacattagtgtggagaaaaacattacccataaagagagtcttttttgcatttaattgagaccattggcccgtttcacaccaacgcttacgtagcttctccaaaagcttataactcgggaaaaacacaagacagccgcccggcaccactttaaaaatttcctctaaggatttaccaagttcatccttcaaaatattgtacaaaatttaatacagggaagaaatgatccaactatttagcaaaagaaaactgaagaaatacctggaaaacacatccatctgcagttttataacttgcattcaatgggaatttacttggaccactagctattatagcagaccaaacctaagcaatagagtacttgtgtaagtagaacattcaaatacgtaaacaatgtaaacaaagaaactataaacagtgtacctgtgattcaatattaactacatgtgaagcttctagactagctccaaactgaagtccaagctcagatgaaaatgaattcattggtgacagtgtcctaaacacaaaagatacaaggcaaaatgaaggaaataataaaaacaacaacaacaacaacaacaaagttggatgctcaactagtagccttaacaaatcagcatgctatacttaccctgatgtcaagatgacggataaagaaagatcagtaatgtctctgaaaacaacagctggattcaagcaccataaacttaatgtatatgtccagtcacccaaagctttccctaagaaacaccagcaagacaattatcccattgaagatttaacaaacagtttaaaattaatgagtgaaacaacaaagatataaacataatgcagttgaaacttttacgatcattaattaatcgcctacttgcacttactactaaattaaatggaaaactagagagagaagattaaaccccaatgtctattgtctacagtaaacatactatgataggaattctaaaacttgaaaaaaggtcttaccaaaaattcattgacatgggttaaacccaggattaacacaataatggaaagcgaaagaaataactagaataactcaattatatatagcattacgtgacccaaaaaaaactttattgattgcttaccagcatctcttttcacatatttttgtaaggcaagttgaaaatcagacatatgagacccggatcttgagaaaaaataagtcaaagaagagaacaatcctgtatgtatggcataagaaattatataaattagattggaacatcaaagaaaaataaggtcactgaacagattgaaataagaccctttttaccttctaaagtaatcacagacatgccagataaatgttctatatcgctttttgtatctgttgcgtctctaattgcctgcaacaaaatatagaagttgacaccatgccactgaaaagaaaaagtatatctagaaattctatactaaaaatacctttgtggcaaattcaagcaaggttggaaaagattgttgagaaatattagcttcttggagctctctcattgccttgtcaccagtccaactattgcacataatgaccgcagattccagccagcagagaaaaaaaatgaaaaggaaagggaagtattgagaatacaattgttacaattttcccactaaaatatctcatagtagtaaaatagcacttctgtcttcaggatatatgtcatttagagaaaaaaaaaatagatgagtcggcgacataggaaggctggcagacacccaaaaaaaactattggtattatttagatgcttacaagaataaagggaaacttgaacttatacatgaaattgcaaaacagaaaaagaaaccaacccacgacaattcaagtaatcaaacaagacattcactataacatatttgcacacaattgtgttttgcagcttggagagcaaacagttcgtgagttcaagataattaaagactacatacccagtttcatatagattgacatcaatatgaatgtatatgtttgtgtgtgtgtgtgtgtgtgtgtctgtgtgtgtgtgacagagagagcttaattattacttctgaaaataaggctttaaatatttaaaaagaactaatgccttgagagcaattcaacttcaagaaaggggatgcccatgatcatttctaataacaataaacaatagtaccatgaattgactgtatataatcagaatatattatatagaaccaagtaatgatggttgaaaatctacaactaaccaggagaaataatgttgaaattcacgcttttccaatgtatctttcttgtggccgatccaacttaagaggtcctacgccttatttgcatcagttaatgatatataaatactttacagaagataatagtgcttaaaatctgtggaacaatacctgtgtcatttcatacaaaggttggtacaccaaggcattagcttggcagaggtctcccaattctgccttcaattctttatagaagtagagtgactatgtaagaatcataaacttcataactgaaaagcagaatcagtatctagtaacttactatgcaaagcttcttcgtcaatatccacactaccagcatcacgagcaatatcctccatattgctgtaaacaagtgaaagaaattttgataacataattttggaaggaaaagaaatctcttcaaataaaatcttctatgcatacaatagctttgtgtgcacatgtacaatgttttatatgaatataagttctcagaacatgatccattgatccctcactttgattctcgcagtaaaaggaaattaatgtattaaattgaaaaccttccaaaaagatattgaagtctattttaattttaaaacagcttcacatgttagtgataaaattaaattataaatttttgtgccatataaatggaaacaactttaactaccaaaattgatgtaaaatatatataaaaatacttggactcaatttgttatattttttaccccacaaactttttcccaaaaaaaataaaataaaaaaatacacagttttaaattaaaaatgaaaacagatgaagttgtgtaaacatactgagcctcatcaagaactaaaatggctcctttgatatctacgtccattgcacctcgaataaccggattgataatgtaattatacggacaaaaaaccaactctgcggaatctgccatggcacgtgctgcataataggagcaacctaggaaataaaagatgaaaattatagcaaaagtacgtggatgtgatggatttaaaactatctagagaaacagagtgaatggagactaaaggcaaacctttcacaacctgcccaactttgacaagatcttcaatgtcatgagcctcatgacaacctcctttttgaagggatggatggaattgtacttttttctcattcctgtttacaagataaactaattgtttatgcttactaattatataaataagacaattagaactaacaagcaaaagaaaaaaaaaactcacagaaattccgggcatcctgtgcctccatttcccaaaagcagcttgctgaaaattcaaattagcataccaaacattagagaagggagataataaaagaaataatgaaattttgagtgtaaaaaggataccattcttcatcaagattatcctttccacgcatgtacggattagtgcagtaatgctttcgtgatgcctgcatcatcaataactacaataatcaagatactaaagagtacatgcacaactaataaccattagataattaagcaaacgttcagcacaattaagtagctttttatcatttatttttcccactataagccaagtgtaaatttgggcaaatatgttcttggttagctgtagggtatataaatctgattgtgagcatcagttagtcgacctcttctatgcattttttctttctccgcaaatttttagaaatatatcttaaagtaagattaaataatagaaaaaagcaaagagcttaccaaaccagccattggcactcggtaaccagttttcttgtattctcggatcacttgagaaatttgtgaatgtgtcctccttttcaagccaaaaaaaaaaacaaaatactagtgaatctaacagcaaatatattattgaaatgaatatgctcatgtgtagagcttacgatgtgtaataaatggttggtgcctttttcttcttgttctttttatttgcaggagactctgcaggtcctgactcttctgattctatcccaccttatatacattacacacacacatatatacatatatatatatatatatcaaagatatatatatatatcaaagacaaaataacgaaaagagaaagtaatttaaaagaatttacgaattcaggattttcttacttgaaggttcataatcgggaacaaatccaccgccatgagccagaggatcagccatagcttgggggtcgggtttcgactcattctgatacttgagcttacaactttgctgccaagaaagcgtggagcaaagaagagaaagagatttaccagttccagtaggagattcgaggagcgcgtggcaatggccttccctctgtgcccgatcgagagtggagatgaccctacccatgaaggcaagctgtgttccgtatggcttgtatggaaactcgaccggaactcctccgatgtggtacacattcttggctgctttggggttagggtttgctgtggacggaatcgcagtgaccattttggggtaatttccggcgggaaaactttcagaaataataaggagagttgtttccttttaattagttctggaaacggcgggaaagaaaatgaatttcaggttaataaaattcaataataatttaaagatgtttatgataaaatagtttacattttttttattgttcaaaattatcttcaagttggttatattaaaaaaaattgtcaaaaattaagctcatggtcttattttattattttgaaaaatacaaggcttatattgtcatttaacaaagcaaagagggtccaatcagtaatttttacaaaatacagggtccaaatagtatttatctaatattaatatttgggaacaactttaagtagaatattgatattgaattgaaaatattacaataataatttgttattggtacttatgtattataaacttattaaaagtaaaaaaaatactgaaaaaatgaacaattattataaaaaaaaattagaacaactacgaaatacaaaccatggttcgaaccaaatcaatctatttttgagtggtttagtttggtttggtttggtttgatcatttcattagtttggtttggtttggttttaaatttttaaaaatcataatagtggtatgatttgaaaaaattaaaaattcggactaaacaaatccgtgaacactcctatatagaagtactaggcacactttagtggcccacaacaatgctctttaattaattaggattattaaaaattaaaaaaaaaataaataattagtggtcatagtcatagtctagtggtttcacactctttcaagttaatctcccctctccataattaaaaaaaaaaaaataataaa

SEQ ID NO: 15078 - DNA, 4902 bp, Cannabis sativa
  modified_base (2313)..(2314): a, c, t, g, unknown or other
ttacgaaattttacatagaaacttctatagtaactaacagagcaacctaaatcctaactaaaatccgtatagctacccatatagaaaccaccagaaaaaccactagagcaatctaaactgtaaattttaaaaaaaaaaattaaaaaataatatatagagtaattcctcaaaataatataatagtttttaagtaattagggcattaatgagccttattagtacacgattcactattattaaactcttcgctatataaagtttgcacttgcatttttagtttttgggcacaagatatctcaaccctttgtatgaagggttacgtccatatttataaggcaaatcactgatagtaggttggactaatatagacccattaggattaatttggtgcaaaagatctactcttgggataaaatacaacatagtttgagttattaggttgagtaggtgagactcaatttgaatttagatgtcttttgtacacggtcgtactattgacagtaacaggtgggcgtatgccattctaaggaatacagaatattagagtagtgggtaaaaagtgatttctttttgttgggagcctttctaaagttgcttgatttattggaatcgtttgtcggaggagtgcagtacgtaagaaacccagaaatgatcctgagcgcattatgtttctggatgaaccctgaagatatctgttgagttcacgccatttctcttgttaagtgttgatagtcgattcaaaacttagtgtctggattcacttctaggaagcgacatgaaaatcagaccagatgttcgattttacccatctttaattgatggatcgggtatgttaatccttaccgaaccagtaaatgggcttagtatttttgataggcctccgcaagggcccactaatcatctgaaaacacagataacatctaaaacaaaaacaaaaaaatcatctcccaatatataaatatatatagaaaaattgggaatgagtcccctaaaatatatttctacatatataatttccgcatataatattggagtgtggaggagataagggggtgtgtgagtgtgtggcctatatacatgttccattctaagtctcatacatcatatcatataaattatattcaattatatatataataatatgtatgctacttaataatgtatatgtataataccaatgaacaataaaaaaacaaatatcatataatatacctatatatacgtacatgtacactacattatgtgtatatatagaagaaaataaaaattaagaaagagtaataatatttgatgtattaaattcaaggaacagtttttgtgcacattaatgaatgaaagctataatcatttatttatattatatcaaataaatattggaccatgcatatatatacacataaaatttattacctgccttagtagttaaattaaacttaaaagttaagggtatatagtacatttttttatttttttttgtttgataaagaaaagttgaggggtcattttaattaaatatacatgatacacgtgtcatgactatatattttgtgtttgagggccagggaacaacattattggtatacataaataaataaaataaaacattaattaatatataaaggtaaatagaaggaagaaataattaaaaggcacaacaaccaaggctagcttatttattcaaaaattatccagtagtaattatttttaactataattatatatttgtagaaacttttattcttgtattattttttacttcttttgtaactaaattataaaattataacttatttatacatacactgataatagggaaaaaaaataaaaaagttatagataggaattaaaagagtagtgagactaattaattataatattgatttgtttgaaataaataatgatatatttaaaataaaataaaggtatgtgtagtgtagggtgtaagaattaattaagtttgaggagtagtaattattaattaatcatgtgcatgtaattcattataaaaaagcatgcaaataataaatgagttaatataagacaaatatgaattgggcaacagccagaagatatataggagtaggtgggacccatccaaattattattataatcattattatttaattttaaaaaagaaaaggcaatgaattaattatatatgaagataaatatatatatataaataataatagaattgtatacggaatagtacagatgagatgggatgttgatcatgattgaatgttgatcaagtggcaacacactcacacacaatagacacgtaaagaacatataacatatatatatatatnnatacatatatatatatatatctatcaacagagacacccaaattcatccccccatttcctgccattcttctaataattaacctctaatttatatataaatatcaaaatcaaagaaagacatgatataattatatatacttcaaacgacagaaagacaagatataatatattatcgagtaataatacaaaagttaattgttaccatggacatggagttatttgatcagttattaatataaattcataaacataatgtaatttaataattttaattaatgaaaattaaaggtaatagtagtagtagtagtagtagtaggaagggggtccaataatgagagggacagtactttgcaaattattaatggtgttggtttggtatactgttgttggcttaattaataatttgctgcctcatttatatttcattaccctacctactagctactactactacactacatatacatcattaatattatcatccatatattattatatataatcattcatatttctctacctctcttctccccaatattcatcatatatgtatatgcattgccctttcatgatgtttaatttaataatcaatacatatatattagctaatttgacacaatgacataatataaaatcctgcatataattaatatatatagatagctcccttcattcaatctaaatgtgttccaatatcatatccatatatatataattaagttggagttaccatcaattgtaataatttagttattcgttataccatgtcggtacgactttaattttttataaatatataaaaacaatttaatatatattatctttttctacaattaatttcgactacgaattaattgacatcaatttggcatgatgtagttgactttcaacctatatacacgtgtcataacctcatcaataatttacatgaaattaaaaaagaaaagtcaatacataattaattaattaattaataggagtactactcaaccgattgataaaaccctattggaaagtacgtagttgactttgagaaagtcaaaatgtccaaatccattttactatatattgcatgctgccatgtcttaatacatatatagttgaatttttcctatctattatttttttttttattttctatatatttgccttttaattttttttttgaacaagtgtacatttgtcttaatttatgaataattaatataacaaaatatataattatataaatacttaattatttgatcagctgcaaaaataaaactatttaattataagttaataattaataaacctcaaatatatatagtagctatatatgactttatttccttatacaaaacattagagataatttgttgaatgttactagcttttttaaccctaaaatactagctatcatagaatatttagtgatattttctaaataatgaaataaatcttacaaatagtgagctagatatgaaaccttatatagaaattaaaaaaaataataataaaaaaatctattttatttgaccgattattacccgaaattttattgtgtgtttaacttatttatatactattattattttagttattattttgtgcataatttctatacaatttgatatagcattttgactttggattttacttataatcaatgtattaaatattataattaagtttatattttgcaatccaatgcattatgatgcaaatgcacataaatgtaaatttggtatatatatatacatatttgatcatatctaattaataatatgatgcaaatctgcattattatgacacagtacacgcacaattaaagtactacacaatatataattaataaattgaaaaggttacaagtggcatttgtagaagaaaagatagttttctttatataaatatattttgtcctagccttttgagatctctatggatactcccacgtcaccatctacaattaatattatacattattattattatatatgtataactataattaatttacttcttctagctctctttttgtttaatcatataagtaaatcagagagttattaataattataaattgtaaccaaattaattaacattaaaatatataaaatatatatgtctctccaaggttttggtgatgagatggtcgaatcaattatcaagactctgcttttcccaaattataatgttatattatatatatgcgcatgcagatcatcatgtatattaatttaattaattaatattaatacttaataaaaccccaaagcatccaaatgtcaaaacaaagcaaattacaaaattaaagttgcctcaactaattattttcttaattagtgcttcttggattaatttaaaatatatatttacattggcctggtcagtaccagatcatcaacacatataaacaaataatatatatatatatcttaattgttagtgtattttttgtaggctatagaaacaaaccaaattatatataatattttgtacgtacgtagtaaaattaaaaggatcaaatttagttgtatacattaattttactagtcacaattatttatattaatttacagtctataaaattaattataatttgtg

SEQ ID NO: 15079 - DNA, 4471 bp, Cannabis sativa
tttttttttcttttttcctttttcattcttagccccgacccttctcttctctctcctcttcctttttttccttctacgcgtgaacctccatagccaccatggctagaagcttcgaccatccttcgagctccacttttctcagatctgttcgagttagactacaccaagatcacaactgccaatttttgaatctcaactggatctaaaaatttccctacttgtaactgattttcatgaattaataaaaatacagtatatgattttgattgtactcaggaaggttaggggttgactgtgttaggtttatgattttctcttaaaagtcagttggacttctcacagggacagttttgtaatggggattatgggactgtctaatttaacctaatatattttttcttggaaattgttattatgaagagccagcatcttttagttccctatctatccaacataaatattttgtattaggtgcttggtctgctttaattaaaactgttcttgtgcagtgttcatttggtggaattacaaggtacaggccaactgtatgctatgaaggcaatggagaagtcaacaatgctcaatcgtaacaaggttctgatcggttttctctgtaacgaactctattttaaatatggtgcatatgaaattgtgcaatttggtgcatgaattaaattctaattttgtgtatctatctttacatataacgttgctgtgggtcattttgattggcattgatgtacaggttcatcgagcatgcattgaaagagaaatcatttcatttttggaccacccttttcttccaacactttacacttcatttcaggttattcatcgtcttagctgcaaatatatgacttgagattaagaaatctgaatccacatttgtttttgttatccatgctaagtacatacaaagagaatcatgtacttattggggtagagaaaatttctgactccatctttctatttcttcagacttctacacatgtttgtttgataacagacttttattctggtggagagttatttgcattgcttgacaagcagcctatgaaaaattttaaggaggattctgcaaggtactctcttatatgttttactacttcttatcttacaagtgccaaagaaaaaatatatatcacctgaattttgtgattttaaagctaaaattggttcttgctgattttggttagttttgtaattcagactaagtagtaacgaaaattgggttcgttttaaagttggaatgaacttaaatgtcgcatgattttttttgtttatttctttggtaaactggccacgttgtagcttgacaattcaagtgttgataattgatatttgaactcatatccaggttttatgcagcagaagttgtgattggcttggaatatcttcactgcttaggtatttcgattgtataaaattaagttatatttcttcaactatgtcatagtttatcatagttatacgtttcttctctcatttctgcttaaatcctaagaagaatgactacacaaagaaaacttggccaaatttttctcattttttaaataaaaataataataaaagaaaaagaggaaattcactgggctaatgtgatatacatatatatactctctgctacaaggagaatgaaggaaaattctaaattctttgctttttttctttccccgcattaatatttgatacaggaataatttaccgagacttgaagcctgaaaacatcttaatgcaaaaggatgggcatattgtactagcagattttgatttatcatttgtgacatcctgtaaaccccaggtacgtgcattactcccgtagtttctattttcttcagtcttgagaggctcctgctataactgttcttactttttaacatatctaatgtgtgtcacaggtgattaaacatgcacaacctaatagaaggagatctaggagtcaaccacctccaatatttgttgcagaaccagttagtcaatcaaattctttcgttggaacagaagagtacattgctcctgtatggtgattcgtcgatttatgttttgatattttggtatttgtttcccgttgaccaaattgattagcagttagtaccgaagcatgttgatatgttatgatgttggaatcacattgtcagaccttatattattatgaccataactttggatgaatgtactgtttgtgatttcttaaagattgagtgttgaaaattttgaaatgagtatctattgtgagatattaaataacataattgtatgtagttcaatattctgtgggtaaagtgtaaacttacatctgcttcatttcaggaaattattacgggagcaggacacagtagtgccattgactggtgggctcttggtaagtgtgtaataccatttcggtttgtgtttgtgtgtatatatttactatgtaatcgtctatctatccttttatctgtctatgcatcccgaccctttcaccaagtctcctctgctgctactggattgttcttcatatagtcttctaaatgtttttctcttgaaaaagaaaatcactatgcatcctttgtaacattctgtaattcaggtattctgctgtatgaaatgctctacggtcggacccccttcaggggaaaaaatagacagaagacattcacaaacattttgcacaaagaccttactttccctagcagcgttcaggtacagtatgtttgtactgagctatatataaccttggtaaccaagtttttagtgtgcttaacgggtgttgtttagttagtcattctatataatttactggtatcacaaaatatattcgaattgagctaaaatttgacaagaacctttacaatgttagggagttaagaaactcttgaaaattggtcggtaaagcgcgatggaaataggcctgatcactttactcaatgttaggaagcattgattctaaatcattgttggactgtaaaagccaatttactgactagatttgtagtaacgagaaaatgttcaaatcttctgaactgataaagctctccttcctaattttaccaggttagtcttgcagccaggcagttgatcaatgcattgttacaaagagacccagcaacacgtttaggatcaaataccggctccaatgaaatcaaagaacatccttttttcaaaggaattaattggcctctcatccgctgcatggtaaatcataaatccttcttttttattatctattttctctgtagtcgagggtagatgtgttgttatcctcgtaaagaggacgagtacttgtgaacacttgtctccattcgttttgcagagcccgccaccattggagacacctattacattgattgaaaaagatctcaatgccaaggatgtaagttgggatgacgatggagtacttgacaatccaatggatttggaaatgttctaaaaggtggttatttgtaagatcagagtcttgtgcctttgctgctgtacatctccattcacactacatttttcattaggccgtggctaacgggtcaacggccatcacacacactctgcttgctctttcgggttccccgcaaatgaggtatctctcgtgtatgtataaatggaattttctcctttggaaagaagaaataaaagttacttgctttgtcttggatatgaggctagctaccctaaaattgaaagacagatgaatgaatggatactagcacgtacaggttttactgaggttatttgtaattttatgtaaagggaagagagtttgtattataataagaagaattaactagagatgttgctctttgatagccagtgtattttttaacttattgtcattcgtgaataaattacttctcggcgatattatgtttagagcatcgttataaggtattagtggtgtccgacactatgttttgattgatgcaattgagtagtagattttatttattctattttaatttagaatgtttaatttgttgcaagtgtcacttggattctcttatttttttttaagcttttcacttcttttggcatcttatttgctactaaaatcaccatattcttattttaagaggaattataactattaactaataaattaataatcatctacggataataaatcatctaatatttttcaatgtaaattttatactgaattggtaatgcagtcattaaatttttattgagaatatggtaaaagaaaaatactatttaaatgaattaatacaatgttaaaaaacccttacaaagtaataaacttttaatattgaggagtactaattataattttctaataaatatgggtgtcttatttctttaaaatttttaaaaattttagttaatttacagtgtcaaaaataaacttaaaattttttgaacacgcttggaaatctgaaatatcataaattttattgttgatacttaaactatttagaactttcaaaaatttacaaggataatattgtatataatgaatttcaccgttaaaaaatctagc

SEQ ID NO: 15080 - DNA, 7446 bp, Cannabis sativa
cagaaatcagaaatgagagttttcctaataagaaaacaaaaacaagcagagaccataatagagaggctttgatgagaaaagctgaaataccacattaattatctcggaaggctgtttgaagtgaaattacgcaatggattctccctcaacagttgtgtttctgtcttaaggtgttggtcatttccctgtctaagttgaaaattcaaacccctgctgatgctgttgctctcaacatcttctttgggcatctctttttcacattcttcatctacaaaaacctcaatgcaattactacctacaacggttcctggtttttgagaaaccttgtacgctttccacttgctaggcttgtcattattctctttgtttctctctgctcgagatccaagactcttccaagaagaggctgcctccgtctttggtatatcaacagcaaaacttggatctttgtatatgttaacaagagaagaagaagaagaagaagaatgacccctacctgtggtccttattctgttttctccagtagagaggacagtgccaaagcttcggagtgacaagtttttctccgtagagtcaccgacattaggttttggtcttctcattgagcgcataagaaattctgtgtatgaatccttgagtgtttgtatcggttgagcagtcctcgatataccaagattaaatatatcattggccattttcatcttgttcttggattccatatgcctagcataggatatgtagtatgaagcatgtgtcttcccgatttcgtttgtgtcgagaaaactgtatatgatttcagcatcgctgcaattttgtgcatattccaaccacactttcagataccggagatcatccttgtagcgatctgaatgccaaaaggtacgaacacattgttcgtaaatcacaaccagtccagaactatctccaccagaaggaaatgcttcctgaacccacttgatgcactggagccatggatggagaggatcatccccagaataatcatcgattgcttcaatcagtttctttcgttggtgaaggagagagtccttgtgaaaattgctggtctgggacttgagagcctcgttcaaggtagcaatcttacgacctctcttcaaaggccttacgttctccttaaagagctcccactcattcccagtttcttgctttgagagaaggaactccgtctcgggatcgaacttctccattatcgctttgctttgattttacagacagaaatggtgagaaggggaagtcttggaatctgagtttgaattttcaaaaatgctaaggcgccacatatgatattggtggaccaataataatgctttagaattttcctaaaatgtacatattttcaaatagtgtcgtctgggatgcttgggggtattattgtctaaccctaaaattaaacggctctgatccgctttgtcgtcgtctaccccatcggacggtggtggagctacagatgaggacacagacgaggtggagagaacgcttcccccttgacggaaccagggctttttcttcctgggatttccgattccgagttcgtgaagcaaaaaggcccctgggcacctcttcttgttcctaacaactatgcggtcatctgttttccccattctttacagagcaaagttgggaaagtgtagcgttgggcaatcggtaattcatgggccactccgttccttgtttgcactcaatataggtatgtatgtatggatgctctctttgttaattgttaatatttctaatattcgaatctctggaactaaaaatacttctgtaattgacgtacagagaaaaagaccttgtaaatgttgacgaatcaaatgaatttcagttgattcactcattattatactgaaagaaagaaagaattggttagctgtattcatcaatatttgtttaaacctaatgtagttgggataacggtctttgagtttttgaaatggactttaatgttatttcttaagatcatattttgttggtttctttttttaacttgtaagtggtgtaatgtataaactgtattgactagtcatttgaagattgttacttgaaggttcttccaccgataagtaactctgtgatgaactagttgtattctttgcattcccactgcttggttggttcagccccttttttaatcctatggcagtatatttgtgtctgcttttctttagctcaaaataaagcattggaggaggttgacatgtttcttctgtaactttatttgttttatatttcccttgattaactccttattgtaatgaaccattgcattaataaggattctgtcttagtaccaggtaaacgatatgaaagaggtcaagagcatgttaatttttccacttttgcaacaactgatgatataaatctgggctcggggaagaagatgctggcaacaaacttagcctctttgttagaagagtgttcagaaatagacgaggggaaacccaaaagtcgaatggaactcaagaggttttttgaaaatcgggtaaagaagagggtgaaggagcagtatgtgaatggtaagtttcaggacctaatagaaaaagtaattgccaatccagaaactcttcaagatgcttacaattgtataaggctaaattcaaacgttgatataacaacgttagacaacaatactgcctcttttaaatccactggtgaagagctgttctgtgaaaaatttgacgtcaatgccaatactttttctatttcaacaaaaggggcaaagaaagaaatcttagtcctgcctaatcaaaaactgaaaatcattcaagaagccattagaatagttttggaagttgtatacagaccccacttttctaagatatcacatggttgccgtagtgggagggggcacttcactgctttgaagtttataagcaaacagatatgtgctcctgattggtggtttacagttctcatcaacaaaaaggtagacacttgtatccttgataaactaatatcagttatggaagagaagatagatgaccaaaggttattttcgattatccggaggatgtttgattctcgggttatcaatttggagtttgggggtttccctaaaggtcatggtcttccccaggagggagttttgtcacctatattgatgaacatataccttgacctttttgaccgtgaattttatagattgtcaatgaaatatgaagctctcaatgtagaattccaaagtaatcaagaatctcagtctcagttgcgcaattggtttagaagacacctgaaagccaatgatctcagcagttcagggcaagaaaatttcagctcaagtgttcattgttgtcggtttatggatgagatattttttgcagtttctggttccaaagatgttgctcacagtttcaagtatgagattctaaattacttgcaaaagtctttgcacttggatattgatgataaagcagagctgttaccatgtgcaggtccacgcggggttcgctttatgggaaccttgctcaaaagaacggtgagagaaactccagcaacaaaagctatccacaagttgaaagaaaaagttgagttatttgctttgcaaaataaagaagcttggaattctgggacagttcggatcgggaagaaatggctggcttatgggctgaagaaagtaaaagagtcagaaattaagcatttggctgatcctgaatctgttctcagccatatttctcattttcgcaaacctggtatggaaactgatcactggtataagcacttgctgaagatatggatgcaagatgttaaagcaaaagcagcagtgtgtgaggaaacactcctgtcaaagtatgttgcagaaccagccttacccaaggaactgaggaactccttctatgaatttcaaaggcgtgcggatgagtatgttttatccgagacagcttctactaaagctcttttgcaaaattctgactcgtctgtccaacccatcatcgatactcagataattgcacctattaatgccataaaaaaacgtcttgtacggtatggattggtgacaaacaaaggttaccctcttccatcttctcttctcattttacaagatgacatccaaattgtccattggttttcaggcattgttcgccgttggttgagatggtacagtgagtctgacaatttttctgatataaaactcttaatttctgatcaagttagaaaagcatgcattcggactttagcagtaaagtatcacatgccagaaagtgatattgaaaataagtttgatgtagaattgagcaggatcccttgctcccatgatattgagcaagagatggtgagcgagacattggatgttttcgaaaaggatgaagcattaatgtatggaatttcttatggtggtttgtgtttgctgtccttatcaagaaaggtgagtgaatctcgtccttgcaattgttttgttataggctgctttgatccagcacaaagtgtttatgctcttcatgtaatggaaaggcagaaatttccaggatggaaaacagggttctcaagctgtattcacccaagcttgaaaagtcgtaaaattgggttgtgtaagcaacacttgaaagatttatatcttggtgatatatcactccagtccattgattttggctcatggaaatgagtgaagatagcagcatattaataaagagcaaaatcaagactcaggaggcttaaatcaccaatgagctttgtgtactctgatgaagtcagatagttagaagctgtctactctgggactaaaatcagtgattgtgcagatggtatcttggaaaaatcaaaatgggagcccgatttgtttgttggaggacatttggtttgccttgatactggctttgatgatcaagttcatactcttgagttgactcgttttctagagatgctggtagtgtccaagtttgtgggttgctttacggtcctgtttggatgctcaggctcttccagacttctacagtttcttctcttctccaccactatgaccaccaacctcctctaatgtgatgaatattgctacaatcatcacctccggcttccactccaccgacccaattatgatctcctccttagaatgccgaatagcaatactcgatgaatactattttttactaacagttatacaattaatttatactatgtggtgaaaattttaattttgtttataaatgtgtcaattttaaagtttgtgtatttatatgacatttcttatgttggattattttctgcactatagttttgtactacttaacaccatatttacattatttatttgttgttgagggtatttttattatttatcttacttaattgtatttttttttcctattttttagatgaaaatgcatattatattaaatcaagagttcataatacaataagaatttaggggaggaggtatagcctccaaccaagtacaaatagattccattgaaaaagcatactttgtaaatgagcagtagtattagcagatctaaatacataaaaaaatttgcactctaggggagttgaatactaagagagaggtatttgttaacatacaataaaaatcagaaacaaaagcttgagaggattgcaatcctttaaccactaaaagagaatcggtctcaacatagtgaactagtaattgaagatctttaagccatttcagaccatacactaaagccatagcttccattacttcaggtctaaaggtacttgggaaaggcatcgacatagcagtgacaatatcaccactacaccaaaactagaggaattagtcatgttgttaactgcagcatcagtgttcaatttcagtctaccagaaggtggattcatccaaggtgaatctttgtagacaacacagagtggagaagaagaaatagaagattttgcattcgtgagctgtctgacagtttgaaattcatcaagataaaaaatagcaaagtataagagaatatcatgtatgtggttttggtttcttgctatgcttttctttatttctctcactctaaatactccaaaaggattgtggcaaattgctctaattttaagtgagtccatgttgcagaaacgtggagcagcagttcattaagattcattagcccagtaagatgattaccaagagaaaaggaaaaagcttttcaaacacgcttaggacgggtacaaaaaaacagagcatgttgaattgtttcattaccatggtggcacaaagaacacaaaggagaatcagctatgtgccttgtatgtaatgtaacagcaggcgtgaatggctcgtcaaagaaatattcgaacctttgatggaaatgtcagagcccaaaaaattttccaccattgttgagtttgcaatcgacttacactaggatgttgttcctgcaaatggatagccaaataataacctgatttgacagtataaattccattagattcatagtgacagatttgttgagcgtttgaggatgataatgtcaaagaaatactttgaatcttttgaacatccgaattaagaaatagggtttgcaagattggtaaattccattgacgtgatttagagattatgctagagactctcatattgagatcaacacctttgtaaattaatggtcgaaaatcggagatctcaggcaggcaaggatccgtgccacatatgattttatgaccatcaccaactttccatcgtaagcctttagctagcaactctttaccccaaataatctcctgccatgttaggacgaatatgaacctggtccaacatctaagaaagacatgtttttgaagtatcttggcttaagaattcgactcagtagcgatgtaggatttgagacgatacgccaagcttgtttggccaataaagcctgattgaagtgaacaaaactcttaaaacccaatccgccttcaactttagaatggcaaagtgcagaccaagttttccaattaatacctgagcccgaagagttccaatcccaccaaaaattgttcatcataacttcaatttggttgattagagatttagagagacggaagcagctcattgcatatgttggaatggattgagcaacaactctatgaagaatttccttatcaccaatcgaaaataattgctcttggtaggcagaaaatgattccaaaaattttcttttatctccctaaataaaactttttttatctcttcctgagtaagatggaagtcccaggtagtgttcatggcttggctggatgggcatgagaagtatttgttgcaaattagcttgaattgatggtagtgtaattggtgaaaaggacaatacagacttctccacattcaacttttgtcccaaagcacaacaataactatcaagagaattttttatggcagtggctaaacgtaaattagcacgacaaaggaccaaactgttaaaatcattaaaaatcattcataacaaaaacaaatacattaagtttaacaattgtgcattagagcataatactaaaaattgatgtaaa

SEQ ID NO: 15081 - DNA, 6711 bp, Cannabis sativa
tcgatttatgatatataatataatatgctgtcaagttagaggtaagattcaatttatgcaagattaattgatttgtgcttttattatatacatcttccagttctaattaatggtgtagtattacaactgtgttttgaattaatatcggtattagaataggatttgcataactacatttctaccataccaaactctttatagatcactctcattcactcaccattttattatttttaatttatttatatttttaccatattctatttatactaatctttagtggtaatttacctccctatggatacgacatagtccgtttactaacgtgactccagtgtaactaattgggcgacaacactagacaaaaaagaattaaatctgaccttcgttgtgattcttggctctttgagtcacaaagaacacgaagaacatgtttgagttcttgaaaaaaaacatgttttggcccgtgcaagtcttgtctgggcaaggaggttttgtttaagacttggctagccaaggaaggctatcagggggcctggtcggccaaggggatgtaccccataggctgcccggcctatgcctggaacaaggattcctagccagcgactaggttgggtcaaggggtttggccagccactaaggcctgaaaccctggccggccaaggccaaggctctaaggggccatccagttttcttccctctgttgctagggtctcatgatggccttggaggcatatacaactgtagccttatgcgtggttccccttgggaactctgtataaggctcgatagtgagtccattatagtcaattgtataacttaggacttactatatgtcttagtaagtgtacttaagacggtacttggtcgatgactgaccttgtacattatgatttacctggaaggtaccattaggtattgctgactagaatatgtttatagctttgtcaagttgctcaactccccttatctcttctatgcaggtagcactgggtgttggatatgggaggtgacgaccattattttgtaattatggttagaacgaagcagagttgccgtagagtgcctccatatgacccccatgtagctatggtggctacaaggggtcaagtaaggatcgtagaggaggctactcaaccacatgccgatgttgatccaaagattgatcagggggatgagagtctcaatgctaagtctgatcttgaggaggctgcactggttatcctgagtgcccttgctgtaagaaacattatcttagagagtgcaattggaagacatgctttcagtgtggcatggttgggcattttaagaaggactgccctcagacaaaaagataagaacaaaagcaagaggcaaagcctgtacctgcttaggtgtttaccattactctagctgatgctgcagccagcccttctgtggtaacatgtcagcttcttatcaacaactcctactttatcgtattgtttgactttggggctacacattcataagtggcgtcgagagtaattaatcaattgggtgccttctgatttcattgatagggtttggaaccctattgcctagcggagaattagttatctccaaaaggtagattaggtctatgccagttgttaacgcagatttttgttaactaaattaaagcctatttcgtgatgaaattgcacagaattaatagtaataaaagaaatagaaagaacacaaagctttttttacatggttttgcagttaaaattctgcatagtccacaagtctagcttattagattactgatacaaaactagggctttttctctaaaggatttttcatccctttttcggtgtatcctgctcctatttatagttagataggaggaaaattaattacaaattagaatgatatcctacaacaataatcccctaaaatgtgggatttgattacgtcccacgtaaaataaatgcggttattatttgaaaatcacacaactttgattagtctgcttttatcgggtcaatgcgtacatgtattaaatacgttacaaagtgtatcatgctaggatatctccctaggtacatagcaacaataaccctggcaacgagctggagctttttccatgtctttccgaggttgataatttaaatctcgtcgtctctgcgattgaagacataacgctccatctgacaatcgcagtgtgtggtgacaagatgaacttcaacagtcaacatcatttgaatgtcagcttttatatgagaaagagttgactcgacggggcagtgaacctcattgaaagatgtttggagctgattattgaaagtatcataagtatgccttcctataacgagatggatgcctcgctatttgttgttcaagttcattcaactgttatgcttagcttgcataatgtatattatacgctaagtgctctaaaagtcaccatatcgtatttacatctcttcatacatagcgaggttggtgcctcgctttgtattactgatgttgcctatatgatcatgtcttcatatacgaaatggttttctcgtcaatacgtgaaataatagtttgtgcatccttacctcacttaagactttacagtcagcaagttatggatatactctaccagttcaacatttaatgagttattccatttcaatatcttccaatataatacttattatattcgttgatttgtatcctcccagtttgacacttgttcttctctgaagtacctgccgaatttcgggtataacaccagttataattgagaatagggagttgagtgttaacctagtggagttggaattaacaaagtttgatattatacttggaatggattttctgtccaagtattcagccggcattgactgcaaacagaaaatagtaactttccaactagagggtgaagatccatttgtttatgttagggcaattcagggttctcgaatcccaattatttcaattttaaaggctaaagatttattacacagtggatgtgtaggattttttgcagttgtaattgactatcgcaaacctgaaatagttgggcctgaggatgttagggtagtaagagaatttcttcatatttttcccgaagagttaccggaattgtcgccgcagagagataaattttattattgacttggcacctggggtagagcttgtttcaaaggcaccatataggatggctccagctaaacttaaggagttaaaaatacaaccttaggggatgctagatctagggttttcccaacccagtgtatcgccctagggagctctagtgttgttcgtaaagaataaagatggatctctctagatgtctattgattaccaagaattgaataaattgacaataaaaaacatgtatccgttgtcaaaaatagatgaattttttgatcaacttcacggtaagacagtgttctttaagatttacttgcgtttaggttatcatcaactgagaatttgggaggaaaacatcccaaaaattacatttcagacctggtatggtcactatgaatttttagtgatgtcattcggattgacaaatgctccatcggcctttatggatctcattaataaagtgttcaaggattttctcagtagctgtgttattgtatttatcgatgacatccttgtatactctcaaacagaagcagagcacgagcaacatctctagatggttttacaatggcttagagatcataagttttatgcaaagttaaaaaagtgttaattctggttatcagaagtatccttcttagggtatatttttggaaaggatggaattatggtcgatctaagaaagaataagttagttaagtatttgccgaggtgaagaacagttacagaggttcaaagttttcttgggtttgtagggtattatcgacatttcatagagggtttttctaagatttcaatgccattgacaaaattgactaagaataaccaacggtttatatggtctgacaagtgcgaaatgagtttttaggagttgaagaaacagatgatcacaacaccagtgctagctttaccattcgaccaaaaaaaagtttgttgtttattattgtgatgtgtccatacaacagggtctgagatgtgttctgatgcaagctgacagagttatagcctatgtttcctgatagttgaaggattatgagtagcgttattcgacacatgatcaggaattagctgtgattgtgtttgccctgaagatatggcgacattatttgtatggagaaaagtgtgagatttatacagaccacaagagtctcaagtattccttcactgagaaggatttgaatatgaggcaaaggcggtggttagaactagttaaagactatgcttgtgagattttatatcatcccgagaaagccaatgtagtggtagacgctttgagcaaaaaaggtcccagataagtttttagtaccataatgatatcaactcagctggattcaaacatggttaaagctagaattgagttcatggttgggaaactacataccttgacactttaatcagacttgtaagaaagaatcagaaaagtacaattcgaagattcttagctagttaagattcgggaggaggttttggtaggtcggcctaaggacttctcaatctcaaataatggaatgctactttataaggctcaagtttgtgttccgaacagttatgagcttagaaaggaaatactcgatgaggctcataatacgccttattcattgcatccatgaaccaccaaatatgtaccaggacttgaagccctactattggtggtgtagaatgaaaaaaaacatagttgaatacatgtcagtgtaacttgtcaacagatcaaagcagaacatcagaaactgacagggttattacaaccattaacacttcctgagttgaagtgggaagatattacaatggacttcgtagttggtttacctagaaccatggaaatgtatgactcaatatgggatgagactagggaaaggaagtatttaggtcttgagttagttcaaaggaccaatgtggcaatagacaatattaatgctcgaattctcgctttgcaaaataggcagacaagttattctgatacaaagcacagagacattgcatttcaggcaagagagcatgtcttcctgtgagtttcaccgatgaaaggtataaggctctttggaaagaggggtaagttaagccctaggtttatagggccgttcgagatactcgagaaggttggtcaagtagcgtatcggctagccttaccaccagccttgtcatctgttcttaatgtattccatatttttatgctgaggaagtaggtatcagacccgactcatattttgagtacgaagccctagaactacaaccagatctgtcctatgagtaacaaccaattcaaatcctcgataggaaggaaaatgttcttcgaaataagaccattgttttggtcaatgtactctagaagaatagcaaggtggaggaagccaccagggaactagagtccaagacgaggacacaatacccagagttattcaggttagattttgaggacgaagtccttttaatgggagcataattgtaatgaccacgagattagattatggattagccctaccaacactattacgagatgagtacttagtgcatgtggtacaaaggtcgtacttttgtttagaacattcttactcatctgataagccttctgattaggtgtatgggcacctaaatacaagttagtaatatattgtaagttatatgcttttcttgctgagtctgttgactcacagatactgtttttttccgtaggtaaaggaaaggataaagctgaacaacagtgagttctgagcttggggatgattgtacatatcgagatgatgtgacctggagagttcggtcccgagataacttgggcttcattttgtagtcgttgagcgacatgtctgtaaaagctatttttaatgtaaagtttaaaacaatgggatccgagttttgggtataaatatatgtatatgtttataagagtttaaagttaaataaaaattttaatttatcacaatttttgagaaaatcctttgattatcaaaggtgtttactgtaatatgaaagtcaatgtagcgtgcctaagcattagggcaatagattacatgtcaaggtcataagaagatagctaggattaaagaccgtctggttgatcgcacaatctatgataaaaagtaataggaccaaacaatagtaatattcaaaaatggagggcctataggccaaaagtacgtacatgaaggccctgaggctaaaaataagtagtgttcaaaaagtaaaaggcctgtacagaacatgaaaatactgtctatactataaaatcataatgctaaaaactaataaattgaatctacatgtgtgtaggggcaggtggagctgaattaggaagctgcaagatctagatcgccaaagtgtggactaaccatagcctccataggctggctggccacctagtcaaggccctggccggccacctcctaagcgggtgggtggccatctcctcatcatagtgccccgaggatgacccctatggctggatagcagttcggtctgctctcaactggctttcgtacaatgctttcccttgagcaaatgtgctatccaaaaaggcctcatgttggattttatgccctaaataaaactatatttcaatgtaatctttatcttttaaatatcaataaagaaatagaagtattttcatcactttgtgtgtcatt

SEQ ID NO: 15082 - DNA, 6829 bp, Cannabis sativa
ctaggctacaaggaaccatttgttttgaacgggaaagagaataatgtgataaaatgttgcattaaatatatacagcaaaccctacaggaatgaaaaactttaagggaacgtttgatagggagaaatgaagattcaaaaataagaaagaaatgagaataagaataaaaatagagtggaataaaatttaaaaatacataaaaaaaaaaatatatataataatagtctttcttaacttttcaaaataaatagtccaactatcaaaatagtaaaaaaatcattccaattcttttaaatgtaataaaacaagaatgaaataaaaattaattcatttccattccatttcactttattacctctaaccaaatgtagcctaagtgactagacatactattccaaagatatttttccatcataatccatattgctaaaagttaccaaaaaaaatgtaatcattcttgaaaccgaaaattttgctcagtccaaactctctttcaattgtatgacaagaaaaaggaagtcgacaagttttgctcagtccaaattttgctcggagcacatactcataccagaacaaatattgtactttcatttcgttgtttaatttgtagaaagataaactattagctggcctgtatgacaagttttctaatcaacatgatgatttaatcattttctatacctgtaatttctcgaccactattggggaaatccaacaattgagcagtctttgcatcttctaatagtttgatcaggttcttatttccacacatccgaccttcatcgagtggggtatttccccacctgtgggatcaccaaacatgagaagtgaggataagagaacattattaattaacttagtatgtagctcctttattttgttacagaacctaaagaaacaaatacacagaaacaaggataggaaaacagtagaatcaacatataacaatatagatatgatcatatgcttcgttttggtagctatctaagctaatgaatgaatcaaacagacaagtaattggaaacctaatttattgataatagccatggaaaattagtcccaagtaaaaatctgtgaaatttcagccagattatttaaaatttagagtttctagccttcattagacttaactttctgaactccacaaataacacagccagttgtgatctaaaataaatgagtaaaattatctgtaaaatttttgacaatatcaaacatataaatttgtatgatgcaatacctgtccttggaaaaaacattagccccagcttctatcagcaactttgccatcaggtataatccttcagaggctgctacatgaagtgggcttcggtgatcataatctttagagtttggatcaactccatttgacaatacccttttaagaaagtctgcatccccccttgagacagctgtacacagaaaactaccggcattgtctatcatcaaagaggccccttcttgtacaagcaaagaagacactcgatcatgtccattcttgagggcttccagcaaaggggtatttccaaaattatctattggaagagacaaagtattattacagctgttaatatataagttttaagtgaacactgccaatatgacaaattatgataatcatgaaattacctatagcatttacattgactccttgctgaatgagaaaacgtgtaatatcttcatatcctcttgatgcagctagatgctggagaaaacgaaaggtttcttttgtaaaaaaatgagttatttctcaaactcacctctcttttttaaagaatttagagagtgtgatattaagtaataataaaaattagagaaagagaaagtgaaatgagaattatctaaaaactttagtagtaaaagggcctttccctattaagaaaaggaacaaataaatgtgtgacgggtccaatttccattagattctgaatttcctgttcagaaactgtacaacacatttcagctaagatgctttgcggaaagagataggcaactgtttgtcagattggcctccacatataaatccatacaaatcagatcaccacacattaatgaatataagaagttcacacttaccaagggtgaccttccatcataatctgttttattaagatcagccccagcccggataagactttttagctgatgcagatccccatggaatgcagagctattgaccttcaaggcaagttcagcttcttgttttccaatatgaaatgtaatgtccgattccaattgcttaactcggaggttagattctttcacctgtaatgtgttaaataaatacaaaagctatgagcaccaataaaataacttcatcattttcttatcatgaccacagaataaattaaaagagttgccattaccatggttacattacctccaaaaggttgttcaaaatttttcttccatcataaaagaatatgtcaagaatattggtgaatgattgtttgtccagacggagaagcctacacagttcgcaaacacgaacagtgtatggttgaggaatgttacaaagaatggaaatttccccaaacgagctgctaggttgcaatagcgagacagtttcttcagagccatcctcccctatgccaacctcctcctgtacaatatagtgttctttaaatcaaataacttcagtgcaactttcaagtattcacagataactaaatatatgagcaaatgtgaactattaaggtttccaaaaactatgaacaaattaatagtgtcacataatatatatgagtaagttgtatttgtcaataactgaatgatgaaaattttaaacagggcacaaaacagtgaacactccaaaataaacagagaaaggacaaaaagtgataaaagatgaaattttaaacgggacaggaaaagggcatgccacagaaaactgaccaaaaaaaaaaagaaaaatattatttcaatgattgttaagctatcagttaggaacattgaaggtacaatcttaccagtgagccatgacagacaaagtatagttgatctacaacatttccttgctccattataacttcccctgggagaaaaaattcctcatggaccttaacaacctaccacataaaaataagagcaaattattaaactccattgaacaaatatatttgtgaaatacaggaagctgaaaattgagtgcgtaaaatcttcattgttcccaagttcactccaacacaaatatatatgatgcataagtcacaagtcatgaagggttaaatttagtaatttaacatccatcaaaaaaaaaatagttatttaacaactcatgaaactcatattagttctacttccattgcattttgataatctactaccattaaaagtagtctcatttggatccaaagaaagtgtattggcatatcttggtcttacaagcaggacaaggaaactgaagtagaagttgttcttttacgtattagtgggagccaagacactgcgttaagcttcaactacattcatacaagcataagcttgagtaacattttaatggaagcttatgttatcttttattttcaagtttttgtccatggtacaaagtacaagatactaatgatccaaaattatgcaaattctgaggatatgaaatcgtttttgtcaattataaataaataaaatttgtttatattgtaactcagcacattgaatcatagaggaattgaatatttacaataagccaaaattgagattaaagtcacttctttaactcaaacaattataacttacaatctgattgatgaattcggaagaacatcccctaaataaagaaactttttccatgaatggcaaatacaaactctgggagatctgccaaaagaagggaaagaaccgtttagggagaaatgaaagcatatacatcatgaataaaaataacctttaacttgcattacagtctgtggtccaattattagctgctcataaagtttcttttcaatattgaagaaaatgaccaagcaacaaaagacaaaggtatgcatatactcttgaagaagatattgtgagtcattagatgtgatagacataaggcatcaagaaatatattaaagaacaataattgacagaaaagaggacaaaataggaaattagagaaagaaatagatacacatagggagagaaagaaagctaatttcttttaataaaagctggtatcaatcatcaagcccccatcatctggtaacattaaatgtgaaattctcatctattatctactttaccttggcccgaattgaaatgggaatgtcttgaagagcagaagcttctgtgtagctactctcatattgcaaacgcacatggcctttaatctgattacggatgtctttccccagtctgtttctgttcatatatttgatgagatccgtcattttgtctctaaatttttcagtctttgatccttttactatcaatgcagtcatgttaccgatcagatatgcacccaaaatcatgtcaaaagagacatatatcattataaatatcatttctctcatattgactgcatgtatgtctccataacctgtggcaaaaagagcaacagtgtgtattagtgaaaaatgaaaagaaaaataactaataattgcaaatttcttcccttcattataaaatagttgtttagtggattcatataagagaatataataacaataacatgcaactataaatcattgtcaaatcctacaaatagacatgggttcttaaagtattttcaagtgtgaagtagaaaacattacccactgtggccatagtgacaatggcaaaatataaagatgttatgtaacgcttccacaaatcaatatctctgaagcttgaataactatagtcacccaactttaaacttccaatccaagtgtagccctctttagaaggagggagggtggtagccaaatagtagaagatgcaagcagcagtatgtgtgcaatagagctccacagctataagttttataattctggtgacaatgtaattaatacgtatatccttctctaacttgtgaaagaagtcagtcactttacgcacccgacttagcctgatccatagaagataccttacagcctcatgtctcccacttttctactcagcacatatttcagataacaaaaaaaaaaaggaatggcctcaaaactcataatcaggaaagttgatgttatcaattgcacatgtcacattttcatgaacgtaaaatgctcaatatgagtctagtttccaagtaataacagcggacacacagtccaactataaatatatcaaacatttaaagcaagaattcattcatatctgctgtatgagaatctaccatcgctaagtttggctaatatttgcttatagatagaagtataatataagtaaagttgtatctttttttttctgtttggataggtatgtaaatatttcatctttcttttgcgttttttatttctttattttccttttgaatcaaaagtttttttctaaagtatttggatattagttaaaaaatatatttttatgaataaattataaattataaaagttattttaaattggtccccattttattttttggtaaattagttctcaaatttttatttttttggtaagattaaatagtattataattttaataatttttttaatgtatatatatttattgattatataaattttgtattaataatggtaaaattttatgaattgtataagttaaaaataaattttaaaatttaatttagttcgtaacttataaaataataataatattattattttgtttaattgtttttttttattttgacatattcaaaaaatatatatttatttaatttgataatatattaatataaaattatttaaaattaataaaaaaataaaatactatcatttaaaagtgaaaactttatatttttaagaaaataaaaatatagaaacagatttgtcaaaaataaaatttgagaaccaacttattaaaatttatgtagtttggagactaattgttagaaaataaaatttagagacaaagatatatagattagaaacgtacaaaaaactcttttattttttttatataaacacttctaaacgagcttttttctaattctaaaatctaaaacagagcaaaaagaagctcaatcaaaccgagtctaataatatctatagaaacaatttagtatgatgttgtgagtaccttatatatgatatcccacggcaaacaacaaagcaaatcaataacaaaacttgacttcaagtacctgaagaaaacattaaacaaaaacaaaacaaaacaaaattaggggagaagcaaaaaaaattgaaattgctttagggaatggaaagaagagtagacaaaccgtagagcaatgggggtgcgcttatagaccattctgtaagtatgactgtctctataggagacgaagaatagtacgacaatgtctacaaggaatgctatctgtcccacaatgtcgaggacaaagaggtcttcgtttagccccctgaaaaacccaaactccatgggtgtgaagaaggacgagtacactgcccacaacagtatgaatttcgtccatgctctgtaccacctgaaatttcaaacattaacggaaatatacgattcattaaggctatgtttagaggaagaagagaagagtataaaataaatattaaaagtattattttatcatttttaatataattatatattttattttcaatggtaaaaaagtcggtagttttttggtttttttctttacttctcttattagaaattgtgtatttaaagggagagggtctccttctcttcatcctctctcttccctttcctcttgacaaacaaggaatttatggagagaaatttacata

SEQ ID NO: 15083 - DNA, 4795 bp, Cannabis sativa
  modified_base (2278)..(2278): a, c, t, g, unknown or other
tacactttttatttttattattattttcctgctttttaatttttagttatttatttattcaaccttattatcgattctgccaaatagaatcaagaatttagttgattggtacttaactacagtccacgtgggagcgatctcacttatccgagtattacttgttaaaacgatacatatacttgcgtgttggatttatcacaacaagtttttggcgccgttgtcggggactgttttagttgatatcaatatagttgttttattttaatttggttttttttatttaattttgctgatgttttacttaatgtgtttgacctgcaaggtaaatctcaatgatataccttgtgaattttgtccaataacacaatgagcccttctattctgcttgggggagatttaaggagctcggtgagagatgttatcccaatttgaatttgtcaagtgggtatttttattttactctattcttctataatggacttgatgatgaaacaagaagttgggtggataatggagcagaggaaactggagagtctttgttaaggagaggccatgaagtcataaatttgttgaatgacatggcagattttgactacgattggcactgggatccatcacttccggattggactcaccaataccctccttattgtccaaactcaccccaaccaattgaagaagaggagaatatactatcacttccagaagaaattaaccacttgccaaacatggtaagatctctatgtgataatctaaaggtgcataattcagagtgttttaaagacaataactcaaagaaagaaagttatgagagttgtttgaatagtgtagaagcaccattagatgaatacgtagaagaggttgagcctggaattgaagaaaaagaatcccttgaagtggctgaaaatttgggtacattggatgcttgctcaacaaatgatgatctcaatttagtgaatgaagaaatgtccatcctcaatgatgaaattattgaagatcaaatcacagtcaaagatgtggctggtcatgaggaaactaaacaaccaattgagaggttatttgagaaaagcaagaaagatgtgtcattggtagtagaagaatcacttgtagttgttgatttgaggtcatcagcaccactatattatgaatcaccaatggatctttattttccattaatgttacattcgtcatactatatatcctatacgagctacttaaggtttctccccaagcccatcatccaaagccttgtgatgttagtgttgtttttaattcaaacttatcatatcaagcttgagggcaattacaacaactttcaagttgtctttcaaagaaaaaaaaattatatgtatcaagaaatatttaattttgtttaaattatatgtaaaaaaaattatatataagaatagatatacattagatttaataatttttgaaatatatgtgtaatatatgtattaaatatttaaattattattttgtttacattaaaattttaattgtatatataatttttaaaatgttttataaatatgtgtagattgcattagatcgattacttttgcatgtcagttaacatccaatctgcacaaatgcagattttgaattttccaatctaatcccatccacacaagtttacgaattgaattgaattggttcgtacaattgaattggattggcaattctttaaacatccctatcgttaattgtgcgagcaagaaaagacgatcttgtgctatactccggtgatctctttccttccgaggcacgcaaactcccatcgtgtcccagatcacattccgtgaatcgaaaggggaagcctactcatccatcagctcctctcgtagatcggtgcagttttacaaagcgtctaagcatagttcactttgcaactaaatataaattatacacactttaacttagtaactattaccaaattccgctaatttgctaatgacattgctctaattaatttattaattattttttttaattgaaaattaattaattagttgctattattttatcgtttgttttattaacgagtttaattcaattccgaagatttctctctcttcaattatcaaaagccaacctattctttcaatcttagcttgcaagttggaacatcttcttccgtattaattctcccatggcctatttcaaccattgacaaggaaagatcctaaaatctaagaagtaaaaataaagaaaataatgaaaaagtttttgtttccatctcaaatgaatatataattctctctctatatatatatanatatatatatatatatagcaaaaatacatcaatagaactcacaaaatgaggaactacagtccaaatgtaatgatcttcgtattttccttatcattactttgttattgttcaatggctttttcagttcatcagacccaaaaaagctttcttcaatgtctttcgatttattctccaacctctccactacccatatcttcagtcactttcttcccaaacgatccttcatacccatcagtactaaactcgtacataagaaaccttatattcatgcttcccacttccccaaaaccagagttcattgttgcaccgacacatgtttctcacattcaagcagctattgtttgctgcaaaatccatggcctccaggtccgaattcgaagcggtggccatgattacgacggcctttcttacgtctccaacgacccttttgtcataatcgatatgttcaatcttcgaaatataactgtaagtactgaagatgaaacggcttgggttgagtcaggggctacaattggggaactttactacagaatagcggaaaagagcaaaatccatggcttcccagctggggtttgtcccactgttggagttggaggccattttagtggaggtggctatggtaacttgatgagaaaacatggattaacagtcgataatataatcgatgctgttatagttgatgttaatggtagaattttaaacagagcagacatgggagaagatcttttctgggctattagaggtggaggtggagctagttttggagtgattgtttcatggaaaatcaagttggtttctgtgcctgaaaaagtaactgtatttagagttgtaaggaccttggaagaaggtgctacagacatggttctgcaatggcaagatgttgcagatcaattgctccatgaaatgttcattagagtggttttgatgccagtaaacaagaaaacccagaagacagttaaagccaaatttgtggccttatttcttggtaataaagaacaaattggtattttgatggagaaaaagtttcccaaattgggtctgaagccagaagactacatcgaaatgagttggattgaatcggttctcttttggtcaaattatccaattggaacttccatgaatgttttacttgagaggcaacctaagtcagagaagtttctcaagaaaaaatcagattatgttcaagagccaattcaaagagatgcccttgaagggctatggaaaaaaatgatagaattgaaaaaaccagcactaacgttcaatccttatggtgggaaaatgagtgaaatatctgagcttgaaactccatttcctcacagagcaggaaacaagtacaaaatccaatactcagtccaatggaaagaggaagatagtgagactttagatcaaaatattgatcggattagaaagctttatgaccatatgacaccttatgtgtcaaaatcaccaaggtgttcttatctgaattacagagatgttgatttaggaaccaatggagttggatataatgcaaattattcacaagctagtagatggggaaccaagtattttaaagggaatttcgataggttagtacaagttaagactgaggtagatccgggcaactttttcaagtatgaacaaagtattccaccgttagctgcttggacgggtaaaatagctcagtgattagtacttgtaaaaatcacacttgaacttcctggttgaattttttatgtatttataaaaatggaaattagtaccctaaaacaattacaaagaataagaatattagtaaaatcctttttttttttttaaattgaatgaatttttcattaaaaggtacaaagcacaagcatagtccagccgccacacttttgcaacattgtgaactaagcggttcacataattattacaaaagagaaatttaggcagcgtttgattagaggtaaaggtaatagaataaaaatgaaacaattttcattttattcttttgtttggttgcatggcatgttaactgttaaacaatgagaattatagtaagggagtcatcccctatatttgtttatttaatttataagattttaaaagaaataaaaacttgattgaataagagagaagagaaaggcagaatttccccaccaattttctaaggaatgtcatatttaaaagtaatggcttttatttatttttattttattttgtaaaattaaatttataatgacaattttatctagtataggagttagattataccaaacttaaaagtccaaggagtttggtcgcaaattatccaaatttttataagggatattagcagcaaaactacatgaactatatgatttgtgacatttaacctcataaactagtttttttgatgggaaaacctaccaaactcacattatgttttgcttatacacttccatccaaaaatattcgttaagtgtcaagcatgacatgccacaatgtatataggtacacacctagcatggtttagtagtgcacataatattaattatttaaatataaaaataataa

SEQ ID NO: 15084 - DNA, 7601 bp, Cannabis sativa
  modified_base (34)..(59): a, c, t, g, unknown or other
  modified_base (6051)..(6063): a, c, t, g, unknown or other
  modified_base (6120)..(6120): a, c, t, g, unknown or other
tttttgaaaatatttccgtgtgacagtatttttnnnnnnnnnnnnnnnnnnnnnnnnnnttttgtaaatttccctataaaaaaatagactaaaaaaatttatagagtgccgaaacaaataagaatagatttgtataacacttttagaaatatgcattgtaaaatttcccaaaaaacaattcttacttttataaatacaataatataaatatatataaatattaattaaattatatataatatatatgcagtatctacagacaaaacttcaaaatgttgtgtgaaatgcagtctctttgaaccaatattcacggcatatatgaaaatatataccatctccttgcacatgctcttagtctatatatgaaggaatcttctggtagacctcttatttaaattggtatttaagaaaactttttagcttaattacttttataattatgatcacttataaatttttaaaaatattcaaatattttacaataccgaaaataaggttcaaatattttattatacgaatgattatttttttttaaacaacgcacacaatcatgaagaaaaacaaattggagtaaaaattaaactaatataaattctaccaaaacaccatttaaaaaaaatgtactacagattttttcaatgcaattaactcgatataaaaatacatataactgggccgaaagtctagttagtgtgaaatggcttggagtaataagtgaacatcaataattagttccattgaaattaaacatgactcttttcatttcattttcttacatacggtagatattaataatcctaactcaagtgcccaattttaagttaacgatcattatttatccctgattttttttttttgaaatatgatgatgatgatgaggagagggtgatgtcaaaaaaacaccatataattatgtactcataatcaaaatcaagcgccactaactagctatatacatgctctgtgatgtgcttctatatatgcttttggattcaaccgacctattgtggtgggcaactgaaaaatttataccacttaaatcaacaatatatataattataattctattacttcaatggaatgacttgctaataattcatttccaaaatggcaaaatcacatgattaatgcccatgtcggccatttacagcctcgtcaacagtactacaccacatccgtcttatattaaaatttaatgggaagaatccatgctcaacagattactatgtaatgttatatatatatacatatgtactgctgaacatcatatagaaacttatttcatgagtaaaaaaatggctacacttttattgcctaataactatgaagtttgcctttgttgttacaccttgatagttttagtgccttctttatatctaataaacagatttgtgttaaagaaaataaaggatcgtaattatcaacatcaatccacatgtgacattcctcctggctctcgaggtctaccatttataggagaaactttacacttcatggctgccatcaatagtaccaaaggattctatgatttcgttagagttcgcagcttgaggtaggtgcacaacatatttatatacatatatacaattatttctttccttttaacaatataatacaattagtagtacttaattatttcaggtatgggaattgttttagaaccaacatatttggggaaacgcatgtgtttgtttcgagcactgagtcagcgaaagcgattctgaagaacgagtcagggaagtacagtaaaagatacataaggtcggtaggtgagttggttggaaatgaaagccttctatgcgcttcacaccaacaacacaagctgatacgcagtcgtttaaccaaatatttgttatcgactgggtctttgtctatgttccttaaacagtttgatgagttagttattcaaaaccttacagcctgggagcatagagcaaccactgttgttctacacgaagcacttaaggtactataaatataccgtattattattattattattacaaattgttgggatttctcgactcaatccctacaccaactcatcatacacattagatcatcaatgtccaaattgaccttagcattcaatcaaacaattcacaatcacaatgatgacatggctgattgaatacatttcacattcaaattctaatcattggacacaaactcaatagatcaattttcgaggattcaatttgcacacaaaaacagtagaattagcaattcaaatatagacaatcataacaaacattaaagaaagataatgcaagaaaagaagagaacaaacacaagttttttccgaggttcaccctaaataataggattgtatctccgttgagctcatcatagaactggtttgcccttgaactataatcaatctcagattacaacaatgttgtggaaattccaagtcatacactgaccaataatttcaagatcactctcttcctctctcaaatatctttcttttacaaattgtttcaatcttttctctcaactgatctcttctattttctcacttgagaatacttctctctctagctctcttggagctcaatcttgcccaggctgcgatctgtcaatttgaaaggagaggctctgctatatatagtagtcttggtagttgagaggtatgttatgttcgttataacagtgtaagtgagatgagtctagtaatgtccacgtgtactgtaagcttgtaaggggatttaatttcaacaactttcacctaaattcccttagaaacttattgtcatagtgaaggtccattcccatgggtcctaactctttcggcaatgatctatcctccattgcttattcctaacaacttcaagcaatgcttgaactttattaggttcaaaatctttgtccttccatcagcatgattctcatctgttggcaccttctagatgtgaatctcttcttgtgtcaccttgtcctgtatgaaatggcactttatttcaacatacttggtcctatcatggaacacatgatttttacacaggtgtatacaactttggctatccgagcagactgtaggagtttgatttgatagcttcagttctgtcgtcatacccttgatctaagttccttcttttatggcctcagtcactgcaacaattctaactcagttgttgataaagcaacaatgggttgtaattgaaccatccaactagcacaattgtcacctagctataagaaaatagtatgctgaagtagacattttgtgatctctatcactagcaaagtcagcatcactatatccttccataattatcttgttgtttctcttactgaacaccaattccacatcttgtgttcttaacaaatatataagcacccatttgacaaccttccaatgttctttccctggatgtacttgctcaatacactcatggcgtatgcaatatctgccatgagttacatcaatgaacccactgcgttagtatagggaacatccttcgttttttccttctctgcttgattcttggggcactgatccttacttcgatgatactgtttagtcataggttgtttagttatctttgcttctgtcatagaaaattttccaatgatcttttaaggtatctagtttgtggcaacatcagttctcctttgtctccgttccttctgatattaattccaagtatcttgactgcaataccaaggtccttcatctcaaattctaatttgagttatcctttcattaattctatcttagacctttctttgtgtatgataagcatgacatctatatatagcaagaggtagatgacttcactaatatcagtaccttttaaatagagacaataatcataatagcttctagtcaatcccttcttttttatgaatgcgtcaaatttcttgttccattgtctaggagattgttttagtccatacaaggacttgacaagcttgcacaccatctctagattctcttttgaatcaaagtattttggttgttccatatagatttcttcttctaattctccataaaagaagggtgtggtcacatccatttgatcaacttctagatcgaactgagttacaagtgttaacattatcttgattgttttgtacttaacaacaagtgagaaaatctcagtaaaatcaatccttttgtgtgaaccccttgacaaccaatctagccatatatctcataggctcattgttgtcccttccttctttgtgctcgaacaaccatttacatgatactacattcaccctttcaggccttaacactagtatctacgtttttttcttcaacaatgatctcatctcttcattcatggcatgcaaccatttcttgaaatcacttcttgccaatgcttcttcatgagattctggttctgctttgtctaagccaacaatgcatgtaaaagcataaactattatctcttcccaagcactgtagttgaacttttggtttggctttgcagctcttgtggccctatctcttgtgagttgataatctgtaaggtcttcagagttcttgtatgtgtcttcatttgattccacttgactggtgccatcatttatcacttcagtttctacctgatcttgttcttcctaagtttgttcctcttgagctggttccactaaaacttggttgggtacttgtggttctgaaccatgatctagtctggtttaaaaattcattgtgttacctgcagggttagttttaaaactggaacctgcactagaattggagtttgtaacataaggaaatatatcccttttaaatatcacatctctactaagcatagttttcaaaccatatttctcccttacccataacttgtagcctttggttaccttcggatatcctaggaacacgcactaaaataatgaagtagatataatcacttagaaaaacataaaagaaccacacacctcaaaattcttttgccagtgaactagttaaatatatttataagagaatcaaaatcaaaaaatcaagaaaacaaccatagagaaagaagaagaaacatatttatatcctccatcttccacagccacagacagaaccaccatagcaacacgagaacatttagaaaacaaccattaattccagcaagatagagcaagaatagagaaatcgacgtcaaataaataaatcatggtaaaataactgtaaaacaacactaaaataaataaaaaagaaaagaaaaaaagattaaaaaaaaaaactaactatcttttgtacaaccttaacactagatgctaaagtggctatatttgtaaggccaattttaaaaaattagaataaaaaaattatactcttatctttctaaaaaaacgactgaaaaattaaaaaattaaagaaaaaatgaaaaagaagatgaagaagaacaactaaacaagaaataaaattgggtaaaaaaaaaaaaaaacaaagaagaagatgaacaagagagagttttcaaaaacaatgaaaaataaataatgtgtgtttgattatctattaattcaagataaatatttatataaacatatatatttttttgaggatgaggaaatcacatgggccgttgtctaaatttcaataaaataaaaaacacaaataaaaatatgtattaaaaagtgttttaacttgtcatcataaattttaaatataaaaaaatgtcaacaaatgacatgcccaaccaaatcaacaaatcagaataaacacacattttttttttcttgaaacggaggaaatcacgtgggctcttgtctaatttttttttttctaaaatagatggaaaacacaaataggaacatgtattagaaggtatttcaatttttcattatcaattttaagtaaaaaaatgtaaaaaaaaataaaaaaataaaggaaaaccagtcacaaaactcgcatgctcaatcaaattaacactttctacaaacttaaaatataatacaattggttagaataaacccgaactaatttttttttatctatacagtatattaatagggcagtaaaaacgtaaatttatgcgaaatacagggtgtaaatttcccattatatatgagaaatttacatagtatactaacttttgtcannnnnnnnnnnnnatactgtcaggcggtattttttacctttttactgtgttttttttataagtttcatantgcagtatactgtgttaagttctactggtgttttttagttgttttactgttgttttgagttgttctgctttgtgttttactagtgttttataaaaagacagtattattgaaaagattaccgtgtgacagtatttatgtaaaaattaatccaaattcaaatatttttgtaaatttcccttatatattggtattcattacatcatttttggacgtatggtggtgattggtataataaaggcccaaagttgggccttgcttccataaaagtctggccatactaaacaaactggatcaaagtaaaatgtgctggactagtccaaatcaattaaaagtcttactagagctaatgaatagagtgtatgtgggcatgcgatatgtggtgcagatagctagtgaagcgatgtgcaaaatgttaatgagcatagacaatgggcctaaactagagcttttgaggaaggaagtcattcatgtttgcgaagctatgcttgcattcccactcagatttccaggcacccgattttatatgggtcttcaggtactacttctgttctaatacccaatttttctttatttattttgtaatgtaagctaatttggtgggttatggttaaactcaaggcaagaaaaaggataatgagcatgattgagaaggaaattagtgaaaggagaagtggtttgggagtgtgccgtgaagattttcttgaacatttgttgggagatgatgaccataaagggtgtcatgatgatgctacaaatacaaatagctcaacattatcagatgcagagattcaagacaacatcctaaccatgatcattgcaggtttttttttattattattattattgaagcatacccagcgacttgttatgatcattgtagttactacacatacaatatttagagatattgtacatgtacaaaattattatatgatgtaggtcaagatacaacggctagtgctatcacatggatggtcaaatacttggatgagaaccaagaggtccttcacaaactaagggtatatttacattattactattttaaaaggaacacttattaattattttgttggataaaaataaagttacaattttaattttcttgataataaaattaatgtgactacaattttattacactctgaaaacagaatgaacaatttcaagtggctagcaaaacaccaaccgggtcgtttctcacattggaagatctaaacgacatgccgtatgcatctaaggtcacttttcttccccctttcttagtttcttgacatattttactttttatttttatctaaagcaattaaaaaagttttgaattgagtgattatggaacaggttgtgagaagagagatgcaataggagaaattgtgctatattttaatgttaaacttcacatagattatgaactatctaaatatacattaaacatcattgttcataatcattaaaaccaaaatcaatactttatttagagcatc

SEQ ID NO: 15085 - DNA, 2731 bp, Cannabis sativa
aggcggtgtgggattgcacagcttacccggtgtttccccttacggatcacgggactactgattgtcacatatatataatttagaacgcacttgaatcaataataaaacaaactgtaacacttgcactagttctataattatttttagtgaaggttattggattatgttctcttttatcattatgaaatttgttttcaaataaacaagttaattataacatgcatatatagataaacaatttaatctaaatttaagtatctgtttttctctctctttttttttttaaaaaaaagctgttgaagaatgaaaacaagagtgattgagagatgttgtagggatgatcagtctgggtgtctgtgagtttgtaatctgaaattggtttgagctctttgaagggtgtaagagtgtgcactgtgtgtcttgacaatatctggtttgtgtttttagttgactacttgtttcataatctcaaaataatattacttaattgaaagttggtcattaattattcttagtcagacatttaatttggatgaaattaagttggtccctgagctacaattcttttaagaaaccaatcattcatggccatggccacttccctcccttcgctttcgagtcataacataaaggaattgactgagctagttttgctccaaacctgcaatttcttcaagtcaattattgatcttcaatatggaagaaataacaaaagtagtttttgatgcaagagttttgaagtactacaggtgagatacttatgcctgtcttgacatataatattccttccatgtaatattatattgttttgattaataagtctgcattttctgatttaatgtttcaacttgcaagtaatttttattgcagtagtatggctattcattcactttaatgaagctaataagaagaaattcctacataatgtttgtttagtacttataattaataatattaataataattggctgtgttgtcataggttggatggatatggcaggctcaaccttattagttcctttgtcattttggcccatttgcatatcagtttcagttatttctgttatccatttcttcatattattgattatatatgaaataatagacattggactaattaatgtcattcccatctttttgttttgttgtagaaatattaaatgtatttagaagtgtatgctaagcctagccttcctcatggcacactactgtttattcttgtggtaacttggaagtaatgaattgctctgcaatggaagagattataagattggagaaactaggagatggtccaaagaaatatttacaaccttttcttaaacttgaatctctaagattggacaatttactgtaaataagagttgaagagttgaattttctctgatgtattgttgtagtaaggaatttgtgttgcaatgtggttgtttttacttggtttgttgtttgggtggcggggtaataaaagttaaatatgtaattttgctacccaagattctaatttacataatttttgtacaaattcaagtagtaatgtgtgattttgttgtaccatgtgttaaaataacccaccttcttttcaaacgtgttatgtttttaagtaatctttgacatgtttataaattgattcaattctcttgcttttcttgttttttttttcattattttgagttggttcaatggcgtctgataaaggcccaatatatgttcgatagtaggttctaaaatttaaatttttgagattaatggagaaggtctgatagtggtctgatgtagggtcgatggtggtccgatgtttagtaacagatcggtaggctttttgtgttcgaagggagtccaatatagattcgatggcggtctgatgcttacaaactgattggtagacgtattccgtgtccgatggggggtcctacactgttcgaatgggggtccaatgtggtctggatgtactaactccgaattaataatatacgagaattatagtggttcagccagagttcggtctgcttagtccacttttgaagagaatttatgattagtcttattcatgttagatcactcctttataagcaagtgatcagttaattacataactaatctggcaggatcgttacaacaattaaggaatttatattaaaaacttttttttttttcaaaaatacggactgaacaaaatagtctccgtcttcctctttctctttcgtttccagttgcactagatctcctccattttcgttcttaaccaaggcacgatttcaggtccaaaaaaatcgtacaagttgtataatgacaagggcgcaatgtagatctcaacaacaaaacgatctaatcccgacaaatctaaaattaaaaggtaaaatcaggaaaaaaaattgagattacaacctctgttaattcaaaattacaaaataacaactcaaaactaataattcaaattctattatgcagagaatttgataacacaaccagaagaggattcaaagcttacccaaaaacaaattagaagaatctgacccaaaaaaattacaacataacaagactttaaatatattttttttcatagctaggttgttatttaattgatgttgtcgaagtagattgaagtaaattcatactgaaaattggttgatctgaataaatttgtgcaaatacttcacatttgacaaaatagtgatacatttaaggcatttgctaattactgtgactgaatagttgtttatacattattctcatg

SEQ ID NO: 15086 - DNA, 6894 bp, Cannabis sativa
ctgaacgggagccatttcttccccccaatcgaaggaaataataggccgggaaatagaggtttggtgatatcgcaccagactttgaatgtgaagaaatccttggttacaattcgtggaatatccgccatctgaacgtcaataacctcccctgctagacttgccaaacgatttagattactttgagttattgaacgggatggtagatgataaacccgcccacaaattgggaatcacagaagttctttttcccaatcttggggcaaggatgtcatacgttcaagaatcaaagtcccataattgaggaaccaaggattttttcccaaaatcctgttcagatcttgtgccgatttgaatgtaaataccaagaaacttgattgtttattgctgtgtttaatttccacaccccatttgttatcagcaattccccagacccgacctaaaatcgtcttcagaagaggacgactcatcggtttgttggagcagaatcgacccttcgcacagtgacctccggcaacgtctcccccagcttcgttgatttcccaaccatcttcatccaacacggtaaggtttgaatctttggcaagaagatcatccatggtgatatcaggcttttgcagcatttcgactttagaaggctcttctccaagagagagcatttgttaattatattattttattaaagaagatctttttcatttcttttttattttccctctttttgctaaactattattttttattttggtaattttaaagaactaataatattattcctttgtaaattgaaattatttttatcttttaaaataacttctgaaagattttgtttattagaaaaaagaaaaaactagaatacatcttttaaataaaattttattacatgtgttttaaataaattatttgattaaaataagtataggggggtgcataaaacttttcacaaaataaagagtgtaaagttaatttttcacaacacagttacaaaacggataattgtgcaaaattgagggtaaacaattggataaaaaaaaaagttaagagaggagtatccatgttgtcaagtgtcaaccatggtcttcttaagcggcaccttgggattcaaatgccctcaagctcttgccttctggagcaaaatccacatggatttcaagcccaggaccaggtgcctacacaatcccttttcaaggtctcctccgagggaacttcttccaaccgaagatggttccagtattacattgcaggaatggcagggttggggtaccacctctcccttacccaccattgttaccagaatcgctgacgaattgaaggatttagagaaagatagtgatgaaaagatgacctttggtggtaaaggtggcaaaatcaaggtaagaaattcaatggctatttagcttagcggaaatttctctttttcttaatttgcttcatttgtaatgttcggacaatggttaggatttagttaactggaaattttgtgatgggtgatagaaagatgaggcttgtaaggatcaagatcatatatatatatatttatataatatagattatgcatcctgttatgtattttaagactattgttattgtagtattaagatgctggagatatgctgtttttcgggaagatatttagtgaactgaacgttcagaagtgaattgcaattagtttcaaaacatttgaagtcaggcacatgacaaatgtgtcttatacactaaatttcattttcagaatttagtggaggcatgtgttatggatattgagtaagggttgattgagatagtacgttactttttaacaacatatcaatacttacttaccagcacgttaagaagtatgattcttttaaaatgaaaaaaataaaataatcatgccttgtttggacatggattttaagaggaaaacaaaaatgaattacattccattttctcatgtttggatttaatcaaaaaattaagaattctatgtttaaaaattaaaatttgtttgtagtatagtttcattcagttaagaataattgttatacacacacacaaaaagaaaaaaaataagatttgtctggcgcttgtacaactagttttcgcacctgcattatgataacaagctctttcttttatttgtgttttgtttcttgcgtgccatgacttagtctttgttcaaatttttttaactgagtattggacaaatattttcattacatttggttgtgagtttctataacagtagtttctttggggtgagtttcagggtgattttaaaaagcaagaggataagaaacacagggagacatatagaggtctaggtgattctgaacaaaagcttcaattcttttcagctcgacagatagcatgtcgcttggttggaagtagaggttacctttgtcaaaaggtaatatgttcgtgtttggtatttcaatattttttgggtgctccttctctctgtgtcacatctctctctgggacttgtggtatggattttacgtgaaagggtgggaaatgcaacatggtctaacgattttttcccttgttgtgctgttttacatcacttctctcactgtgcagtgttggctacctcatgaagattgtatgtgttcaaaggtcacaccttgtaaactttggcatggaattaggttctggctgtatatgcatccaaaggttcagttcaggagtttcagttattcatgagtcagtgtaattcatattacatgttttgtaatgtattcacttaacagatttcatttgcaggatttcttgcgacaaaacaatactggtaaattgttatggcaattgtttggtgttgaggcagcaactttgtgcctttttggcattgctgaacaagaggagatcatgtggaatgcattcaagtgtgcaggtctttttaatgtttttggtgcttattcctagattttcaaacttgtaactcttattgtgtttatgaaggtgtatagttacataagaatcatcacatcacatctaattgctatataccttattgccttattggaaaatatcttttctatgtgcataaatgttaaaatttaaagagcttaaacttcaaattgtacaatactcacattacaatgacatggatcttctaagattttggttgggcataaaatttgatgatacacatagttggcatgattttgtttttgaataaacatagttggcatgatttaagtaccatgaaatcaataattccaataatctgcattctgcaaaatggtatcctattagtgattgcatgttcactttagttactccaatattcaccatgaaagtcattctcgaatacccccagcagaaaaagaacagattattgaacaaaatggaatatgtgcatctgtatgcatattattagacagttttcaaggaaaggcacagaagggtgggtcctaacattaactgtgtgttgattataattaccgcaatttgcatctcggttgattgaatctttttgctgtggaattgaaaattgagatagtagtgttgtttgctagctttacaatactttaaactttagagttactaaatgtaagcacacatttcgttcttcaatataggaaaagacaaggtttggtgcctctatccaaacaagagtggagtggtaaaatcagttcaagaagcatttgatcaaggattgtcaactgacctgggatttgcagaaactacggtgaatgttaatgtttctttagcataattcctagtgctggactggttggtttattgggttcatttcaatttggtattatcacacatttgagtgtggaacccatttgtctagcttgtaaattggtgcatcactatgtcgtctaatcatttatatgcatttcctgaagatagtacgattggctgaaaaaagctgtattctactatgaagtttaggtcgatatagctataaattttcagacatacatattgtgcaatattagtcaagagcgtcaattatagtcttcactatggccttcatctattatgatttaatttcactctaatatacttcatattgtccatttgtttcgaagtatggcctgctcacgttatcttcaacattaattgtgaactacttaccctttttcttggtgtaatgaaaggtttttcattgtactaataaataatttaaatgttgatttcaatattctgctgcacagacaaatggacatgatattttgaattttgttctgattgatggtacatggagtaattctgctgcaatggtcagaaggttgaaggtattatcactagacatttattttctcatgtcctgttgcttactgttgcacattgttattattgttcatgccataatcctagtttatgctgcaaagaactgaatggaaaataattggattaatagaagaatttgtttaactcttctgaccatccaattctccctaaacgggcgcattttaaagcctgctgaaaagtggatgggttgacaagagaagagaatgagttgggtgcaagttgccctttcctccagcggtcggtttacctacctgcttgcttgcttctcactctcgactaaaaaacctacttttttggctccatatgtttcagcttaaatactaaatttgatattctgtttgcaaaatttcaatgataaatctaattatttttaggtaaaatggtcttacttatttattttatttttgaccaaaataaggactctgaataattttggtttgtttattattcaagtttttgagaacaaatgtttgttatcctctaagtagggttcaactaaatcttagtactcgagcattgttgtctgcccgatgttggtgcttagcaaatgtggaatttaatattctacgataaatcaaggagtacaaatatgtggttagtctttattgcatctaggatcaatcagaacacccttacaaaaaggcacacaagaatgaacttgtttcacccaagggggtagcacaaatggtcaggcttgtggtttgctcccacaatgtctaaggttggagtctgtagtttataagtctccaaatatagtaggttaggtgggagtctagtttcaaaaaccaaaagaatgaacttgtttgactttgatgagggtgtcttgaatattgatgaacttgtttttagtatatgctttactggtttcaaaattaactctacagaggctaataagttagcctattgtttagccaatcatgctagtgctattttggaatggggatctttcctcttgttgctcgatatgtccttgtgatggacttgcctttcactttgtgtggtatttgtttgtgttaaagttgcatttgcctttataaatatcttatcttgagcgtgcaggatcaagctaagttagcttggggagaggaagacatttgctttatatccttggccgctggtgcctctgctatgcataaacttcggtgagaactgatacattattataatttccacctccaattatcattcatgtttaagccgatctttcaacccagtgtggaatgtttgattgcagaccccaaccatcatgggatcgtacctgtacagcagctgcagctgttggccttctctatgagttacaacttcttccaaagttctgctcaattggcttggataaacaagccgaagctatagaggatactttagctgttctcttagacgctctcacagctcgacgcctccggatgggtaggtccataactcgtaaaatgaggcaccatagtgatatatgttaatcgcgttccaacaacagtttcatgcagaccaagtgaaatgaggataggctttatgaaattccaaggtgatttttctgaatattcacgtgaagtctgtgttagctcacatttcttgggtcttaaacgtctgctgaggctaggatttgcaacactttgttactgctttttcgagtagatttattatcgaatgagtggaacaacagatttcagttacattgttgatgattttggtccatatttcaacttttttttttcttattatgtttttcctcattactcatcataccaaccttgcaaaatgttttgttctcttttaggttgacatatagttggctacttgggacactaaggatggtatcaacaccaaatactggtaaaaacaaagcaaggaccaatactaactaccgatatttgtaagcaatataggctcctcctaagcctttaattttgattatacagttaattttttgaatacctatttggtttatgaactttttagattattttattagaatttgtttagatttaagatatatttatagacttccttaccaagaacaaggaaattattgaaaatgtacaatttcaaactaatttacagcatgtaaagtattgaaatggcattaagcaacacaaacaataaggtgaaggaattaagcaaaacaaacaataaagtgaaggaattaagcaaaacaaaacaacaataaggtgaagaccttattgtttgttttgcttaacaccatttcaatacttttatgtaaaatcaaatccctacttaatagtgatgcatcttttgccttttctatatagaccattaatattattatataaaagggtgagtatttcgtttttatttcctttcttcctagcaatgaatatactttgttgataataatcagagtaagatatcatcagagcgaaagaaagaatttattttcactataaaagtttttcatccactctgagaaattgccaaattggacaacaaacttgtaatctaactaatcgaatataatatatgcatcttttgaaggagagactacagttagtaaattatattaaacttgtaaaggaaaatcaagaataagagaccaaaaggttgtttggctttacagtttaaaaattattttcttgttttttaaaattgaaaacagtttttaaaaactaataagggttgtttggcaaaattttttaa

SEQ ID NO: 15087 - DNA, 5317 bp, Cannabis sativa
  modified_base (4324)..(4326): a, c, t, g, unknown or other
  modified_base (5219)..(5237): a, c, t, g, unknown or other
tttttttttttttttgaaacggttaaatggatctttctaaaaaatataaaaatattaatctcttgtttaaaaagattatttttctttttaaaagaatatagtttaatcatttaatcgtttttcattacatttatacaaatataaatttatacatattttgatgatgtatagtttatacttaactcgccatataaattcaatccaaatagtgactgaatttttaaattagaatcgacattaaccttatattaatttggtaaaactttatttttatttttattcacattagatgtttttgttatgtaattttgatcattgtacctaatcatcatgagaatattccctatataatatcattatgttgccaaacttattggatggttaatatacttaattttgagccaaaattttccataaaagttaacgttttaaatgtaaataaatgtttaatgacctaagatatggtaaattaaattttgttctagataaacttttatgttagtcaccaattaatgtgtgccacacaactattttaaacttgtaagattcatctatcttatgttcaaagtatcatttaaaaatttaagaaaagatcaaaatatttaatttactcaaatttgatatagatttaaatgacaaataataatcctatttattcaatataatttatgtataagtcgagtttctaacatattttatatttattaaatgaaaaatatataatttttttagtaataatgtgcacacataatttatatagtacaaatttgatatatttttatgcaataagtaattttaattaattatttttatttaaaatgtgtcctacttataaaaaatgacttgatttatatttatgtgtacataaataattattattattttttaacaaattaaatgaaaaaaagttggaaacacacaaaattataatcttctagaatgtgactacttaatttataccataactaattatatataaaaaaatataataatttaattaccccagtcaattatataaatagtggggtacaattaaatgtttcacaatcaatcataattaattctacaaaatatcattcctcaattttttaatttcttctgattttaaaataaaaaaataataatttaaatttggacttaaatatagataacataaaaaaaaatgataataatccaaaataagagcaaaagataaaataaaatccaaaagaaaggtaaaattatctgagtcggataaaatcaacaaaagaactgataagcacagatagaaggccgaaggccttatttatttatttatttattaatttaattcattaaatttaaaaggaacacgtcagcatgaatttggataaggactgttcacacccacatgttctataaatacacatgtcccaatcccgttttctaaaacctttatttctcttctctctttctatttaattcatcatcaaaattattgagttcaaataaagcttccaatcaaaatcaataccaccatagatttcggtttctggttttcagatttcagattcttcttcttctttgagaaatcgcaacaatattaatggctgctgctgctactgctgggattatcggtgttaataataatagatcttggattcagttcaaggataatgataagaaaaggtctcctgcgaacagagttagggtttgtcgagcttcttattcgacgtcttcatctgtaatggatccgtacaagactcttcggatccaacctggtgcttctgaatctgaggtcaggaaggctttcaggcaactcgctttacaggttagatttctattttgattttcttttttctaaaaaagaaaaaattaaataaaaaaatattaaatccttttttttttgttttgatttcagtatcatccagatgtgtgtagaggaaacaattgtggagtacaattttcgagaatcaacgaagcttacgatgtaaaaaacactactcgatatactttttttaatttttgatttgatttgatttttaaatttaatttatgaattaatttggggatcaaaatctaattatgcagattgtaatgagtaatctgagagaagagacaacaagtagagatatatatgaatcgtacgatcaaggaatcgatgaaccgatgagaggattaaacgatgattgggatatgtgggaagaatggatgggttgggaaggagctggaattagagattacacttctcatattaatccttacatttaaaataatatatattaattaaaaaaaaaatcccaattaggaaaaaaaaatagaaaaaatactgtgaatttgtgaatataccatattatgtgaatattagtattaataataattattattattataatccgatttaagaatattattattattactaaatcaaaattgtgtacatacagttggtgctgagtttattggctcggcccagataattgaaaaagtacaccaatttctctttttatctcaaaattaataatatttcgtttaatacaataatgatttactgtacatgaatggatgttgtatttatcgcaataaagtataatttgtgattgtttttttgtttttgtttttgttgttttattatttattttattgaaaatttggttggtggaatttcttactcggccaatagtttttgattacgttgttttggaatataatagaaaataaatctattttggactttatgttctaaaagttactcattagactatgaaatgataaaaaaaaaataatataatatgaagttgaatttaatttaagagaatttttttaatataattaatttaaaaattattttaatacaaaaataaacataaaaaatataattagttttataagaaataaaactaatatgaatgaacatgaagggccaccacacatacttgaatgggtccattagcattttccattattatatgttgtgtgggtttgttgaaaagtagggttttttcctggtcttttctttttcttggcatatctattttggtggcattataggagtggactcgagtggaattggataaaagatgcttttttctatctttgaaaattatgagaaattattagtaattaaaaattacgaatacaaattattagtaattgaaggtaaaattttgtactaaaatatgagaaattaaaaacctataattgaacctctccctccaaaaacacctataatttaaaaaaatttaataaaaatgttataaaatagcttcatatggccgtctcttatttatttatttattgaacaaatcttataaaaaaaaacaataaaatatattatgtgttctaaaataagtatgcatgacccacatgtggataatgattgactacctatttggtttcttttaatagtttgtcttctaacttataaagagactaatttgagataagaaaataaatattattttaaattttgtgtttttaaaaattactaattaaattttttattttattaaataataaaataaattctgtatttttcaaaattatataaataaaatctttaacttaatttttaattatattattttttaatataagaagcattaagatagtttctagtacgaacaaaaaatataatcaattttattataatatctcaagattgaattattattaaattttattttctaccataaattaatttaggtcatatttgtataattttaaaaaatataaaatttattttatcattcaacaaaataaaaaatttaattaataaattttataaaatagtgtccaaaataatacttattcctcacaaaaattaaaataactagaataacttttcatttggaacgcttttgataaaacaatagaagaggataagatgctcctttctttattttattcttttttttttcttcaataatgagtaataggatagcgattgattaccatatttagcttttcaagttgtcgagagttttaggtttgggtttgttatgccctttaatttttcactgtgtcataggcccataacattagtgactctctcactctttctcaaaaagaaaaaaaatagcattgatgacttgtcactttactctctaatggagtgtttaattggaattagaataatagaaatgaatccgtttaaaatacaaaataatcaaaaataatattttattatgctatttattaaactgtccgaaaaaaaaattagaatcatattattttgtttacataattaagaaaagtaatcaaaatgctgtaatttgataaaattgttattattaaaacatgtaattatattttgtttatagatttttaaagaatatataactttttcatttttaattaataaaannnaaattaaaaaaaaaattaaattatgaaagggaaagatatttcttataaaaatagagggaaccttccattttgttttctccctaatttgtgtaggccctactactttcttactttccaaaatttagtaaacaattgtatgagaatcaataataccataccattgatcctcattccctttacgtaaacttgcaaggggttattaatcaggagtgtttatcgaattgctcacaccgcacaaactgcccgtaccgtactatactgcatataaaatgcaattttaaattctttacagtgtggttgtactttacatttttaccaaactgcaagatacggtgcgagttgcagttttgaacttaataattgcggttcaaactgtacaacactatatattatgaagttaccattttttacattataatttttattttattcttttatataagaataaatatatgtaatataagtatatattacattattttttttagaaacaattgaatataatgacttgataaatagtattgtatattatgatattaaaggtttgatattgtcaaagttttattctattgattttaaaattttaattatataaggtctgataatgattatactgtaaactgtttaaactgcaccacaccacattttcatagtatgatttttgcatatttaaaattttgcagtgcaagaaattacaaaaactacttatgcaatttaatttgaaaaaatgttagaaccctcaccactcacactgcagaaactcttagttattatttgtagaaaaatgaggttattagcttatgctactagggatttgtgtcacggataaaccctttatggttccacatatatacatgtaatagtggttagttaaaaaataccacttttattannnnnnnnnnnnnnnnnnnctctaattttatatttaattaaaacatacttctttttgtatgtattgtacccaaaataccctgacataagagagtcacat

SEQ ID NO: 15088 - DNA, 4978 bp, Cannabis sativa
aactttgcattcaatgacaacaaacagttccaacctttctttactgtactgtcatccatagccttatattccatattcttcaaagcgagttctacaccataaccacccaggtttactgaattttgtgtgccaactgcaccacaatggccaaattgtgcttcacagcctgaaggtaatacaggtctgacaacatacttaacttttccctgaaagttaacaacataaatatcaactatctaagtggagacacatgaactgatgacaaaaatggaatgcctaccaagccaattacaaaaagaaaaataaaataaaatattataattcatcagatattgtgaggttttattacagaaaaataaaagtaactactgtgttggctcatgagttgtaaacacggatgtatcttatcatctttttatcaattattgtttatatattgcatactaactaaacaatctgagcccacataatagactctagaacagaaccacagtacttagaattcttactataaatagctacagggaagttaaaaaatttaagtgaaaacttatagctggaaacatatatgcgaaaatctttagccaactaaattttgtatggcaaagtaaaaacctatagcactagaaaacaaaccctcaaaaattaaatgtttatgcttttaagataattggatctaacacccacctaacttagtattctgtcagtaaggtatgaaaatggaaatttaaaatgcaaattcaaaaagcaacaacaaaaattaaaaaaaaaaataaaagtggctccaggaacaacatagtggaatagcgttcctataatgcaagttatggacctctttggcagcatggacgagagtgaaatgaaactctctaaagcaatctgttccaagagctccataaaggatagcaactggacttccaatactcgaatcaaaatggatgtgatcaaagtcaaaaagttcaggctgctgaaatgaatctccagtactgaaaaccaatgaaacaaaaatatgtataggtataaggcacaacattttaataaacataaacatcattttccaccagggcaaacatgtaaagggaaagagcataaaaaacagataaagcagttcttaccgagtagtgctgcgaagccacaattgtagttctgcaacattaaagaacagggtggcaccattatctacccaacagcattttccaccagggctttttgggtttacaccaacagttaagagatctgactttttagtcggcacatactcatttgtttctgaaagctccccagcaacaccattttcatcagaaaaaggaaaagatgaaagggactcctcagctagttgtcggtaaagcaccaatcttggggaggctgatctcagagtaagagagaattcaaacatcgatgccaatggttcacttaaaagagagcgcccatgtcttaaaattttcttcagacaatccttagcactactataagtctcaacatcatctttctcactattaagccagccctctgtgaagtcccagaatagattcttccattctttggataataattcactgtaacaaacgcaagataaatcttcacaagtcaagaaaatgctgaaacagaaactaataacatttacgcagatgatattactttttcccaaaactgaaaagtaaattgtgtgtagagtaatgatttgcatatttattatctcttcgagttagtcccacattactaatgtgtggaaataaaataccatatataagatgaatgggttactcttctcattgccgattggtttcgagatagaaccctagtcatcttagcctctttcattccaaattctgatatagtatcagagccaaacgaaaaacttccgctatctcccttttaacttccatttgagacttgtttcaaaatctacaaatttcccaatttggtgggattttttcaaatgtcacattcggccatgtggtttcttaaaggtcgtttgttatacccacactttccagatccaaacgtgaggaaggtgtattagagttagccccacattgctaatgtgtggaaaaataccatatataatatgaatggattactcttctcattctcaattggttttgagatggaacctcattcatcttagtctctttcattccaaattctaacattatcccaaaaaaataaatgaataagagaagttgtgacaagaattttattccaactgccattacaagcaccaaaggtataaatacaaagacaataaataggagaactagggcatcaacaaacaaagcataattacagctgattaaaattaaaatttaacaaataaatgttgcatttgaatgaaaaatatattttttttctttaaaaaatgtgttatctttaatatacattgtataaccaaatattccaatctaaccaaaattccaaaaataaaatagctttactaaatggaagcaatatgtttttaataaatgtaaacccataattttgaatacactaggaagggtttaacaaataaaaatacatacaaaatatagatttcgtcaatagcattatttttgaagactaacagcaaattgtattaatgagggagtaatacaagaagcctgaaaaagagaaatcaaactaagatagttcttttctaaaaaaattaaagtaacaatattaatcatggaacaaaatataaaggtgaaaagcggttcagccagcagcaaacagaaaccaaactctacagaataaaatttcaaactattgcagttacatcaagaaaacttcaatccttaaccaaatcatcaaaccaaaatccttttgaatcttttacgctaatactaaataaccagatagcctccaatatctacgtttgttgaacttccgggccggtaaagagccaaaaaaatgttagtgcccctctttctaaagcaacaagcaagaaacttgactttgagaaagaagcgcctcgccaactattagaatattagtaaaggccttagcctatctataggttggggccttttcttgcttgctagcgccccctaccctaaactattagtttaatcatatcttcaagaccttcctctaacaagtaagcaagtaaactaccttttgaaaaccttactaatagcatgtgaagacaaaaagcttcccttacattatagaaaggtttgtagaaagcctttaaatatcccataaaacgtaggggcctcaaagcttgtagtttaagggtgtgcaggtttggaaccctttacaggagagcagtaagggtcggagaagggcaatcactctttcttaaaactagcattattaagaccaaagagtcgcaagttatccaacttatcctcgatatcattctattccactctaacaatatggcccaacaaatagccatggctgccaaattacatagcttttgttagttcttattccatgaaataaaagaactgattagacctgaactagttgatgagcagcccgctgcactttatagtccttgaacaacctattcctcatcagaaaaaatgatctactgtttctccattcttcttacaaactacacaccaaccaaaaggaatggactgatagggccttcgcttctgtaacacctaatgagcgcccattccattccaaaacaacagccaaagaaacatctttctttggatggagttggacatttccatatgacagtaaaattgtgaacagatttgtagaaaaaccaggacttttaagcattcaaaggccattttacaagtgaatattcctaaattatcactcatctaaaccctcctatcttttctattgtgacaaactctcttcccttccagcataactaaattacctttggaacttctctaattatttgtaagaatataaaagaaataacaaactaacaaatagagtatacaagcatatgtatataaaaataattgggcaagcaattttgtgcaaacacacctcaaccttcaactatactggattaccaaacgctaaaagataaattttgaaaccaaatcttgtaaagcatattacacaaagaactttttttttgtcataattaatttattcataaccgttcagctgacaataattctttcttctgcaattctttccttcaattgttactccagtttgattctggtttcgcatttttttaacatcatatgaacctctctttacttctcatcctttagcaccctccattatagcaacaacgcaatcatagacaacttccattttctaattctcttacccaaaatgcgatcataaatcaaatatttacatgataacgtaactcaagtatcaatactcatcatgtgcatatatattaaaaaatcccattttaaaatgtacactaaacttatcacacaacataacaaaaagcaaataaaccaacagcaacatacccagcttccaatagtaatggagtgcctgaccacttagcctgaactgcaacttgaacattcttgggtcttcgattctgagcagagacagaaccaaaaccacgtggtccaaagcaaaccagaatgattagaagaacagaacagaaccctgatctaagacggatctccattttctgagtaatccaacactttatctcaatgggttcggatttcagatgtacttgggtcaataggtatccgccattgatgaatcagagagcgaagctcgagtatggtttggtgaatttgatgaaatatcggaggagaggaggtttctgggcacactataaaaagagcgatgaccgtaggggacgacgacttagagagagagtgtatatgagtgagtgtgttcatagggttataattgtctttctacacaattagattaagggtattttggtccaggaaatttaaatacacgtgtttttaatgacatggcgcttagagattgggtcattttattttatcttgtttttgttagctctcaataattcttttggaaaacaaaatgaatgctttttcagcagaaattgaattaatttaaaaaaaaaaaa

SEQ ID NO: 15089 - DNA, 5684 bp, Cannabis sativa
tttttggttagaaaaaagaattctagactgttggatctctctctattttcttatccttcttgaggatgataatatatattgtttgctatgcacttgcgctttaagtgcattttatcttttcctgaggttccctaataaatttggggagaggtccagttttgacttctgtctctttctcaaaaaagaaaaaaaaaactgtccatgccgtggagaaaaatttagaaaacaattagttcatatgaagtgcatactttgtttctgatgtctttataaatggatttgtgaataataatttatattggggtttgtttctcatcacagcttcagaattaagtccagtagcttctgggaagttgcatgctaaccagaagcaatctatggatgatatctcagttcccaaaaatcgttgtgtcatttttgaaaataagatggagaattcaacaaaaacatcaccttcatgttcaagacctgttggtccaggtaggtaacatctgtgtgatcattctcaataattgcatcatctgttctgcatctttctttttgtttggtaaatgaaattaaatccttttctagattgaagggttcacaatttcgcaagtttcatgaaactttatcatagttgattttctttttttttttttttgcataatatagtctggtggtgttcctattatgatttcagagaaaaaagctgctgcctcatgcaataaagatcctctaaccaaacaacagccagcgcaaacctttatcccacctagaaaagtcgaaaattcaaataaaaagatatcaaaggaactactcaaagaatcatgcacattgttgccatcattgcttggtgtcaatacaggtaaagtaattaattggtgtgaaatttcatccctgattatataaatgttttagtttatttttggagagcttaatttcttccctctctttttttgttaagaattataagcaggaggaaacttgttgtgtcgcattagtttattacaatcatctcttttatccttgaaaagttcattttcatgtcactcatctcgattgggacatctattttattcatgtcataataacagtagtagtagtagtagtagaagaagaagaagaatgcttaaaaggattaggacatctcgattgagttttttgttattacattgataaacgtttgatccttaaaatgttttgtggattgaattagtaagataattgcctcaagtgtgtagtctatgtttatgtaggtggtaaaactaaggatattgctcaacatgatcattcaaatgttcaagaaggagatctacaaaattttccacgtagttatgccttgtatcttacttattttcctgctcaagatgtgatttgggagtgggtaacttatccctttaatttattttcttttacttgaaaattttagaatttttaataaaaggttgtgctgctgtgagctcattcttcttacttggaaaaaataatatataaatagaaaaaatctctagtgcacccctaaaagagttattctggtagactttataatcacgtaactatagctatttaggattacctgtaaattttttaaaagttatgaatagattatggtgccgaaaataatcttgaaacaattgtttaccactcatatgagagaaaaatatttaagcattattttcggtatgataagctatttagattttttgaaaatttacaaatggtcttataaaattacaatgtacacgattataaaaaaaaatagactagagttatcaattttcgacgccgaaacaggtaggagtctagtagaataactcttttgggagtgcattaaaaacttacctataaaataacagctttggcatttatttatgagtctagcactctttagtgcttggttgtacagatagaagggattgaaatgaagtgtttatgtgagaagagaaatggaatggaaaagaaatatccacataatttaataatatatattggtttattcttgtatcactcttatatatatataaataaattgaaagaaattgttttaaattttttgacagctaaaatatttaagattaatttttagctgcatttgaagtacttatcgttaggtttacggttagtagctgatgtggcagaatctaactatacttaagatacttaagtgcaacttttagcacgatataagtacttttgctacaaatattcatttaatcaaagtctaacgcaaagttaacggttgtgcaactaaatattggatcctttaggtacttgcaccgtgaaaagataaacttgggagtgaagtgaaattttcaatacaagaaattttcgctgcatatatcccacaatgtggaatattcaaaagcagtttagattgtaaaatattgggtttgggaagactttggatttctaccatataatttatgaaagtccattccctaactgatgcaataagcattcaaatttaatgattattccttcattgaaatggcaacaagtgaatggggattctataggagtggcctttccactcccaaatactaaaacatttgaactgttttttctttcttcaggggaggcttcaaaattcttaattggaatccatgtgaagtctttggtaggttccaggcacaacttccttgcaaaattcatcgtaaagttaatgaaatttcaagaaagatgcctccagttcttgaagttaatatgcttcctcagcaccgtttcttggttgatctcttccaggatgagtgtccagatcttttagatgtggcaatgtacttgttcccagctgaaaacattgaaaggtctattttaacttctgatttattagaatgctttctgaattatgttgtttttactcattacaattgaagttttttttttttactggtagatcaagacagaattttttgaagttggttaaacacatggagatccacgagtcaattatgagatgttatattgatgatgttgagctgctaatatttacatctttacagcttaatgtcgattcacagagtaagttttttgctatccatagcattttagttgtatctcaattcctgtcatccatgtttctaaaatattgtcagtcgtgatgacttgtttctcagtgagctggaaatttccatgtaaaaccttgtcatctcatgtaatgtcttttggttctatgtcttaaaagtgaatctctctgattacttttgaggaaagatcaatcttcatgatgcatagagttgctctttcttactgtcctacctttgaaaaattttctaggtagtaagtaaaagtatttcataaagttattaattactctggttcttgagctcatggtctacagtctactgtccattattgataattttacatcagccatcaataaatccttttgatgaacaaagctctatttagatgttgtgggggtgtcctttcttggctgcattggaaatctctcaagcaatgttgccaaagtagtgccaaactgaaacattttgtgacagttgtatagaaatgacctctttctttttttttcttcttagaaatttaattgacattaataagtataagagtgatgactatgccacttgagggtagatcaagttgttggctatttgtttattcgttaaagagttttatatgttttccattttattatgtttatggacatggtgataccttctttcttattgttaccttctcttgtaatctcatgtgtctatgaattacatcagattgtatccaaaatgccttaatgggaatacatatgctagatctcctttttttggtattttgccagatgttttgtcatcaaaatcaaagcagttcttatggggaatcttccgtagcacaaacgataaaccttttctttcagatgcacaagaggagctctctagttttctagctgatgaggacatggaaattgacatggtggggggaattagtattggaagggttgacgtaattgtgccaagaaaacacttagaagttacaaaagaagaattgaccaaatactacaatcaggtttcaactttcaaacaccattactctatcagatattattgtctgctttcttaatcattttcttttcttcatatacatataccattatttggttttacaggagcatattctttctcctcctcctggttttacaaagaagttcaaatccgaaccgactgtgtagatgataagagtcgaagttaaacagttacagtagcaaatagagactaggataaattctaactgagatgtacagactaagcaaaagaaggttaacatagattcctcttgactgattagaaccaaaagtttattgtacaaaataggtatggggaaaccaactcacatgttgactaattgaaattacagacatatcataccacagttacttgttgttgttgtaattccacttgtttgtagtttgtgctgcaattatcttacactgttggatatgtatagtgtcacatggtttacaggtttagtttcttttctttaattcggaccagaaactgtggacaccacagtcttgtgcagcaaagatattttggtttaatataatgtgataaagttttttggctatttataaaagtaagatatagcatggaaacttaatgcatggcatttttttttttaaaaaaaaaaaacttaaaattataggagaaatatagagtaatgtcataaaagaagtttgtttcatataaaaaatatccattttttgagttctttctatgtacgtatatattttatttggctaattaggatttttgttctcggaattttgatatgtatcaaattatgtttctcaaacttttttagtcgttaaaaattctccttgaattatggagattgttggatttaagaacttttatctaattttagtaagaaaaaattaacatgaatgaaagttcagagacatgatttggcacacatcaaagtacaaggggtgtaatttggtaaatattaaagtttgagaagcatgatttagtacataaataatcactaaattagtaaaattgaataaaattagacagaagtctttaaattcgataatttcaatagtttagggataatttttaacggtcaaaaaagtttagggatatgattttgtacatattaaagtttagaggacaaaaattttaattagctctattattttttatgaatgtctacgtatatcttttttttggtttgatttgtaatattagtttattctatttctcattatgtataaatagttttaattaatttcagcaatctttaattattattatttattttaataaaccaataaaaaacaacataataatataaatatatagattattaaccacacaagctagtttggttgaataaaaatgttgattgtgtgataatatgatgatgacgatatatgtgtaatactttaataatagttgagctcttaccaataattcttgaccagcaaccaaactgtctaacacaaatcattggctatatatgttcttaaatggagcatatatgctaaaacaaaatattagtctcagaaaaagaaaatagaataagaatattcctagaaattattattatcgtcaaaaaaattatcaaagaattcgttagagttgttgttgttactgaaaaatcactagagttagatatcagagttatcacaagagttagacatcaaaattgtcaccaaagttagacgttagaatctcttagacactatt

SEQ ID NO: 15090 - DNA, 3386 bp, Cannabis sativa
  modified_base (3327)..(3332): a, c, t, g, unknown or other
aaataggtgatcatggatgggaaattgtacagaagaggatttttaatgtcgtacctaaggtgcatagctggaactaagataagcactgtcatgcatgagatacatgaagcattttgaagagatcacacatccaaacctattatttccaagaaaatcattcgtcaaggttatttttggcctaccatgaagaagaatttctactgaatacgttcgcaaatgtgaacaatgccaacattattccaaagttttaagagtcccaccaacgaaaataccctcatgaacagtcgttggtcctttaccgtttgggatgtagatttagtggtatcacttccaactagaaaaggagaagtcaaatttgccatagtagttgttgactacttcactaaatgggtgtaagctaagaatgtagtgacctccaaaaaggccttggacttcgtaatcaagaatattatgtgcaaatatggacttctacaaaagataatctcctgtaatagaaatcagtttgacggtgatcaattcgctgattttttgtcaagcacaaaataataaaaagcttttcagctgtggccaggcctcaagaaaatggacaagtgaaagctgtcaaaaagattttaaagataaccttgaaaaagaagcttcaaacttgtaaagtacattggccggaagaacttctaagagttctttgtgcctagaagattactgaaagaaattcaacatgccacaatccatactccatgacatatgtatgcgaagcagtcatcccagttgaatccacaattccttcacataggagaaaaacctatgaccctactcaaaaccatgctcaacttcaggaatctttggatttaatttaggagcttcgagaacagccataggtttaactccaaatgtaccaaaacaaattttccaaaaatttcaatccaaacttaaaagtagaagaattgaaattggtaatcttgttttgagaaggttatttctgtcctcctaggagcctggagtgggggtcttaggaccaaactaggaaggtccatatgaagttcaagacaaaattggggatggaacttatcatttgaaaagaccagatggaacaacagttctaagagcatggaacgctgaccacctacattgattctattagtggacttagggtggtcagcttcttttttatttattttttttttcttcatgtttatgccttagggcacgaattatttgaataaagaaataaatttcatttcatatttggtttctcaaagttctatcacgtaacaagtaatcaataatctcaactcttaatcacttgaggcgtagcatacattatatcattataaagttatacctctttcataaaatacaaataaattaagaacaagtataagagtgggaagtattgcttgaaactagaacttcaaggaaccgaaagtaaacgaatgccttaatttagtacctttcgcaattaactcagtataagagtaggaagtaccgcctgaaactagaatctcaaagaaccgaaagtaaggcacaaccttattatgcttaaaatcaatgtagtgtattttgtagttaacttaggttaacttaacacagatgttcaagcttaatggttaacttaattaaaacattcaggtttcttaaataaattaattaattcaggttagttaaatatttaagttcaaagagtcctagaattaagtaatatttaccaagaaagatttaattctacaataattaattagctcaggttaattaattatttaagttttacaatctctaagtaaaaatacttacctacatttttctacaaaataggttgttaaagtgtcaaggcacatgccattggaactatatttcaagaaatataaacaaatttttaaatagaaaagcaacaaagtctaagaatttaattaaaagtccaaaggttcaagcttttggaaccagaacctcaaaaggctagagataaaattgaaacttagcaaacttgatagattaaaatgctaatatctaaaagttaataaagtatgtaaatgtctgaaataaggctacgtatttaaaatccctacggcaagggtataaaatattgtcttcgccaatgaataaaggagggtctatatcccccaaataataaaatattaaagtatcaaaacaagtaaaagattggatggaaatggttaaggcatggctgggtcctttggtggttgagtatcatcttactgggcattataaaattgggcattaagagagaccttcaggatcgctgagtcagttgcaaaaggagaatcagaggctgatagagctgggtcttccaagttcacaccctccaagtggaaagttctaggatcgaccactttcgttgtcttagttacatccttatccttctcagccttaggcagtggaagaacctaggacataagtagttccctatcttacatcatcaaaagctctatcacggattggtttagttgccagatagtgtacagagagtatacagaagctttttttttttgatgtcctagcctcttgatcttgcttttcctaggcagcctattgaagttgttcttccagccctaaagtcttctcttccagatctaaaatttttgttttagactctttggaagattgagccatggattgtttggtagcgctcaactcacctgtggtctcttgggccacaatgacacctttcttcttagcttcctttgccttttactgcaattccaagtgatgcttcacttttctctccagagtggtttctttgacaattattttgtctataattataatttacttattgtactcctgagataagtgggtgagatttcgttgcgattctttgatatccagcttttcttgcttaactttttcctccaagtctttgatagtagtgagagagcctgggtatatcattcgttttacttgtctccctgctcgctcttagccttggcggccttcttttcacgagcagtaaccttatttagagaatcattgacccttttgattaaagatggcctccatcctaccattggcacatgctaaggctttggtagcctcctctctttttcgctaagcattggaacgttccatcttcaggatctcaagttcataggccaacttgatggccatagagtagttcctctcgactgtcagactcacttatggatgaaaaattgcaaatgagctagaaaacaaagataggcacattttttttaacttaaattagttaaatgaaattcaacttacaatgttggcctaggtcctcatataatctgccatataaatagtgttatcccaatttttacactctgatgtggcatcacgagaatggtgacnnnnnnagtccacttggaacatctactcagaaaaacaggcagagcaggatgcctcgctgg

SEQ ID NO: 15091 - DNA, 5264 bp, Cannabis sativa
atttatgatattttattaatgatattttattaattagatattttattaattagtaagtaaatttgattatattgaaatttgattatattgaaatgaattttatttagggcacacaacccaacaggggatacgtgagatacttttctcgtctcattagtgtgtgaattctcaccaacattgaaggattgggtcttacgtttgcctctcacttgtgagggaaccatagacgagatgccctctatcatgaaatctcttggataaagtttctccttacaaccatggggtgcttctctcggtgtattcctctgagggagagccagcttgggctatcttagcggacatgcacgatacccgtttaatgataggtccttcttttgctgaccctgcgaggtatcactagtagtgaacatggagtttccctcgttaacatgcatagttgattgcctcctctcttgtcatttttgttcgcacttgaagagcgagacacgtgttttgccttcgagtatgctattcaacaccttttgcatatcagtcaccgtggtctccaacctctaattcttcaaacagaagttgtttatctcctcatcatagcggtgggtttgaaaactttgactcgctaagtgtacttgtgcaaaggtacttggaaagactaaaattatgtgattagcctccaaatatcattgtcaaggcatgacctcttagtctttgactactctgctcgttataacttggagattgtactttgtaaaatcttagggttaacagctaccacaaaagaaacacaagtgattcaagttatttgatttttctatttaaaaatttaaatgcaataaaataaactaagtgaacatatattatttattaggtcaaaccattataaattttcttttcattaatttatgcatttattattctattttatgcaattactttattattttcataatgaatttattattgactaaattctgaatcaacagtcattattattgatgatgtaatgagttttatttaattagcgagaacttatgctattcatttaaccgtagatagataaaaagaaaaattaccatatattttggtaggttatttagaggtttaatttgaaaattacatgcaacgacgttaaatattatgcatcacgtaaaatacaaacaccttaataaggaaaaaaaataaaaaaacattacccttaatatatttaggtaggttatttaaaattattacatgcaacgacgttaaataatttgcagcaacatataatattataaataataccaacaccttaataaaaatatacacacgagctttaaaataactaaaataacaaattttatgaattatttattctaaagttattaagtttttggaaatatttcagacaagcaacaataaaaaaaaatatttgataaaaattactatattattattttaacaacataatgaatatatgaaaactaattcttcatatatatccctacaaagtaaaaaaaaaaaaaaactaattctttacatatacttattcgaaacataattaaacgaccatattattataagagtacataacaatacattttatttatattatggagtaattaaataatatattatcaacaaaaagaaaaaaaaaacataaattaactagctataagacacacaataacggaccagaataagtaaatatatacaaggaaccatttttcttttactaaaagttatagggaatcatcatatcattgataactttctacacatatattatttttttttcttgataaattttaattacacacatagtattttttatttttttaataaattttaatcatgcacataatatttttaattatcaaaaactatgtaacacatatataatttttgaaaatataaataaaagataagatgcctaactctatcgctgtattttgaaaagttaacagaagttattaaatgataatgcaacgacatcatatccgtatatatatatttgataaatcaatgtaatacaatttaaatacgagtatacaatgtagataatatgttgcattgcatatgtgtagtttaaataatcttttaatacattggacatttctagaagaaaaaacccttaagttaaaatgtgtaattgtttaaaattgatctaaaataacatattagataagtaaactaatccttcttcatcaatgcttatttttcactccaagttcatgctttaaaaagactgatgtgtcaaatttcaaaatgattttattttttcaaatttacttttgtctaaatatttggccgtgtgtcaagctagtttggagtcaatatgacaagaataatttgaccacaatacaataataatactaaactaggcaatagggctcagatatgctattatattatgtcagccaattcctatgtggtggtatatttgttaacaaaatctacaaccgaaatttaagggttgtttgtggggaatatttagctgtaaatatgacttagttaaaagaaatgaaatcatttttcgtgctctaattagatcatgagagctcattatagaggccaagcgcgtgcgtcactctcctcataatataattataataataatatcagaaaatagtgagaaatgagaatataacccattaatgttcttttttttttctttcttttttattagggtacccatttatgttctttaagtgtgtttatttaatcaaaagccaaccccattattcccatgctctgcaaaaaggtgggacctttaagcacccaattcacatttattttctttcaagttcaacatttcaatttatatgtattaataatatatatttataaaaatttgtatgtaagtatcaaagttggtaaaatgaaaggagaaaaagagtggtttaatttggtggaataaccgtcaatggcattgaagaatgagtttaaatgttacaaccagacaacaataacagcaagaaagagaataataagaagaaaaagaagaagaagagagtcaacttgtaaaggatatatttatccaaagacagattgaggaaccagattctgtatcccatttaccatgtcttttattcttttattatcaatctaaattaaatttggacacatcgtcttaatacaaatttttttaattaacttatgctaagtaaaatgatgtgtcacaacatagttggagggaaagaaatataataaaaattaggacagaatattgtgctgattaatatttcagagaaaaaatagacccaaaaaaaaaagcccaaaaaaggagcttgataaagtaagaagagagagcgttgaacgagacaaagtggagacaaattgtttacagcacaatatttatttaagtttattagtaaaaggaaaaaaaattatctgctgttttttttttcttcttcttcttttgtggaggtccattatatctcacctgctggttctatatctctactcgctgcatacaaagaggtggtccaatctctctttactttgttccttaaaacacttgtttcaattctttctcaaatacccatttcagtttacacaatattttcattttaaaaggttaaaaacatattctttttaaatttgatcaacgagttttagtccacccagtttcaaagatccaacatttttcacttggttcaaaagggtatgcaccttttgtttgcttcttaatttcttttgttataatatatcacctttggagccagatcttatatcatcttgtattaacacgctttgtattatttgttaatgatcttatttttctacaagttgttcttttttaccctaagaaaaagtgatagagctgttttgtgttgtgagagtttcagatcgattaatgggataagctaagtagcagatttgggtttgtatttgcttatactttttaaattttgataaatgggtttttctgtgtcactttctgttagtttttaatgtcgaaatttgcttgtataaggttaaatcagtgatgaattgtcaaaatcacatactcccattttcacaagttttgatgttctcattttcttagccaaacagggttcttgcaattcttatatcttttttatttgacttggttttgacccatttgttttgtataatgttgtaaacaacaatgcatttaaacacggtttatgcatttatcttctttttcaatttggctgggttttgaacctatttttctcttctgccaaacaggtataaggttgaagaaggaagaaattttgggcagtgtacttggtggtggtgttggggtggggaggagagctcagatctaaaatcataaacagttaattatgtctttccttggaacccaacagaaatgcaaggcttgtgataagacagtttatccagtggagcagctatctgcagatggtgtttcttaccacaagtcatgcttcaagtgcacccattgcaaagggactttaaaggtacatttacattacactactctcaatttacagctcaattccaattcattgttatcatatccttgcaatgaaaaagacaaaaaaatatccgatattttaattttggctgagctgataagactcaaatatgaaagttcctttgttacattaccttgttctcatgcttatatagtttcttccattctaccatggaaatgcccatattaacatttgggctgaataaacaatttgcaactgtgcatgtgtctctatttgtccatgtgagaacttgatttgagaattctaaaagagaattgtttgatggactgaaattctgatgttaaaggcaagtaactcaagaatttagaagttttattattgtagttgaggaatgtctaattttgtttcagctgagcaactattcctccatggaaggtgttctgtactgcaagcctcattttgagcaactcttcaaggaaactggcaatttcaacaagaactttcagtcacgtatgtctttttcttttccctgagcaagttctttagctgatatttattgttttttttccaccagatttttttaatttgccataaattttattttcaacagctgcaaagtcagctgagaagttaaccccagagctggtaaatcacttctacaatgcaccacatttgattacaaatctagttatatcattggttgcatcaaattctgaatgaagaaataacttcacttaatctaatatcccatggtgtcatcttttcagactagatcacctagcaaagctgccagcatgttctctggaacacaagagaaatgtgccacttgtggtaaaaccgcctatccactggagaaggtag

SEQ ID NO: 15092 - DNA, 5259 bp, Cannabis sativa
aattttgcgaaatcaacttttaaagacgatgtttgtctaatgtaatattttcttcatgagcgaccttgtaatgttatgcgatctggttgtggatgccattcaggtccatactagtatttttggtacatggcgtagacacgacactagtactatgcttaagcgtagtgccttgaacatattctcttattaacgcaagagattaaaatatacatctctctcaatttacaaaaactttcaacataaggagcgttcataatagcaaaatgataaaaagttcaaccccatctaagaaaatacccaagtcactttctgggctcatagtcggaaacaaaaggaactaaaaatttggtaccacttcgcatacataactgcttcagtgtttacctcagtacttttctgttatgcccttgaatcagtcatcttttgtttggacttaaactagatgctcatgatactcaagtcattcacttatgttggcagttgatgttcccgagggccaccaaagatgggtctcatgtaagcatcatcaaaccttctccagtaggagtgaatagtgtatacaggcctttccattaacatggtaagactattcttagctcgaaggatgttggttgtggcagattcttcaaaggagagcaaaggaggggtcatgtcctctataaggtcttttgacctttgtccattaatgacgttagtcatgtgatggggaagaagacagtttattagtggcttagttagaagaccaaatacctgttattagcaattttgaggtaaatataattcatgcccaaggaaatttcagttcataaggaacaaagtaaaattgctcacttaccactgtactgaaaagaacaacaattatggtgattgtgatcattgaagcattgatggggtccgaagtaacaccataaaatgtgaacttcactagccaaaagcatcaaaatgatcagaattatagtaatcaaatgaattagaagatagttcatgtacaagttttgtttaatgtaagcaaagcacacaccttttcaaatgctaaagctatagaaacagctcccctcatcagtccagcccaccatatgacgatctgaagaggtagcattacattagtacgatcgtttaattttggtacctaattgtaatcaaacttgtgattaacaagtgactgaccatgtgtttgaatgtgagattagatactccatcagaatgcgatttgttcatgtaattggaaagaacagagagagggaaaacaaatgcagcacggccaagcgacaccagtaagataagtgtactccaaatgcttatggaagtactaaaactgcaaccaaagagaagtttatttaaaataaaatacaattgaactacaatagtgtaactaataggtactaactgtgacttgaaaaaagtactttaacttagacatcttccacttctccatgtcaagagcatccattcccacataaagaaatatgaatgtctctgcaacaaatgacatcatagcaaatacatttctgaggagacaaaaaccaaaaaccaaaaatcagattggtgtgtgaaataattgttaggtagaaatagaaggaaaacccagcaacataatctgctcaaccatacctggttgtgattctagaagtttctgctacgttatgccatgcatagtgagacatgagaataccgcaaaagaaaactgtaagtattccactcagattgaacagctacaaaagagaaataattgagatggtaaaaactgtacaagtattgataagataataagataatataaatcttatcataggcatattcaataatgttttcacctcagccaacatgtacgatagataagccattaacaccatcaaggcaatttcacgaatactcgaatgtctgtaagcaaaacaaatacaaaagctgatttatatatacacaatcatgtatgagttaatactaactgaaaaccagacactaaaacatttgaagaaatgccaaattctggccatttccttttgctaatctttaacagaggtagttaacttgccttccaaagcagagggccttaaggacatatgacgtcaaaagtccagactggaaggaaataaacactatcagacagcagaaaatgctgagccaagtatttacaaactactagtaataataaggaactaatcaatggaaaagtacgtatgtacacttaccatgattccgagaactgtgcttgtgaaaaacaaatagagaaaatcacccaagacacggaaaacagtcttgctactaaaccgagtaatatcaatcttttgtactgcattgaatagaacaactgatgttgcatcattcaccactccttccccaaatactaagctgtatagtaatggggtttcatcttgatgaagcacctattacatatatatttatatatatatgatatcttaaactattcaacaacaaaatatagaatatgtatagttgaattattattattattattgttattattatttatataaataaataaataaataaaaaactaaatgaaagatcaggatggaatggaatagaaccaaacctcaagttcaagtgctgactaacctgcagggtgcacactgtatcagttgacgagaatattgttcctatagctgaagcaaagcacacaagttcgtttgcaaatacagttacatcccaatattgtacatgaactttatgacaaacggcaagagaattgtcatatatacaatacatatataattatcttcataataaataagtatctaaccaagaaagtcccgcacattcagaccattgaaacccaacttagagaataaccaccagctgcctaggtcaaaagtaagtggaaagacctttagaatagccccactctatataatatatatgcagtgaattaataatagtaataataataagtgattgaaataattaccgcacgttatgatcgaagtggaaatgaaaacaccaatcacaccaaatagcatgatggttaagaagttgtggaagaattgttttttcttcacttggaacctaacacatatatacatccatgatcatgagcaacggaagtacacagttataaaacgcagtatgatgatgaagatcttaccctgcattaaaaattataggcggaagaaggtaaatgaagaacaattcttcatcaaaagtaaggatatgagaactcttgcccttgctcataaccaatatgacagtccctgctatgatcccctgtttaccataaacaaaatttagatcacggtgatcttttacgtcacatatcaacagctactcaaattacaatcacggtaagaatactgtcgtaactatactaactatacatataattaatagccgctgtcatttttcgttcatatagtatttttgcaatggttaatacaaagtcagattaaaacagaggaaagttgtgtggtagtcctgtttgaaacttactaagaaaatggcggtgatggattcattaacccaacgactctcttcaagcaagtgaccaataatgaggcaaaggcatagtaccgcaacgaacaatgagatgggcatcacttgggcatggtcattggaaaagttagtcaccatctctagtcccatcatcgatagctactagctagtgaaagtattgtgatggtgtattatgtactatgtgccagtgcatgctttgtgaaatttcaataaaactcttctggatttgttttattttatatttgtgtacattaatttacaaataacgaagaggatgatgatgatgatacaaataaaaccagttgagcatcttcttcagtttctgtctcacgtgagcatcttgtaacttgtctgacacgtggacactaagcctgttttgtttcacacgtgttgttgattcacttaataaaatctcatgattatttgtcttttcccagcacggtagcgcacgtgtgctaaagcagcgggtttcagtgcaaacgatcatatgttgaaccgaacgggcatacgggatgggatcttcatcatctgtcaaaaactgtatcccgtcgttaccattctacgtggattggaattagacacgtgttctcactaacaagtaatgaagtaacacccttgttttggactgtaagaccatggaggttctaaaatttgagcacaatacataagatataaaataagaaaaagtaaaagtccattgaatgataataattagtgttattatagtaaataaaaagagtaacatttattgtaggctaaatttaatcttgtgtcaaatttgaaccaacatttaatatgtgctaaatagtggcggaacacaaggagaggccaaataaaatatattttcacttattttttttttttagaaggtagtattttataaattaaaataaaaagataattagatttatacaatgtgtattagataatgaaaaatgctaaggagcaccttacagtgccaagtactattggtgtaaaataatattcaatcccaaatattttaatttaataaataatatatggaactactaaccacttgtaagacatcatatcaatatggtattggacatcataaaaacacatatataaatacacaaaggaatatatatcacacaaacatactctttagaaataaattatattattaattttttttatattattaattttttttgtcactttttaacagaaaatagataattaatttaaatgggctttgggtttgagtttctttgtcaatttcaattttataatttattattaggcttactaataagaaaattatcacatttttctaataagtaaaatctaattattctaatttaatttatatctttatgtatacttttttcttttttttttttaaaaaaaaaaataaaggggggggaggggcatggccaccccataagtgcatgcagttctgctactggtgctaaatttagaacattttttagaacaccattggagtataatttttcttaagtgtgctaaaatatagcaatacatcacttttttggcattccattagagatgctctaacaaagcttaaaaaagaacaaatttcaaaccaatgttttcaaatggataactcaaccgtccaacgttttcgaactgtaaaattttgtttatatttaattgtattttattttctgctacttaaaatctgtaccgtctgttaaaactttttaagtaataaaatttaaaccatatgttattactatcttacataatactttattaattatttgtgtgctactctatttctggttgtaagactttttattagaattt

SEQ ID NO: 15093 - DNA, 2826 bp, Cannabis sativa
tcaataaatatgatatagatctgtaatgaccgaatttattattgggacgtgagctaattcgcatcgctctcttctgatcaacaacaaatctgtccaccatgatttcgcccgggaagctcaagtcggtcgacttttacaggtctctgacccctctctctcactctctcttcactatactccagttcgtttactctgagcagtgccagagctcctttcattatctttttaatgatggtggaaatcgtaatcggcaccatcaaatctctttgtttagattcgtatatgttattgagtcattgtaacgttaacctgtttgttctatttgttgttttgtttgggggtgcttctttatgttcgattattatcttggatttttaaaagttggggattaatgggtttttgtttttacattggaatttttgccccatattttaacccttataatgcttggtttgacgattttggttcattgcatttggggttttgggtttattcatatgctcttccttcatacgttaactatttgattccttgctgtgtgttcaggatggataattagaacgaggttttataactaataaatttttcttatttttgatgttggtgaactgttttgagttgactattatatttctggcattgttttggtggatgtagtgctgttctgttgtacaattcggagatgggtgggtgtttgaaatcattgaattactaatgagagtatagcacagtgatgatttaggaggaattgcgtaaaacccaaatatgagatgctctgaatgatgttttttaattatcattattattacttaatgacaaaaaaaggagcttttggtggcattatatgaatgccctgtgattagggtaagaaccacggttccatagttatatactttttgagaacagttctatctaatctcagtgagtattatatgctgtcatgtcaccttcataaactgtgaattcttaagttgatttattttcacttcttttttatgctttgtgttctctggtttggtcatggattgtttgaagtcatataaacttctgattctgatattttgttaattcatttatcacgttccttgtctacaggaagatcccaagagatttaactgaggcatcactatccggtgcgggattatccataattgcagctctttccatggtatttttatttggaatggtatgttatcttatcacatttgttgattcttttgggttttaacatatagactagggaatagaatgactttgttgcttcataaatctcggaatcatgtttggcgggttttttctgacacgatcctatcgctgttatatatttatgtatatattttgattgtttttactatctttttgttctgttgttaggactaatatttcgtctaccagtttttatttgtgattttctttttcttctaaaaagctaggaagtttagctactcatttgcttgattcttctcacaatttcttgaatgatgtattttgcaggaactgaataactatttaaccatcagcacctctacttctgtcattgttgacaagagtaccgatggagattacttacgtattgattttgatataaggtatagctcagtgactgaattttgatggttccttggtagaggttggttttatatagtttagagagtttttttgactaagctcttagagatacattgtgagttttagttgttgattaataatgtggttcggtctcgatttaattttgaagctcagtgtaagtattcgattatgttgtttttcacatgcacaagtatctttagaaaaatgtacttccttgaccataaaccggtggtggtgtatttataagagttgcttctcaattggtatgctgggacctcagtcttctagatgtgtttataaatgtagtaactataattagaatagttatatcttctccttgtcttcattttcttcactacattactaatattgcttcaattttgttgtagctttcctacactgtcgtgtgaatttgcatcagttgacgtgagtgatatactaggaacagtaagtttccatatcccaatcttttttggtccactgatgaatttttcttgtagttttatcaagaattcatttgtattccaaatggtgtactacgtctgtggctataattgctatggctgtttggggtgatctggttagagagcacagagcaatataattttttaagatttcgaggatagttctggaagtccataggatgaaggtagatattgggtggctattttgttatacagcatcaacaagttcaaaggaatgttatatgttgatttagctagagattggagattcctgttgtacttttctacagtgataaagtcagacttttcttcatagcaattgctatagtttcattgtccccaagtcttgtagggttaggttgatatcgtagtttagaaaaaaattattgaacatttttttctaagaaaaaagaaatgttataaaagagatgaaaccagacaagaacagtttattaatagaagttctcctttattaacaaaagttcagtttctttcctagaaagaaaaaggaaagaacagtttattaatagaagaaaccagacaagaaatatatcgtgctttagaataattttttttaagaaaaaagagatgaaaccagacaagaacagtttattaatagaaattctcctttattaacacaagttcagtttcttctcagaaagaaaaaggaaagaagaaagatatcatatatttccaaatgtcttgcaaacatttcattgggatatatttcatttacattttgtatctaaattctttaagaagcacttaggtg

SEQ ID NO: 15094 - DNA, 4176 bp, Cannabis sativa
  modified_base (4101)..(4135): a, c, t, g, unknown or other
cttcacgtaaatttcttcttattattaataatatcatacaatctggtattgcgaaattcactcgacaacagaatcctattactctcaacgacacttgtgaaccttctcaatggttagcttcagctcatgttgaacctattcctcactctggttcaaactttacctggtcaaataatcaggatggaaacagtcgaatatattcgaagattgaccatgccttggccaatgagtattggtttgacagttttcccaattcaaaagctcttttcagttgggaaaccatttctgaccactgctcttacactataaccactacggtgtccaacaaaattgggtatgtgccatttagatattacaacttctggtctaatcatgctgattttaaagccactgtcctttagaattgggtgaagcctatggcagctaaaggtattcttgctttatatctcaagcttatgcgcttaaaacactgtctaaagaattttaacagggacatcataggagatattgagaagacttaccatgcagctaaagatgagttcctcaagtccaagcttcttgcacaggctcacccgatggagcttatatttcttgataaagagaagcaagctgctactacttttctgagtcaagagaagatgtatcatagctttttgctgtaacgaagtaagatatcttagcttcataaaggtgatgagaacacttccttctttcatgcttgtttgaaaaaaaaaaagaaaatagaaaatagaatcacttcttacactacagatcagggtgttgttattgatgtctttcccaaagtggttgatcattttgtttctcattttcggagttatatggggagtagaagcttagccattaacaagctgaatttagcttgcattgctcagggcccttgtcttgatctaaagcagcagcttgctcttattcagcccttcaccaacaaggaaatttagcatgcttttttcagcatacctgatacaaaagcacctggtgctgatggttatagtgcttgttttttcaagtacttctggtctgatttgggagccgagttttgtactgctgtgaatgattttttttgctataggttctattcctatggagctccattcaaccttgatttctctcatccccaaacatcagaacccaactagtgtcgtggactatagaccaattgcctactgtactactgtgtataaatgcatctcaaagctgctgtgttctagacttgcaaaggtgttgccgcttttgattaatcaaaaccaagaagctttcatccaaggcaggtctatagctcataatgtcatgattcttaaggatcttctgaaaaattacaagaggaaaaatgtttctcctaggtgtactatcaaaattgatattagcaaggcctatgacacagtgagttgggaattcatggaggacttacttgttgcttttaacatacctcaaaagtttgtaaagtggataatgggatgtcttagagctacttcttactccttagttataatggaagagtgcaaggtggcttcaaaggggaaaaaggtttgagatagggagatccgatctccccccttctttttgttcttataatggagtacctcacgagaagcctccatcaggcaacatctcattcaaaatacaggtatcatcctttatgcaagtgcctaaagattataaatctctatttttctgatgatctaataatgtttagcaaaggatccaaaagctcaattatggtgcttaagcaggtgcttaatgagtttagatctatctccgacctccacatcaacttgagtaaatcccagatttactaaggaggcattaagtccgtggagaaacaagctatcattgatggttttcatctaacagaaggtaccttccctcttaaatatttgggagttcctctgagaccgacaaaatggaagctgaggattgtggatcattgtgggataaaatcaaataagagattacacacttggtcgagcagacatctctctttcgctggtaaggctcaactaattcattctgtcttacttggccttaggaattactggatgaatatctttgttcttcctcatagtattacaaaggaggttgaaaatctttgtcgaggctttctttggggaatgaatggtaatagaagtaagatccatgatgcatcctgggagaaagtttgtctgccaagggcttatggtggcctaggttttaaaaatagtgtcaaatggaaccaatcaattctggccaagtatgtttgggcaaattctacaaagcaagaccttctgtgggttaaatggatagataatatctatctgaaatcggggagtttttgggattatgatctcaaatcagacactagttggtattggcacaaattatgtcatttgagggagaagtttgagaaatctgatatcattaaagcaggcactaaggactggttcaagactaactagttatataataacagtctagcccaaaactaggtcaactattacaaagttatctggagttcaaccattgttccaaaataaagatttattctttggcaagtggttaactcccatcttctcacaagggacaagttagcttggtttcaaattgatctgagttcaactttgtgtccgatgtgtgaagctgagattgaatctcatgagcacatttttttttctcttttgtgttgtcgagcagggttcttgatatggtgttcaattggataggatatagaggatggcctgttgactttgctggctggtataactagctagctttgagagggcaaggctctttccacaggatcaacaccaccattttggcagccgtggtatacaatatctgactcaataggaatagatgcatctttaattgttactcaaaatccatttgtggagttgttaatgatgtaaagaacactgttaagtacaggttacaaattgtaaacactagaaaactgactactcttgagaaaatttatttgctaaaattacaaagtagttagttttttgtgtggatgggtctgcttctccttgtttgtagttagtggtttggtattttgtattttattggtgtttgtacttgttcagttgattaatgaagtttttccttcttgatcaaaaaaggaacatgtataggtctctgtaccatctaaactgttcccggtaacatctggtcaaatatttttgtctctgagtattcttgtacttcaagtcctgacatgagcattgttttgtcatttatatcaccgtctcttgagagttattttgtatgatactgatcttgaatcttctccagattaaaaggctacctcttccagatgcaatgggaagagctctcttaaacctatttactatgaagtaatttgctccttctatattagttcttgtagtctaaagaggacggctacatctctagaagagactgaaagccatgtctgggtaatatagaaaaagccagagtggttcttagtaaaagaaaaggcatctaaaaaaaacatatatataaaaaaaattgtttaattgagggagtggtctagaagatttcttctcttcctggaccacatgaggatactttacacacacttatggagattcaaggtcttgtgttgctttgtgtgtcattggagtttggtgtgctgaaatgacctgttgctcatgttttgcatttttttcatgctcagtggctctattcctgttactgaacagatgttagctgtcctattttttcctaaagcttttgagtatctctaagtttctatctcttatctcatttgtcaagtatgggctgttggtgtatattgctggcatgtttgtagtagttagttcattgtgctcacaataccttatgactatgtgtttgtttcaatttttgtgccaaaacgtgcggtgaaaattattcaatttgggtgtgtatatctcattttagcaaagttcaaatttaaaaaaatatatcatttttctttgcatggtcaaactttgtcagggtgtctctacttaagggctaaggaaagtgaataggctctctcactttactctcaagaaaccctaataactgtagctttcaaatctctctgtctacaatggagaatatgttggaaatttattttannnnnnnnnnnnnnnnnnnnnnnnnnnnnnnnnnnaacaccctaaatatgaactctctaaaacgatgaaataaaca

SEQ ID NO: 15095 - DNA, 6593 bp, Cannabis sativa
ccattttcccagaagaaatatacaaattttttgatatgtgagaacttaattatcatataaaaaatattttggtatacttttgtatgttttttttagtataaattattaaatattttttaatgcaatttttttcggggccacaccttcatcagtgagtccgtcactgatccagtatatttattaccctatttttttttttttctttttacctaaagactaaaagaatgaaaataaccgaatggaaatgctcttttaagctgacagagaagatcctatgaggaagctcgcgctaagctctaataattagctctgttaatcagtgaattatttaagtgatagaattaatcgaaacataggccccttaaacatctttgctcttaattttggctcaatgcataaaaatagtaatcttataagaaaggtatcttttgtttgtaatttcacgtttttgtctatagcttgttccactgagaaactattattaaatttacagagttaaagatagaccatataaatgcggcgaaaatacaaagtttaataaataaataaatagaatagaatagacacgtggactaaaataaatatctgcttacgtcaatatgagttgttgaagcatgaactttgcttcagtatgggtcccacccaccgcagccatggtggaatctccccagtccccaccctaatttcgtctccttcctccaagcttctatttttttcttttcctgtaatgtaactatagttacctatctgtgtaattaggtaaagtttgggtttaggttaggcttttgccattttttttttttgtttccatccatggcttctgctactgctaccacctcaatttcaagctctcacattcctatacgaacccgccgcccattacttttctccgttccgaacaatcttcgctttcgctgccattgtctacctaaccgagctcagaaattctgctttcattgccctgaatcgttaaccctaggtatcgtgaatggtggacctggaacaaggaggggagtttcggcaaattatactatattcaacggtcaagatggcgctgaagtagagcagagctataattccttcgaagacgagcagttcgtgaagtggtttcgagaggcttggccttatctttgggctcataggggaagcacttttgttgtgattatttctggagaaatcgtggctagccctcatttggatcccattcttaaggcacccctcattcccccatttttctttgtgctcttctttttcactaatttattgttgagaaaatgaaaggaagtgaagagtatagctcaagagtacattatatttttgtaaaaattctttctttttggtatgactcatttgagtcttaactggacttgcatgcaggatattgcttttcttcaccatctggggatcagatttgttcttgttccgggtacccacgtgcaaattgacaaccttttggctgagagaggtatgggaaattgatttgccttgttctccttcgtttccttttttgcatattcccgataaagtttgtgcggagtgccattaatgtgatgaatacgatgattctcttttcatcaaccgataaaagtagtccttttcaagtgaattggctgattaaactaacccaatgtgttcttctttcaggaaatgaacccaagtatgttggtcggtatagaattacagaccccgagtctctagcagctgcaatggaagcagctggcgggattcgtgtgatgttagaggcaaagctttctccaggaccttccatatgcaatattcgacgacatggtgacagtagtcgtttacatgacgtaggtgtcagtgttgccagtggcaactttctcgcagctaaggcaagaaaatcttttatctggttaaagactaatattcacatttcattccatttctagactatcaccttctgtctcaatgatatcggaaacgaattttgaagttctgttttcattgttccattttagtttggtgattttacttataagttttctcattagactgttactaagtattttctttctggtttcttgtttctttagaaaagaggggttgttgaaggtgttgattatggggcaactggtgaagttaaaaaagtagatgtggcgcgcatgcgcgagagactggatggtggttgtatcgttatattgaacaacctgggttattccagttctggagaagttttaaactgcaagtatgtttgtcactctgaatttatctctcgatcacctataatttagttaaaattaagtatttattcatttaatgcaatacaatacttcaatttaagtgattttagcctttggaactttaaaattcggtggttctgttttagcctacctgtatagagaattttgtctctggacctggacttaggtgataacagtgcaaatgataattttttttatttgcttctcatttgctactacaaattgcatcccaatccttatgtttgaaatgatgaatgtctggtcactgatgtgattcgcttctatttattgcagtacgtatgaagttgcaacagctgcttcgttagctattgaagcagacaagcttatttgtataattgatggcccaattttggatgaaagtggacgactttttcgcttccttacccttgaagaagcagataagttgatccgtcaacgggctaagcagagcgaaattgcagctagttatgtgaaggctgtcgatgaagaagatatttcttgcattggacgtgatgaagaagatattgcttctccaactaatgggaatgctcttagaggaagacatagtgcaatgtttcacaatggtgttggttttgacaatggaaatggactgtggtctggtgagcaggggtttgctattggaggtcaggagcggctaagtcgattaaatggttacctttctgaattggctgctgcagcttttgtttgtagggtgagcccttactcatttaatatacttcatccaggatatgagtttatctctaaaattgacttgacattgtgcttaccccaacattgcttctattttactgccgattatttttaaatctatttctcttattttatttaggtttgtccagtttataattttttaaattcttattttatttgtaagaattctccttcaatttatatttggggtggagagtttcttctgcagttagtgtttaacactccaagtctaacaaaaagaaaagggggaccaaattcatgatttcgtcctaaagttgatagcagtgtgacaatggctgagtttctgcctgtatatactcgtcttgtcaatgaacgaaagtctcctcagaataatatgctactacttggacgtgttgatttggaatgataggatggttttttgctaatatgttatctaagaaaatgaaattatccaggcttccattcagtatgcaaagcttctgaatcatttgattaaatgtttaaaaatatgatggacatgaataactactttctacatatttgaagtgtaatccgtggtagagtctaaatgcccaagaaattgctaggcataggcctcggcagttgggacttcgaggagatggtgttttatcatacactcagtcatttctttctgttgcagctaatgaaattttagatgttttgtctgtaacattagaaggtacatgaattctgtgataatatatttgtgccttggcatggcattctcattgaattctcaggtctgcgaaaatcactactcttgatgtgtgttcagatactttcaagtttcagctgctttttttgttcagcgtcaagcaccctgccaatggtactttcttttttattgccagggaggtgttcaaagagttcatttgttagatggtactaaaggtggagtattgttgctggaattattcacaagagatggaatggggacgatggttgctaggtatgtcttttgctgtaaatgttgtctaaaacttttgtggccaaaaaaaacgacagatcttctctatatttctattactgtcctttgtgacttaagagtataaattttcagcgaagtaaagctcttctgctgaaaatttacaggtttaggatgaattttatatcagattgaattaacgaaataattatagtaagaacataatttgtgatgcagttgactgctaggttgttttaaagctttctctagttaatctgcttgaacctcttctttgaggtggctacaataatgtaatactaatgcttattcggaaattttaaggtgttcattagaggaatgactattgcattatatttttcattctcagtgacctttatgaaggaacccggatggctagggtaacagatctctctggaatcagagaaatcatagaaccgttagaagcatccggtacgctggttcgcaggactgatgaagaggtttataattctactttcttaactagtaatctttcggtgaattggttattcaactggattcaatatttctgctgtctttttgtttttgtcggtaacagcttcttgcgacattggattcatttgttgtcgtggaaagagaaggccagattattgcttgtgctgctctttttcctttcatggatgagaaatgtggagaggttgcttctattgctgtttcctctaaatgccgtggggaaggacaaggagataaattacttggtacaatagattttcttttaagtattaaacttctaatatatcattggttcttatcctttattctcatcacttatgtttcaattgtaataagagaaaggggcctcaagaaaattaataacagcttctttccggctttccttatgttactgatcttgcatgcctaccaattttagtgttttttcaatggtactttgcaatgagtaatcttttgtggaactatcaattgtgtgcagattacattgaaaagaaggcatcttctctcggattggagaatcttttcctgcttactaccagaactgcagattggtttgtttgtcaacttccactacttgaaatttgtgttctttctgcataatgatattgttgtcttcactgatattgtcacactcagattgaagtaaaagcttgctaaagtagggtgcaaatactgttcttcaatagagtcgtttcatggcataatagttcttttgccttttttttttttgttctttccattccttttccatgttaattttcggtaaataacaattcaggtctgttctatgtgatgcttgcaggtttgttagacgagggttctcggaatgttcgattgaatcaataccagagcaacgaaggaaaaggatcaatctttcccgcaagtcaaagtattacatgaagaagctattacccgataccagtggaatcacaataaaaagcattcgttaagagataaacagtatgaaaaggtgtatgtaagtccctttggtttggagaagaggtgaatacatatgtgtagaactagaaaatacaactcttttgcagttgcaagttatggaaaatccatctattgcttctacttaggttgctcatcattgtagagagcatgttttttcgtatcttagtttgtgttgttgtaggtacttgacaggttgggaataattagaacattaatttgtgtttcttgttgtaatatacttctacacaataaaatagcttattttggccagaaaactacacataactgtattctcgatcctatgggatgccctttttcatttaattttcccaaaatgatgcaacttaaacttgtgtttgtgtattcaataaggtttaatcaactgagctgcagaaacccaaaaaaaaaaaaaaaaaattgtctaatttgagtgtgtttcaatcatttttcgtagttgtatataaagagcacatagtgagttgcatcacgaggactgtggaatgttctatttttatatatatactagtatcatgacattttttttttgtagaattacatgacacttcaaagtagatcagtgaatgataacttggtgggtcacgtgacttgttgtaaaataaataactgaaaaggatgacattcaaaaatatatatagagagagatatacacatatataatgataaatattataattattcaatgtatgttacaaaattttaaaaaatttaaaataatttatatgctcataaaataaaatgaaaaatcatgcatgcaaggatctgtttgaatcttgttttcagcacattaaattattttaaattttttaaaaatttacaatatattttaaataattataatgtgcaatattatattaaaaaattaacattaaaactatgtgaatataaaacaatagctcattggtacactcaagactcaaggggatataccgtaaaatttttaagtaacattaattatgaatttcatcaaagtgttattacacttaagacaatttcatagcatctaggtttatgtagagaattaatttcttgacacaacaatttactattggcatcgatgaattataagatatgtaacaaatgtcactagttaaaatagctttagggtttgggcaaactttaaaataagtattttctcaaccaaactaacaagtaattagatttatgagatataaaatatatacacatgtttaggagattaatcaatagttacattttta

SEQ ID NO: 15096 - DNA, 4546 bp, Cannabis sativa
  modified_base (3088)..(3092): a, c, t, g, unknown or other
aatgattcattcaaagataaatgaactgaaaattcacattgcccatttaaattaattaaacatatccgtatttggtggtaattagtgacaatgtcaataatcaatatctcatgaaacttcttagtctaacgtgtaattgcggtcaatattgggagtcaagtcaagtaatgacattgatacagaaagaataatttaggtggtgttccattagatgtaatgaaagtttaagaaaagagaaataaatagaatggaatcaaatcaaaatgtataaaaaaaattgataaaaaaattataaatttttttctcataataatctttcattccatttcaaatgaaatagtaataattgagaaaaattaaccaaatcagtgacagagtcaacacttaagcagtatttaacttggccatgctcgcatatgacttgcagcaaactcatttcaccttgtgtattttcttaaagaatggccataatgggcatgaattattctctcatttatgagtttcctttccttctcttacttgttctcttacaggttcatacatgcatggggtctaataccatttctgcaggtcaatctcttaatgggaaccaaacaatagtctctaaaaaccaagtgtttgaaatgggattcttcacaccaggtaactctaggaattactacataggaatatggtacaaaaaggcaggtaaccaaacaattgtatgggtgggaaatagagacaaacatgtttctaatccatctctttcatcattgaaacttttagagaatgggaacttaaccttagttgcagggggctcaactgttatttggtcaagtaattcattctcaaggcttccaaattcaacagtaggagtgttgcttgacaatggaaattttgtcataagagatgtttcagattcatctattgtaatatggcagagtttcactcacccaactgacaccatcctacctggtatgataaatggttataataagattaagaatgagtcaattgtttatatttctgtcagggggttggatgatccagcgccagggaatttctctattgagatggatgaaaacccaactagccttttgttcaagaccaatggctcggtaagttggagtgcttattggatagggagtggtttcacaacaggttatgttgacaaaaagtggaccaaatttccttatggtttggatactacttatgttgaaaatgagaaggagagctacttcacttttgctcctacttccccaaccgccttgactcgaatgaccgttgaagcatcagggaagctatgtcaatacatttggagggaaagctcaaggaattggacagagaattggtgtatattagctgatggactgcgtgagttcaatatgttgtgtggtcctttcactgtgcgtgacatatacaatacaactctatgtgtttgcttgcaagggtttgaacccaaaaatacaaaagcttgggagttaggagatggcttggatggatgtgttaggagagctcctttgcaatgcaatgcacgagatgatacgtttgtagaggtacgaaacattgtctttctatcacaaccagaagagataaaagttaagaacattgaagcatgtagattagcatgtttgagtaagtgttcatgcaatgcttattattttgatgatagttgctttatttgggtggatgacttggtcaatattgtcccaagctcacctcatgaagttggcccatattggcacataagaatgggagcatcccatttgtctgagagcaaggttgcaaatcgaaaaaccacttggattgctatatcaatactactggggtggttgttcttaactttcttaggcattggtttagtgtttttgggaatgagatattttgtggattcacttgaaagagtggaggattctctagtgttgtataggtacaaagatttgaaacttgcgacaaagaacttctcccaaaaacttggggaaggtggctttggttctgtttacaaaggggttttggctaattcaacttgtatagctgtgaagaaactcatgagtatgcaacaagcagagaagcaatttcgcgcagaattgaagactattggagcaatacaacatgttaacctcgttcgccttcgcgggttttgtgcagagtcttcaagaagatgctttcgcgggttttgtgcagaatcttcaagaagatttctagtttatgagtacatgcctaagggctcactagattctagtctttttgggacaagtctgactgtcttggattggaatgccaggtgccgaatagcgattggagtggctaagggactatgctatctccatgaagagtgtagggaatgcatcatacactgtgatgtcaagccagagaatgtcttgttggacgaagataataatgcaaaacttgcagattttggacttgcaaagcttgttgggagggattttagccgggttttgacaaccatgagaggcacaagaggctatcttgcaccagagtggatttcaggcttagcaatcacaccaaaagcagatgtgtatagctatggaatgttgctatttgagctcatatctgggaaaagaaacaacacacaattggagcaaggcatggaacattacttcccttttcgagtttcgaagtcattgagccatggagaagatgtttttcctttattggactgcaggattgaaggaaatgcagagagagaggaggttaatagatactgcaaagtggcttgttggtgcattcaagaagatgaaaagagtaggccaaatatgagtcaagttgtacaaattttaatgggagttaaagaaattgatttgccaccagtgccactctttttggagcgccttgccggagtctctatggaagccatgcactactatcaagttaccacttctggtggtaccactcaatactactcattctcaagttaatgtttcatcttagtctctcataataataacaaaaaagtttacatatttcatttcttgagtaattattgatagtaaatgtttgttttcttttaaataaatgtgatgttgcaaataattttattttcgtaatttcttactcacaaaatctctttttttttttttattttttnnnnntttttattttttttattcttttttattttaccttaaacttatatttttttaccattcaataacttcttcatattttttttctaatttattaaaatattttatttatcaaataagaaaaaacaaataataacaacaaaacaataaatatacaaatatatatttaatgagggaaataaataataaataattagaatatttgagctcactttcatactttagcaaaatgtagctaagaaaatgaagtgagctattatacataatttagcccacctattagagtaccgaaaattgaacatttaggtggcgtttgattggaaggaataaaattataacaatatgaatgagaatgggaataacaataggaatagaattgaataaaatttaaaatccataaaaaaattattaaattttttctcatcatacatttgaatggtctttctttttatttcaaaatagaatagtcattccacaaaaatggtggaaaggccatcctattggaatgacatttcaatactttaatattcaaccaaacaaagaaataaaataaagattgagtcctttccactccattacatttcattacctctaaccaaacaccatcttagctttagagctattataactcattagttgggactgctctagtgtatcgagaatctttaatagtgtatcaagtgcgcttgtaatgtgaatttgaaacgtcattttacaaacaattataaaaataaaaacagataggtaaaacatcaataaataaaaaaaactaaaagacaatactgctacttagaatcctccaaatagtcatatcgctattgatataatataatatgaagtttcatataatttaatgaaataatttttaagaaatattgataactaaattattggtgcccataacaatgctaaaaaaaaaataaaaaaaattaagattcgtgttgtaggaggaggtagaatacaagtcaagctcggtccaagcattaggaagcttgagctattgcacaaggctccttatattatcaaaaacaacaattacacaggggtaggccaatctgccttcatagtagcagatgcacaagtaggaatatttccaagccaaacagtttgatcaacattatttaatgccaaagctactaaaacatgagcaattttgttacaatctttcttaacatgaataacagaactatagtcagttagaagagaggaggatttaaatccatctaggagagcactccaattagtagcagccttcaaaactccattgagatattgcactactcgagggcagtcagattggaggataaaaggtgaacttttgagcttctctgccaactgtaaacccagaaagacgaccatttatttagcaagttcaactttgaattggcctgttgacctcgcttttagccaacgaaaacgagtctatttttataagcgataagtgatttatagcaagaaat

SEQ ID NO: 15097 - DNA, 5694 bp, Cannabis sativa
  modified_base (50)..(59): a, c, t, g, unknown or other
  modified_base (105)..(130): a, c, t, g, unknown or other
atatgttctggacttaacagaattgatacattaaatataatcatgaaatnnnnnnnnnnaaccatgcaacataaaatgttctttctgatctttattaattagtannnnnnnnnnnnnnnnnnnnnnnnnnatttagggcacaaaactcaatatttaggtgcccaatactatataatgtgacatgatgtaagtgattagcaattttttatattattatttaatcaaaatatgtatacttaatattgtaacatagataacaatatattactttttattattttggtgccaagtacttgtctgtactattattagtacatttatattagatcctatataatttaatttaataaataataccgaaactactaactaaacttattataatgtaacacattggtaaaatgttaaatatttaaagtatctaataaccatggtctagttttttttagtcaaattgtattctagacactttatttgtagataattaaataaagctttcatcatttattgtcatcaatgcatgttttaatcgaatgaaaaaccaaaaaaatatgtataaactgtagctagtataaaaacaaaaacactatattatactgtgaataggagctctcttagtttatagtatatatacaaattctatattgaaatggtgagcaaatatatatagagagatacggtgatatggtaattaatatatttgtgccacggtgccactgccatgacaccaatgtaagatgttatgccacccattgtaagatgtctgtcaccataagctttgttaaaactggccaacaacacatggccgaggttactctgtgagactaacaactggcttgctctagtaaccagaacaatcccaatggcaaacatcccatgcatgcgtcccactaatccattcaatatcacgcacctcccttaccgttagatctcatctcatcaaacctattataactcatctcatcacccttcatagtatccatatctatatataatacaacataactcagtatctaaccgacgccggttaactttaactcaacaccacagtcaacttcacccattttaaaagcactctttttttctccattaacaaagaacctcgcatacacactcactcttcttttcactctctaattatgtcagtaaataataaatattataatttatatatttatgtatagtctgatatatataattcaactcagctgcgatgaagagattaaagctgaaactttttgcttaatgttatttagctcctagcccaataaataaatcagtctaataaatattttcttatatatatataaagttctggtcagttattttttcctgaattttgcatgataaatgtagttgatgacactgtctatattaattaattaattgctgaaaaatgatgaaaggtatcaatcccagttgtgtttatgacttctccgaccaccatttctccagcgtcagcgccgcagccgcggcggcagccgactacaacgaccgcgtcgacgatgcaatctacggctccgatgagttccgaatgtatgcatacaagatcaaacggtgcccgaggatgagaagccacgactggacggagtgtccttacgcccaccgcggcgagaaagcgcagcggcgggacccgcgtaagttcaattactcggctatagtctgtccggcgtttcgaaacggcgccagctgtagcaaaggcgacacgtgcgaattcgcgcacggcgtgttcgagtactggctccatcccgcaaggtaccgcacgcgcgcgtgcaattcaggccagctttgccagagaaaggtttgtttcttcgcccactcgcccgaccagctccgcccggagactaagtccaaacgccatagccatttcgcttatcggcctacggcggcagcggcggcggcacgtgagccagcggaagtggttctgaatcgctgtggtagtgatcatctcgatcacgtgatgatgacaccggggaggactagtactatcatgaacggtgcagatggtgccacatcatcaccgtatttttctaataataatgatcatgattatgattacgatgatgaggatgatgattataatgattcttttcagaaatttgctgatttcttgaagagtttgagggcgttgaagataagagatctgggtggagatacttatcatggtagtgggggaaggattatgaattccgggttggatgtttcggagtcggatttgccccatgttgaatggatttcgaagttagtgcagtaaatgtgagaaaattttacttaataataatgataataataaaatgttgagagaagattttattattaaaatgcatatataacttgtaaacaagtatatatattcagctcagctgtttttaagcttttctaccgttttcctttctttccttttaatgtaaaggtgttattgtgtacttagtcgtatttcagttatatatgtttttatttcccctcttattaattaatgacttatttatatatatagtcatgttaaaaattagtaattaatgattaattatatcatagaaaagaaatatatataaaaaataaaagaaagatggtgcaggtggaagcagagagaagagcagaaaagagtgtagtggatcagaccagttactcattttgattcctcctgttctttatcaactgctaaaaacttttctcatcacgttgccaagtgtttgccgcaatgggaactattcagagtaatataaaacagtccatatatacagatatataaatatgctaacatcatttctttcttttttaaattactgtagtcaattctctcaactatatatctgtatatctattctttcactttactttgaaaaactattcattcacttggaggaaaacgacatggtagcctccaatatatatatatatatgtcccaccattactcctcaaatatgattatagtctgattatttttgcagcatataatattttaatagggtatttttacagcaaatattagtttgattggattttttttatttggcattcaccccaatggcaagaaatttgatactaccccaaattgcaccaaaacatgcggtgaaagatattttcgactgcaaatattttctaataagattggtcaagctctttttatttttttctcatatttaactcactgtataaatgattggaaaattctataatgtaccccttaaaagggatgtaccgatatatctttatctgttttaatattcgaaataatattttagtcaaatattttttcatagtcatgtaaattatagttatttaagacatcctgcaaaattttgtagaaatttgaaaaagtttaacacgtcgaaaattacattcgaacattgtgttgtacgtgtgactattttattttacacgcgtgtaaaatagattgtttgaatattattttttatattgtaaattatttcgaatttcttaaattttgtaggatatcttaaatagctataactaatatgaatatgaaaaaaaatagactaaaaaattcttcaggatgtcgaaacaagtaaaaagtgcatcaatataacccttctaagaatgtgcattgtagaattactctaaataatttattacaaaattattaccaaaacaatcaattcatcaaaaaatgtacatatacatataaattaataggcaataatattaatagatttagaataaaaagaaagactaacaaagtataaaatagaaaaattacgttcatgaaattaaactcaaagaagaagctaataaagaaatctagttattaatatagtttggaatcatattcaaacaattagaaccaaattgcactttttgaaaacccaacaaatggcattgaatgactgcatttttaggggctaaagcttttactgttcaagagagaaactacccaacgtatgtcaagcagtagaaaccaaaacctcactgttggaattacgggcaactatttccaaaccacaactactattaagagaatcaagggtggcaacaacgctgactttcacagtttccaaagcaggaggaacccaaacttgactcaaagaaccaatcagattagagaataggcttccagacgagatagagccactgggagccatattcaaactctaataatcagcaagataatcacgaaacaaaaaaacaacaatatctaaagagagtaacttttcattacgaaccattttgtttctcctgaaccaaattctccacatatcaaccaaaatcaactctaataaagtcacaagcaaaggatcaagaaacttgatgatgaaatcataaaaatcaatacaagtaataagagggtcgttgagagaaacaccacaaagtttacgataataagctaaagaaggacaatcccatgaagcatggtgagttgtttctaagtgagaattgcaaataggacatacatcgtctatcaataagccatgcttggtaagattgcatttggtaggaatttagttagagaaaatttgtcaggtaagcatcttcacttttagcggtatattaagagaccaaacctttttccaccatcttgagaatccagctgtagaagaaacacaacccaaccccaaattacgaatagccatccaataaccactctatactgaataaaaaccagagtaattatacccacaaattaatctatcccgggtcgaaaaagaggaccaaggaatagagagaatggcaacaacttcatcaggacaaaataatccataaatcaagtcaatgtcccagtctcccgaatcagctcaaagttgggaaatagtacttccttcaccaagcaaattaggacacaagacaagaaaattaaaaggcataggaaccccatctatcctcatacacctttatgtcaatcccatcaccaactcttcaaatagaaccaacatcaaacaatcttttccccataaaattttattttcaataaaagatccttttttagacttggtcatggaaccaaaaggcttacatcaatgatacaaaattttagaaccctagcaagaagagaattcgaatcatcataaagacgccacgcttgttttgctaacatcgcttggttgaaaaaggtgcaaatcctgaaagcccataccaccatcttccttatgctatcaaagcctttcccagtacaccaatgtatcttctgtttgacatcatcaccaccccaccaatatctagcatagatgctatggatactattaacaaaggccatggaaagcttgaagagtgtcattgtgtaagtcgatcgggatgggttgaataactgccttgatgccatagaaaaagacttagccttccatccattaagatttttctggatacgatctcaaacttaattaaacagcctaaatttactctgactagcaaaacacggaagacttagatacttttcatgacactccacaccaacaaccccaatagcagttatcatattctctttgacagtggccacgacgttaagactaaaacacacaacagacttctcaaaattaactataacgcttcgcgcaagttgcttaatccgttgctttgtttctttcaagcccgtttgcttagtaagtaagcttgagctgcgcgaaaggtcaactaattatataataataaaaaaaaggcgccatctataggttggggccttttattgctttgctgggcttgaattctttcccctatttatttcaaataaaaaaggggaa

SEQ ID NO: 15098 - DNA, 15595 bp, Cannabis sativa
gtaaaactgctccaaaagacaccaatagacgagataatgctaactttaaggacccgaaacataggctaattataacctaacactcagctatgggagcaggacagaacacaggtgtttgagaagagggttgtgtttgatctgtgggaaacagatactcaacagtgtacatatgagatgacttaggaattgttgcagatggcatagtttcctcatgacaggtagatgaattggaagattcattagtgttaatatcataggggaattttgtttcatcaaaaattacatctcttgagatgtacaatcttcttgaggcatccagacacttatatcctttgtgatttaagctatatcctacaaaggtacaaggagaggatctaaagtctagtttgtgcctattatatggattgatattaagataacagagaaaaccaaaggttcttagattactatactcaggtttaatgtgaaacaacaattcaattggagattgttgttgtaagacatgagtaggtaatcgattttgcagataaacagctgatctaaaagcctcatcctagaatttgagaggcatggagtcttgagcaagaagacttaggccatgttcaacaatttgcctatgttttctctcaacaaggtcattttgttcataagtggtaggacaaggatgtttatgcacaattcctgcatgttttagtggttcagtaaaggttctatattcctcaccgcagttaatttgtaagaccttgattttcttgcctaattggagttatgtttcagctttgaaattttgaaaagttttgagagcttcagatttgtttttaaggagatatatccaggtgaacctagtataagcatccataaaactcatatagtatttgtagccattgtaagaggtaatatgggaaggcccccaaagatcagaaacaatgaggtgcaatggctcagtataaacagttttagactgttttggaaagggcatcttatgaattttcccaaggcaacaagcttgacaaactgaaatggtatttttattactaacagagatattacatgaattcagtacagaatgaacaactctttcagcagggtgtcctaacctattgtgccataaatctaaaatagacatagatgaattatgacagggattataattgtttttatttgagtcttgattgctagcactagaggttacaagacagtcatgttgctgatcttggagattgagagttgaacaaggtgtagggatttgagatagcacctgcaattggtcttgaacaaaagtatataggccattgtggagtatcccagtcaagattatggctttggtcctcagatccttaacataacagacagaaggatgaaattcaaagaaaacattgttatcttgagcaaagttagaaacacttagtaaattcttggtaatttctggtatatgcaaaagatttttaagaatcaaatttttatcaaaacattgacatttaaagaaagcactaccagtatgttgaattgccagacctgagccatttcccacatacagcctctcgtgaccagtgtagtctgcattctgcacaagattgttcacatctggtgtacaatgattggtagcacctgaatcagggaaccactttgtgtttgacttttgagcttgcatagaggtctgagcagcatgagcttgcaaaggtgtgttgctatctgcagtaagaagcacacgtagcttttgtcaaacctgtagaaacactcaagggccaagtgtcctatcttatgacaaatttgacattgtggtttgtttggagtggtttgaaaccttcctccaaattgagtggcattatttcccctgcctggattgacagtgcttgatccacctcgacggagaaaaccagaattagagcccctgcaatttcgattgtagtgagcaagcaaggcttcatatgaccattgattgtccagatctgctcctgcatttttagctgtaagatttgcattcagatcaaattctttatctgtcttctcaattcttgatttagaagcaagcaggagtgcttcaatctcagcaactgaatatccttcaattcgagtcttcaatgagatgatgaacgtgtcatattcacttggaaatcctttaaagattgtagctatatgatcacgtgcagatagaaatcaccaacagatgcaagaagatcaacgtgttgttttaccttaagcagataatcatttagagatcgtggtcctttcttaagattctgaagtttaattctgaactccaagatcttaaatgagacttgcaaggtaaaatgtttctccaagacacttaaaatctgtctggctgtgttgcatccaaccattcgagttagcaagctttcagtcatggaagataggagccaagataccagcaattgatcttgaacctcccaagaattgagctgcctggtctgcatcactcaagaattgaggaggtggagcataatcttgaatgtacttcagcatcctgttacctctaatggcagcaagaacctgttgtttccatataaggaaattgtgatcattcatcttaatcgacaatgtgtgattgaagtacactggtgaagattcatcatctctggatcaagttcgatttgcagtcgagaaacctggtggtcgtctagggtaagtggagctggaattagtagttccaacatttgccatattcgccaccaatcgtgggtaaggctctgatacaatgttagtgttggaatcttttctccccattgttacagagtaacaagaaacaaagaaacagaaagagaaggagaagaaaagagaagaagaagacggaaagaaaaagagaaagagagtgaaaggaaagaatttaccttattacaatattgagctgaagtacacaatatatacatggctcaaggagccaaagataaaccaatagaccataacagaattgtaacaaaattggacagcaacaactaacaactacctaactctctaactgtctttacagtctacatgcatagaagcatttgaaaaaaatagaaatgttttaaaatagagaatgagtttacgtcatttgttggaaggtgttttgctctattgttctttgaatttttaaagaatctttatttgaaatgagctattgggagtgcttgggtagtatctaatttaattcaattgaaccgaaccgatccaatctaattcaattataaaagattagatatctaattacaattgaattagactggatattaaaagttagattctaattagattgaattggttattaatatcaatcttaaaatccaattaaaattgatttaatctaattacatttaatgtaagtaaaaataaattatttatatatatgaaaaattgtttcataagaatttttttaaatcaatatgcatatgcatatgcatatgttttataagaaaagaattaattgtttaaaagatataaattaaactattaactaaaactacctattattataagttactaccattttttatttatttttatttttttaaaaatagataaaaataataagaatgaaaattagtttattagaataattttctcaaaatttttataatgatctcaaatttttagagtattattgataggcagcacaacaacttatgacgtgtcattctacttgacaattttttaattcatgagaactaatgtcattaatcttttagaatcattttttttttcttttaaatcaacgaatttcaagggcataattttcatacgttattcattttcttatttcttcacatataatatcactatttatgattatatacattcacattagtttttttttctgagaaagagaaataaaaattagctgttgttactttttatattattttcttactaatagtttcaaataattattacttatttttatatatttaaaatgtaaaatttgatattatatattttttcttttatatatatattaaaaaacaatttaatatcttattttctattttgtaactgtttttaaataaataaaaaagaatattgtctttttgtttccaaattatattgttgacaaaaaatttagataatcattaacctttgaagtcattaacaaaagaaaatgaaatgagatttggagaagaaatagaataaaaaaaattaaacacaatggtttgaggagttagatccctcaaatgggacaaaagaaaatttgaaatctttgtcacatggccatgaattcatgacctcctacaacaagtttttcaaccgaatagtacaatattttaagaaaaagaaaatattttttaaattgatttttttctattttaattacaataaatttttgagaggtaaaagtgtaattttggtttttgctaagatgtatttgtaaggaatagatgtgtagtgatagagatcatgtattcttgtattttttttttctttatttcttttttttaaaaaaaaaaagattaaatggtcatttggtcattttagcattttagcaaaaaaaaaaaagaaaaaaagtgtattctcataaagattatattgttggcaataacagtaattctttcaaaaaaaatcaattcaaaatttatttgtgatatatttattaaaaaaatgacaatgcataaaaataaaataatacaaaatttaacatttcattaatattttttattatttttttaaaataactttatcattaattttaattattatcttattatgtaagataataaaaaaaaatatatatctataacttattgctatatctaactagtaataaaataagagttaattgtagtaaaactttaaaaaaattatctcactaacaattaaccgcctaaaccaatattttagcagcaatacccttaaaactcatggtctgttaacagttaatcattttcatataaatttctctgttaaaagccatgtttgactgtaatgaacacatgacttagtttaggattagtatggcaatagacattaattattgttatttatcgattatagcaatgggcattagagttagaatttttcaatctcagagattttattaaactctaagtatattagttatgttatatgcaaattttacaatttttataatttttgcctgacgacgatggaaaatgtgacgaatggccaaattagtcacatgggttagttagaatcttattatttagagggatattcctaagtgatatttgagatatcgagaaataagcgaggttatgatattggattattttaaccgtaagtcgctttatcttttaggtgtgttgaagggtattatggtcatttttggttttggtaattaggtggctactcttagtgggggcagctggccattttctaatagattaaaattaattaagtgtcaattattatgagaaaccaaactaaggggaaaaagaacaattgcaaccaaatatcatctctctctttctcttccattcgaaccctagagaagccaagggaaagctagatttctaggattgcagcaggggatttgtgaaattcaagttgtggtaagaaccctagaacctatttccacaagcttttttgtttttcattaatttctagtatgctaaggttgttttcagctctgtctgaaccctagaagctagagaatatttttttaggttaatttaagttggtttaggtttattttagctaaaattaggggctggtttgattgttgagcaagtttgagttcaagaactcaaacatggctcaacaattgtggtttgtgtatttttgtgctatttttagttttattgcttggatttggtttatatggatgattgtaggtgttttggagcattttggtgaagtttggggttgatttggttcaaaatgggggccttttatttttctacaataaaaaatgacaggtcatttttgcagaaacggcttgtcgtttattctggtacaatatccaaaaaaacgtctaccattttttgggcagtttccttgttttagggttttcgtgtgtttcttcgatacttaggactttgctatactttttatcgatagggagactttagtttcaagtttaaatccccgaaaagattttagaaagttgtttaccggtttatgcgattgtgatatagggcctccgttcagtgagtgagtttctattcaggtcgactggcacgcttgaatctggaaccgaggtaagataagcataaagtatggtatatgaatgtgtgtattgatattatatgcatgcaattatatgttttataggctaccaacactagtacggtaatggtactgagtgcatgtggtacagcctgagagtacaacccagtattactaacactagtatagttgggtactgagtgcatatggtacaatacttagtggtaatcggggtacgaattatacactaccaacactaatacagcgatggtatgtagtgcatgtggtacagcggtcgtaccctagttaagaacattcttgaccatatgacaagcttagttgataagtgcgagagggcctaattaaaattcgatattacactgtatattttatgcatatcttattgagtttgttgactcgccaatgtgttatatgtgtaggtaaaggaaaggccaaagcggtggagcagtgagtttggagctcagcagtgattgtacatatcgcgacagtacaacatagagggttctggcctgggaacattttgagtcaacttttgtggtcactatgtgacatgtataaaaaagtattattagtaatatgttatgttacaagaaactagttttgaaatcgggatcctaacttttgttaatatatatatatgacttttatggtgtaaatatttaaatgtttttcatgttgggcgttacaagtttggtatcaaagccaccaggttgtttattgaagatcgttaagatatgtacaatcattgccaaagatgagatcaactcacggttctgtaagcttttactattagcgatttgtttaacttataatatattagatatgttgtatgttgcccaaatccataaatgcgatatcagaaatgtatatgaccgttggctaacctatatacctcatgggttcgcaggccaagtcctaaagaatggacgcccagcaaaacgtaagaggacgtagagaaatggttgagactaggaatggtcggggtggtcgaaacccctaaaaccctgtggatgcagcagaggtcatggtcgtactcaaaggggtggccaaggggatccacctcaggctcgtcctgattgggagcagaggtttgctgagatgtaggactgaattaaccaacaagacgatgaaatttgaaggcttagacagcaaggttcccctgcagtgccgcctttacaaccatcagtttttgttgttcctacggtgccaatagaaccacctattgctggtaatcgtatggagcctctatatgaatgatttaagaagtaggcacctctaatatttttgagaggtcccgatgttatgaaagcggaatagtggttaacggtaattgaaagaattttgaatttcaagggagttaccaggaatgacagagagacgtgtgccacgttttagtttcaagaggatgccctagtgtggtgggagatggtgtccctcactcgggacgtcacggtaatgacttgggaagaatttcagaatttttttaatgacaagtactacaatgaggcagtgcgcagtgcaaaaaggaaagagtttactgattttgttcaaggtgagaacatgtcagtagcagaatatacgactaatattgatcgattagcgaaggtagcttctgggatagtacctacagatttcagcaagaaggagaaatattttggcagggttaaatgccaagattaggcatgacttggttatcacaactaatgataccacaacttatgctgaaataatggataaagttgtctgagccgaaggtgcagttgaattcctgcaagagactcgagtgatccctagtgtcggcaagaccattactcttcctactccttatcctggtagggagagaggtgtttctaccgctgagcagaagaagaggacattcacaacttctggtagttcgggctagaataagaggtttcatgggaacaaagtcaaaagagggcgtcagacttactcctatcctgagtgtctacattgtaagaagcatcaccttggggagtataattgaagagcttgttttcagtgcgggttggttggacacctcaagaaagactatcctcaattgaagaaagaagaacataaataagaagtcaagcctgctacggcgcgagtgtttgccgtcaaatattttattttggcattgatcgttaatcgatggttatgatcttaagcgcctattatgaacgaacacaaattgtgtctagttttgtgtcggtggtacatacgttggtcttgagaaccgacggtaaaaatataagtgtctatttaaaagtgacgcctaaaccctttttttttagtagtatttaacagtcccttcatcaactctaccaccaccaccaagactacatcaaaaaatgtttcaattttatgggatttagacaacacacattcacaagttgtatttagacctaaacccatgggtatgatctcccacttaggacattactataatcattagacgaggagaaaaggctataataattactaaattccttagagccactgatcatataaagctaaaagaggttaagaggagacatgtcctaatctgaatagccagccctatcgaatttagtttcatactatttagtaatcccaaagtaggagttattacaacttaactagacatggtgtttaggataccaactatcgaacttatatgtaattaagtcaatgcagtttcagataaagaaattatactgaccctccttaaattgaactaatgttattcgatcagccccaagaatggtaggagaccagccacaaacaccagaattattacctcgggaggcctcatcttcagcttcccgagtggtcatatttttaaagtaatagatgcgagcgacgtagtcacaatcttcttcatccttgggcatagggatttattgccagtttggaaacttgggggtcttaaagtaatttgtacattgatccctaccgagaagggcacatgccttcaagttatcattgtgcaataagaagttggtagctcgcaaaccataaggaaggttgagcaagatattatgcctttctttgatttctggtgtggggatgggtctcctggtgattgctggaaacatgaaaaaagaatagaattaatactattgaaaaaggatagtaactcaaaaccaagatttggagagaagtcagtacttacgtataattctaaatttggtagtattgattggatataatccagtggtccaaaaggaatcgtctttaaattattttttgttgggcagcctcacaatatcttgcgatcattggtatgggtttcgagataataaaaaccttctactccatgcttccttgtaggacaggccttgacgaagtataagtataaaatttctaggggtgttagacacttccatttcaaaatgttgtaaagagatttcaaattggctaggatcctgcaagagttttgtgcaagctaaaatggtataatactaagataattgtagagctctttgaaataatccctaagggggagagctgctccagcccttatatgtttgacgctccatgctctaattttagaaggctcgctggtgatgcaaccttcatcttggatcaaacgttcaggagggtaacagataaactctccttgagcaacaaatcgaatgcgacatcccttctcgttccttatgttgcacaatctcaaaatgtccctaacataagggccaatagacatgaccctggactcaattaattttgccttgaaagtgatagaaaggttctgaggggtcttagatttgcaagctttttgagccatgagttcaaaatctaagtgacctggtgaaaaagcaacagtggctggaggtaaaaatattagcttcgctaagggaatattaactaaactaggagagtcaagtcaggttactttacgcaagtaacaacatttaccctcaatgacttcttctaagaatcgcatataattgttagaaacttcctcttggttagacctaatgaggcggttcctaatttttacatcattaatttcaagtaaggattgaggcttttaagtttaaggtttataaactagagcttggagttgaagaagtctgatttctgaggattctgggagcatatattttaggttaaagtgggacatgaatacagagaataataccctaattcctggaaaaatagagcataaataaaacccaaaacctgcgaatcacgtaaccttaaattttctaagccctaaattacccaaacattcatataaaacttacacaaacaaattacaaatgcaaattaacacacatatagggaattcaagattgaaattttcaagaagtcagcaaaagcgaatgtcacttacttgtttgatgagaaattatgggttttgaacaacttcgcgatgagaactttgagttcaggaaaactgggtattagtgattccaaagtcgtggggtgtaatcgggtgaaattcgaagaaagaaagcaaaagacagtgagggcgtgcaatctcagagaggaaggtggttaagaaatttttgagttctaaggttttacgggcaaaaatggcaaaagtaaggggaaattttaaaatttatacccaaacggtgaaaaccgttcgatcaaggaaagaagagattgaaggattagaactagttgagaaaggaacaatcagagcattaatggtgatatgattcgcctcaaatttttgaacaaccaaaataaaagcatgcaaaatttaaatggaaaagtatgatcataccctttgaagcattcaaaaagtccttttttttaaaaaaaatattttttagggagcaactgttataccaatattttaggcaacaataagaaaataacacgtgtatcaaagctggaatatgaaccagctcaaatcacgcattattaaatgtacttaaatgactcgtttcatgaaatacagttaataaaaatactcaaactcactgccatataggcaatagcgagacgtgaggaataactattgattgatgagaccagcgagataaataggtccaccttgggataaatagaaaacacaataaaattgttcagaacgagtagacaatgagtttgtagctcattgatccacatgcttgtgagtatgagcttgcatctcattgatccacatactcgtgagtatgctcaaggaatgaagacaacttcaacattcactcaccttgctcttttgacgcattgaattaaccacctcgctaattcctctctcaacggctaaggaaggctacaagatgcatcataactcaacacttaacatttttctacgaagatgtttaagaaagataatattcagacggcaagaacaatttagcacagttagcataaccatttatagataaagataaagagtggttaggcagttatttgttattattccatgtgtacaaagatactacgtgagaaatgtccatatttcataatcagttacaaatgattagattccaatggaaaatctgtcaccttgtacatctataaataaggatagagcccaaagaacaaatgatggtcaatcttgaggaaaatagataatattacaattatttattcctaaaaaataatatcattgtaaaatgtatataaacacatcaatctttaataagatagactcgtagactataaaaatttaacttcaaaactacgtaaaaaccttcttattatttattgctttttatatatttaattacaatataattaattctacaggttatttattacaaaaaaaaagctaattatttagttaacaaaaaatttgcattaacaattatatcaatggtcactatagtaaaactcagtaaatataattttataattactaagagttcaattctatatttatagtagaataatcatgaaattaataaacaaaagattattttgatgatgaaacacaataaataatctagtttattaaagcttaaaattataggtctatagttcccgaatcgtcaccttgaaacactgtcaagtgagggataaagagttgtataatgttattcgaaaaaaatctattcagaattgacaaaatagtaattatttatttttataataaataaataattttttaaattaattaaatagggaaaagacaaaagttgttaagataaaatttgtcaacacaatatttgttgagacaaaaattatcaggacaaaagacatcatccttgtcctaaataagacaaggtaggtgcctatcctatagtagggtgtccctattagttttgtcttttaggttaattaattaacttagataaatatttgaatttgaaaagtggttaaagatatttcaagttggttgagatattttctcgtctgaaatatcaataaccggcaattatagatattatttaaataattaaatataatttaattaatagggaattaactactataaatacaagtctaatttgagaaatcaaaaagagagcttttcatattctattttcgaaaaacctagaggagaaaaagaaaaatattttctctctcaaattgttcttgctcatgtgttgaaaattatacatgaacaaattataacctttatcctgatagtccacactattctttgtgtgtggtggattaatttggaagactacggtatgagtttctaatcaaccaaaaggatacaacatacgagaaatttcgaggataccctgatagtcatcaagaggtatatgtattttttcacgtaatttatttttttgatttaatgtatacacatctggagatctattgagactatgatataatgataatcattaatacgaataattccgctgcgtatctgatttagtactataaaaccaacaagttgtggggtaaatattttttgtgtttccatataaaagacatgtggcacctagccaatatttaatgagttttgggcctgtcaatcagtccaagaagatctgctaggtagactttttccttgagtaatataagttcggatcttgtatctggattccacataatactcaggattcatgagcttttcgagacaatagttataccattgttgaccaacgaagtttacaagaatatctcaaagcataccgagacaccaccaaaggccattcgggaatcaaagtggaaagggcatatgggacaacatattatctcggatgattcttacgtggcacctctctgacacgatctcgaggaatctggtgacctgtcccctctgccagattttagaaaggctcatggcaaaaatgtggttacctttttgtggaactcagcactactctgacattgccttttcatacgacaccagctgtcattgtcaatagtaccatgcacggtatgacaaatttctttttggaattgggcctcacctacccagcacaatagcttacaaaaatgttaaactaatgtattttacaccatcaatggactttttcttataataaaccttagttcaacttgaatctgtccgacccattaagcatggatgtctataaatatgatattatcttctccatgtaaagggttcacaatccgagaaatacacatttgaaatgtaaaaacttcataaacgtttctgaggctgcatcatgaatttaggtttgttaacggttaaatcacgtaaaaaaaaatactagtgtttcctcatctttttatttatttttttttaactttatttcaactaaatatttaattttaaaaatctcacgatacgaaataaatacaaagtatgatattagtacgcaacacctcgtgcacatatattagtacacacccatcaaaaaattactgtatatatgataaaaggcaagtgtcacattaggtgcacatatgatttcactctgttttacaacaaacacccaacactcaacagtcaacacatatttttaagataaaaaaaaaaaacaagttatatttaataataataatatttgatattggttagaatgagatattatcaatggatacagttgggagtgttgatagctgagggtccataactccccttctatgggatgggagtgggacccaccacctataataatatggaagctattttctttttagttgtagtggttggcttggctaagaaaatgagcataatatttttagcaagaaatataggttatgagttttgagtttgagtttaagtttaagggggtccaaaagaaaatcagcaaagcaaattaggcaacaaaacaagagaataagtgtgtctccctctctatctcttattactatggctaacgacacaggtttgcggtcaggcttgatttggttggctgcggtggtggctgtggttggggtatgcacgttgtcgtttaagaaaatagtgggaacatacttggtgggagtagtgggccttgccggggtgttttgcccagattgggcttatttcgaccgtgacttctctcgctggatccacccagttaccgctgatgaaagggcctctcatgctgcttctcacagatctggactaccaaggcaagcttatttatcccttttctcttatatacattttcacttaattaattaatgtttaatatttgttaatttggaataataatatcttttgttttttttcccctttcaatttaaaagtaattatatgtgctaatatttgtttttgaattttttttttttgtttcgtgatttatcaaaattatttaactaagcttgattaattattagaattagaaaattttataattaagtagtgtttggtttatgatctgcagagttaggatgtacccaatgagagtgatcggctattcaataatttatgggcttgggctgtacaagtggtggatgttcgtctcaagctagtttagttaattaatcatttaatccactttaattacttatctttttttagagataaaacttttgtttgagggctaccgactacttctttcctttaatttgtaatataaatgtaccaaaaatttcaaagtaattatttttttttttagataattacacgacataccgaaatttctaacttttttattttcatactgtgggatagaatttttttcaaaaatactgtgtaagttttatactgagttaagttttcactattgttctacggttgttttttagctgttctactattgtttttagttgttctgttttgtgttctactgttgttttacaaaaacacagtatttttgaaaagatttctgtgtgagtatttttataaaagttactcaaatttcagtatttttgtatttttttttttttttttttgaaattaggagaggaaaatttaaatttggctattttcaaaaatatggaaaaaaaattattaaaattatgataaatatagcataaaaagtaaatgtcactaaatatagcattatttaaccaatcaaactaaaaatatggctcgctaactttcgacaaacttaataacgcccagtcttactcttaagacttgaagtcgtcccaatccgctatctcccatcggcatatcctctctgaatcattcggcttacagtgtccc

SEQ ID NO: 15099 - DNA, 2118 bp, Cannabis sativa
atatatatatcaaagttaaaagtacttaatatagtctgtttttagtttgattcttccaatatttttaaatatctctatttttagaacaattgataagagtggtcttttatagaaaactctaaccacttgtaactaaagacacctaaccttatgatgcaatgttggattatgtttgggcaaatgtctaaattatatatagcaatgctgaattgaacaattggatatatgaagtatggaatcaattgagacgtttgtttcaaagaaaaataaaaaccaacagtaaaaaaataatcaatggtggatagagatggtatttaaagtataaatttatgatatttttactaaaatccaacaaatatgtctctctaatctctgggatatataaaggatttaataatagaagagtccaaaacaaaagctgtgttttttgcaggatgcagagagcagtaattcgctgctatatatatttgcatttagtactctccaggctttattgatccagataatacgtacacgtactagctagtgttgatttagatattgtttcagaaattaggaatagagaaaccatttaaactctttaaccttctctcccaaggagtgtaagatcttttgcttgaaaacacaaacagagaatatcttagtgcctactttttgtgtacgtaccaaacttattggctgttagtgcaactgaaggctttgtctatagctagtcatcatcaacagatttttttctcaataatatatatgtatatatatcaactcttatatatttgattcaactacatttgactgaaacagtaagcttattagtgaaacgtttctttcataaaaagaaaagagtaccttgcatatacatataataataaatttgtttgtaatttttgtattccgtgcgtactaagtaatttagcttattagaaaagatatgaaaaattgattatttcttcacgaaatatttgattaagaaaaatgaataaatgtatttcagagagtactacacttaatttctgagatgtaacaaataattccatagttctaaatagatagtacttacaattttgttcaaaaacataaattcatattacccacacaaaaaagaaaaagaaaatattgaaggaaaaagtacttaaacatatatattatttatatgatatcaagttaaaatgagcagtgaaccattttatgcttaacttttgcattcatgatagagatacaatatttggattggtcctctaatttcgtgaggtttgaattaaagaatatataaaaagtagtaaaacgtaccccatcacccatgctgcgttgatctaggccagccatatatagctgacactattaattgtgaagggttgttatcacatatcagaaagctgatcagaagaaaaagaaaaaaggggctttaattaataggagaagaagaagaagatgaggaggaaagcttaaaaaaacacacaacatctgttctcatccatcactttcacaccttatatatatatgtgatcagttcaacgcccaataaggagaatgcatggatagttattaaccacgttgtccgtacgttttctctttgcgacaatcacacagtctactctctttacatttctctgctttcattatattaattaagcccactaattctagactgattatgatccatgcatcatacaatatattatatatgttagtaatataaaaatttaattatactcaaactcaataatattattcataaatttctttctagaattaaatatatttcaaaaaataacttgcaaaattagaattctaattcaaatccaattataccgagtatcaaatattaaatatctaattgtaatcaaattagattggataatttttttgaatattcaattggatatataaatcggttgccggatattggggtgcttaaaaatctatattaattagttgtttggataagtaattaattttacgtttttttatatatatgtatttaattatgaaaattatgattaaattttactactttttttattggatccattaaatctaaaatataatagataattcaatctaattcaattcaaaaaataataactcgactataacattgaaagaaattaaattaattaa

SEQ ID NO: 15100 - DNA, 4982 bp, Cannabis sativa
agagtaattaacagacatgttaaaatagggaccaaccgacttataagaatctcaaaagactattactataatttttcaatattaaaaacttattcgtataaagtgaactttttgagacttatactgcaattaaagctataatcataaaaataaaaacaaagaacatatacacacatgtcgtttcttctaatttggtccactgcaaacaaacgacaggtcgtttctattaaaatctcgttgtcgtttggaagagatgcgacatgtcatgaaacactaaggtagacacgtcatcacattctcagtctaaaaccctaacccaaaaccaaaaccttctcctcttgttcttcttcctcattctgccaaaatacagaacacaaaactcttccagccatggcgatgtctgccgaagcactgcatcgtctgaaagcaactgaccctccccaatggctggcaccgagccccacgctttcccagacggctcgggaagcgtcgcagaacctattctcctccctccggccgtacactccaaaatctccttttgataagctgttagttgagggtttcgacgctgagcagatatggcaacaaatagatctccaatcacagcctcttctattgaccattcgtcgagaattaaagcggttcgagaaagatcccgctgagattaagaagctgaagctggttgtagaaggtgaggagaatgggttggaagatgggagggagaaattggaggaggaaagcgatgaatttgatgaagacttagatggtattgacgaggaactcgatgatgatgaggagatggaggagaatgaggatgaagaagaagagagtggagatgaggatgaggatgagaaagtggaagagaaagatgaagaggatgataacagtggcggtgagtttgaagacgagtttctgaaaataaaggacttggaagagtttatggaggaggatgaagcaagggaatatgggctaaagaagaaagataagaagaagaagaagaagaaagttgataatgaagaagaagaagaagacgaagaagaaaaagaagatgacgatgatagtgatagtgatgaggtatgtatgtaggaaaggcatttccattgtttattgatactattgatgattttttttttctttctttaaatgaaatcttttcgggtctctaataattcttatttcattaatctagattggagattttgggcttggcgatgatgatgatgacgaagatggagaaacagataagttggaaggggcaaggtacatttttctcctgtcttgattatttggtttgcatatttatttggttgttctaaatggttgtggaactcaattttgtatctgttttcagtgataatgaacatttgggttgtatattgatcgggctaaatgctcatgaaacttaagtttgaatctctccttaatgctggactgtttgtatttgactgcataggcatgcaatgtatgaattgattttgttaccatatgcagacacactgtatatgttcataataatgattttatgtgcttaacccgtgcacatttggttatttagatatgaagacttctttgttggtaaaaagaaaaactcttctaaaagaaaatctaaatttaatgaccgtgacgctgatgaagaagattttggcacaaatgatgatggattggaaaatgaggtagagagatttttttaacttttttaattttatttattaataaaaattgtgttcatggtcttacaaaacaattgtaatttgaatttgagttgtatttttaccaagtatttattgtctcttatatatatatgtcttgtctgttttgttcattctcccatagaaaactctttctacacatgaaaaggagcttgagaagcttaaatcgaaaatagagctcatggaaaaagcgaacttggaaccaaaaacttggaccatgcagggagaggtgatccttgttttttaacgttctccttacctacacatttgtctctctctctctctcccccctaattgtcaaatttggactacaggtcactgctgcaaaaagaccaaagaatagcgctttagaagctgacctagattttgagcataatgtgagacctcctcccgtaattacagaggaagttacagcttcacttgaagagatgatcaagaagagaattcttgaagtaagatacatctttaacttataattatccaaagtatgtttacactgcagatattgtaatctatatttctgttggtgttattttctttgttcatcccacttttctggacttaaaggttcaatattaagcatttgagggttttttatttatttatctattttaacctttacctttaagttgttaacctgtataaaattcaagtttctgcaataatttttttcaaactgtatttctaccttattgtatatcaatttattgtaaacatttctaattttatttctcaccaaaaatcttatggtattttcctaggggcattttgatgatgttgaaaagccacaggctttaccctctaaagcaccaagagaacgaaaggagctggtaagcatattattatttggtgtagacatttggattcttgactttcttttagttcccttgaaggaagaagtaatgttttcaacttttcccctctttttatgacacgcaggatgaaaataagagcaaaaagggtctagctgaaatttatgaggtttgtaattctttgtctggagacatacataattgagtttgttgtttcttgctttgatatgtatttatcctatatatgtttgtttgtttttgtggcattgaattttagtggacctccaaatataagaggtaaataatatttaaattaaaataagaaaaaggaaataattgggagggataacaacattactgattaatactatatctacttgtcccgtgtcaccactaatagaggtgggagaatggatgggcccattaagaaattatattaagattttgagccatggttagcaaattggtttgcagcagaattctcttctttaaatgttggaaaaggttgcatgtaatattagagagtcgataaagaacattccttgtgttcctaagtatcccagaagactacaagacgcttatggggcagcagagtcactattatctcatatcacacaaatccattggtgctcccaaagatcgacatctcttccagtagaaagacttgcaaacaaccacctcaaatgtatacaggatgcactgtctatgctgatcttttcccaggatgggaaagaggaaactgaaaccacagaaaacatcttttggagcttatttaatctttggactggatatgttttagcatatacgcattgcgtgaacaatttatttttcttatttttgcttgtttaaattctagctaagagtaacacatagtttcctttttgcaggatgagtatgttcagaaaacaaatgttgcctccacactgccatttgtagaagaggagaagcaaatggtaaactacgacttgtctttaacattccttgtacccctgtacaactacctgaatgctctattgttccattctactttgcagcatatattctataaattaagctttgttatatatttgtgtgtgtgtgtatatatgtatatatatatatatattacattttgagttactaattattattttgatcaggcaagcatgctgttcaagaaactttgtttgaagttggatgctctttctcactttcacttcactccaaaacctgtatgctatgcttaaccagtcatcattttcctttattgtgaattacctatttcatttgccatcaatacttgtaatcatatggttttttattttctacggggtactgattaattttatttattgcaaataggttatcgaggatatgtctatacaggcaaatgttcctgctcttgccatggaagaggtatgaactgttaatttcctttttgataaataatctaatcttacaaattacagatcaatatttaacatttgtttccgtggatagattgcacctctggctgtttctgatgcagcaatgttagctcctgaggaagtatttttgggcaaaggtgacattaaagaagatgcagaacttacgcaagaggaaagaaaaaggagacgagcaaacaagaaaaggaaattcaaaggtatggctattttagatggttacactatcattcattgatgcttaaattttccatcttttttgctttcctcgtttatttgactattagaagaattggaagttgtctgattggtttgttaagagattacttgtctaaatcatattccttggttcatgatgtaactcataagcttgaaagggtaaatgttacgcaagtgattttaagttgccctcactatttgtactttattgttggctaaatatctgaaaagaattgaactcagtgcatccctgatttccgcctaacctggtcttgacccgagcagagatgggatctgtcttaagcaagtccccacagccaacttatctaatctctgtatcactaattacttatttgcgaattgcagctgagacagaaaagaagatggcaaataagccccgggataaaacattggcaaaccctagtgacggtaactagctctcctagtaccccaatcatttgtatattcatttttgttcctgtttgagtaatatgagccaaaaatattacagctgaagcggcaaagaaggcccgagatagtacgtaacttaaccaaaataaaaagtcagatctttgattcttggaccaatctatcatatggcatcttgtcatcattctggaaaattgaaggcaatgaagagttgtgagacatttggatttaccaacttgttgagggttactaagaggaagttgtaaaggggtgaaaaatgaaatattataaaagagttttatgtgaagatccacagctatttggtgtctgcttgctaattatgatagatggggttaagttacagaagcccccaaaaagggaatatgggaagt

SEQ ID NO: 15101 - DNA, 2417 bp, Cannabis sativa
tgaaagccactacctgtttatcctcatcaaaacttttggttgcaacagaatctttttcttcgtcactatcgctctaggtggcaagttacttccatagacaagagaaataatttctatgtctcttttgtctatggttttaatcatgaggatgggaggaatttgttatggaaggaattaatagaattaaagaggcaagatccatggatagtcctaggggactttaatgatattctggaaaaaggataaagaattggaaaaagagaacactatagccattccaagtttaaggattgtgtgagggagtgtcatttggaggatgtcaagcaaagtgggagcttcttcacttggaataataagcaacaatgggaagagagagtttattcaaagatagatcggataatggcaaatcagaggtggtaggatacttatgagaatgctgaagcattgtttctcaatgaagggttatttgatcacactaccgcaatattgaatgtgttacctactattcaaaattgtaggaaaccctttaagtattttcgaatgtggtcaagtcacccttctttccaacaaaaggtggaggacacttagaagaatgttgtacagggaacaagtatgttccaggttgtgaccaaaatgaaggttttgaagggtatattgaagcaactaaatcaacagggcttctcggatatcaagaatcttgatacacaggccagggctcacttggaagcatgtcaagatgatattcagaagaattccagggatcgggttgttcaacaaaaggagcaggaagcacgagagaagtaccaggaggttcacaaagcatatatttcttatctgcaacaaaaatccaaagtgagttggatctaagagggggttgcgaatacgaatctctatcattctagcctaagagaaaggagagtggaaaacaaaattaattctattgtgaatgctagtggtgacagagtagacaatatggaagaggtaacagaggcttttctgcaatactacaaacaacttcttgggacaaaaatgcaacatcagaggaaagtgcaagtgtctgttattgcagagggcccaatggtttctagagtgcaagctgaagctttgttagccgagtactccaatgaagacatcaagcaggctatgtttgacatccttggaaataagagtccggggcgggatgggtttgggagtttttcttccaagacaattgggatttgattggacaagaggtgtgtgaagccatcagatcttttctgcattcagggaagctgttaaaggagataaactctacagtgatcactctcattccaaagataaaaagccctaatttggtgagtgactttagacctatctcatgttgtaatgtgcctaataatgctaaatctgcagtgtactgtagtggaatcaaaagcatctatttaatgatgcaagctctcaaattattttctatcacttcgggtttggtgcctaataatgctaaatcagcagtgtactgtagtggaatgagtgagtatgaggttagaagggtgcttgacatgtctggttttacaaagcaacaagagccttttaagtaccttggagtacccatttgtgctaggaagatctcggccactaattgcagtagtctagtccagaaaatggtagctagaattaggatttggagctcgaggcacttgtcttttgcggggaggctggtattgagtaaatgagttcttctctccatccatatctattggtgccaaattatgttcctttctaagcaaataattaaggagcttgaagcaatttgtaggagcttcttatggacagggaaaagtgtgatgaatggagcaggggttgtagcttgggaaaaggtgtgttgcccaaagaaagtgggtggtctaggtcagatgtatattcctcaatggaatgcagcagccatggtgaagcatgtgtgggcaattgagaaaaagaaggacaatttgtgggtgaaatgggttcatagtgtgtatattaagcatcaatcttggtaggagtataaaactcctttcaattgaggttggtattggaggaaaatggttgagcttaaagacaaaatcaaaaactatgtacaacatagtgagttctcagcacacgattacaaaattgtagaaggccaagcttggtttgctcaagagcttgaaaaggtgccatggagcaatgaagtgtggtctagattgaatataccgaaacatagttttgtaatattgctagctatgatgactagactcaaaaccaaggatcgattactcaagcatggattgatagacatagacacttgtctcctctgcaactcggctgttgaaacagcagagcatctattttttaactgtgtttttgctgcagaatgttttgaacagatcaaggcatggttgggattgttggaaattatttta

SEQ ID NO: 15102 - DNA, 9502 bp, Cannabis sativa
atatttttgtaaatagccctttcccatttgcaaacctgttaagtccctaagattggcccattagcagagccaggattatttgggccgttggactcaatcttaatgggcttattatgttctagatccagcccaattttgataaaccgagatccttaaaccctcaaaaacctcagatgactcagtatctgaatggctttccttcatcatctttccgccaagtcaaagtgtctgaatactaataaggcacaacgaaatttcaatgaaaaaatctcaagaatctattaacagtacagctatggcgaacggttgcatgagtaggggaaggaacaacgaaatcacttcaggtattctaaagtattcttagtaaggatgattcttatagtaccagtaccaacctattgcttttctagggattttttaggaaacgaattggggaaacttgggatactggtattggggaaatgaaggctgaaaagaatcagccattaatcgagtatgaatgaaccgagcaagggctgtattcaactcttttggacttgcccatttgtttctctcgactcggttcagctccattaatcgaccaatttgttcccaggtaactcagttctctcgttgcttccactctacttcaaatcaacattatagttctcttctcatcaatacctatccaaagattttctcttgttccaagccgcactctgtggtggagctcgttttgggtaaagattggtgcactgagttggagaacgagttagagaattttaaccaagagtggactcacggcacagtcatttacgttttgaggagtttggacaaagacccacaaaaagcttcagattttttcttttgggtttgtgaaaatattgggtttaaaccgaattttttgatatataagttggttcttagaattcttgctcgcagggaattaatgaagcgtttttggattgtgcttatgagaatgaagattgcagggttgtacattgatgaggaaacttattcggaaatacttttgcaactgagaaagaaaaacttggcaagtgatgttgctttcctgacccaattttacaattcaactactcaagagaaggccatggatggtgttgtgaagaagtttgtaaatatcattaggggatcgaattggagctacagggttgagagacaattagaggaactcaatattgtctactcagatagtattgtagtaatggtactgaaggaacttagaaagtacccattaaaagtgggtaggtttttccgttgggctgctcaatttccaggctataaacacaatagtgttacatacagtgcatttgcttggactcttgctcggcctgacaagcataaagaattttggaaggtgatagaggaaatgaaaggtatggggcatgaaatggacattgattcttacagaaagatttcaaagcaattcctgaagcacaaaatgatggtggacgctgtgaaactttttgagtatgtaatggatggcccatatgagccctcagctaatgattgctgcaggcttttacgtactatctcagtaagttataatccagatctcaatttggtgtatcgagttctaaaaaagcttgagaatactgaagctaccgtttctaagactatttatgattggattcataggtctttggcaagtgcgggaaggtttgatgaagcagagaagattgttaatgtgatgagcaactcaggattcgcgccagacaacatcacatacagccaggcggtctttggtctttgtaaggctaagagacttgaagaagcttctatgatgcttgttgagatggaagaaagtggatgtactccagataataagacttggaccattttaattcaaggtcattgtgttgctggtgaaatcgacaaggcgttagtttggctttcgaagatgatggaaaagcatcttaatgttgatgcagatttgttgaatgtattaatagatggtttccttagtcagaggaagatagaagctgcatatacttttttgataaagatgatggataaattgggtttaagacccttgcaagttacatacaggaaacttatcgaaaagctgttacaagtgaggagatttgaagaagcactgtgcctgcttcggctaatgaagcgagattaccaaccctatccggatccattttctgactacatagccaagtttggtactgttgaggatgctgttcaatttctcaaggcattgactctcaaggattatccatccccttcagcttttgctcatgttttcagatcattacatcgagaaggtaaacactctgaggctaatgatctactttgcaagtgccctcatcatattcagcaagattttgaaatttgcagaatttttggcactattcataggaaagctgcagttgtagaacaatgtgcagatggattaaatttgtaacatttgattagaataatatatataatttgattcattacaactactttggtagaaatgtttatgacttgtgtacataaagaataccatttagttcaggcatatcttctagtagctcttctgctagatggcttacaatcgtaagtatcaccaaaaatggctgaggttttagctttggattgctaatgttaaaagattaatgatatactaaactagtaaatgttgtacacaaattatatgtaactaaattttgccaataatattgttaggtgagatcacaaaattttaaattatgtgattgaaattagttcttcataatcatctataatttttatgtatccttacaattttgtgtctatcagatcagcattgactaatgcattttattttgggattatataataacattttttaattaagttttaacattagcgtcctagaaattttttcaaaattcaaacataaatgttctagaaattaatatgaattttaaatgaattattaaataaaaatgttaatatttcaataaatttaaaatctaataagataaaaaaaaaaaaatacatgttttttcgtttgattataaatattaatatatgatttaatattgcaatcactcaaacaacatcttgcaaccacttcaaaaaaaaaaaaaaacatcttgcaagagaacacaaataattcatctttaaataaataattatatataagagagccatacgaaatatatatttaatatatataataaaataacatgtaagagagtagatataaattcttatgaaacaaaattgatttttttattcaaaaaatttagtacattttaatataaaattttattacattatagtatgtatgtacacaaataaattatacacaaacttaatatatttttattgacaagtcacttttaaaaggttcaaattataaattagtatgtaatttttttatgtgaagatatcaatactcttagatttaataactactataaaaatggttaagcattgtgaatatgagtgtcatttttcgaaattgagggaactatacagataatagcaatccaaatcttgaaccggatcttcctttccctgcccgacccgaccaaaaagaggtgccttaacttttaaaccactttcaatttcaggtcttaaacctttgagaccttaaaccctagagcttgaaatgggcaagtggcatttgtctctgtaaaacttcatagctttttgacttcttcagtgtgagagtttccgaagcagccatgaatcgagcaaggactatactcacctgcctcagactcacaaactcgtacatctcaacccagattcgcagcgcaactcggggacctttttctcaggttattcagttttctcacctatctccatctgttcaaaatcaattggattcttcttctcaattcatcaacacccgtcaaaggttatccttttcttcgaaacccgactcggttgtggacctcattgtagccaacgagtggtctactgagttggagaacgagttagataactcgcatctcggatggaaccatgaaagagttatctatgttttgacgaaactgagtaaacacccacgaaaagcttcggatttctttaactgggtatgtgagaaagatgggttcagatcaagttcttcaatttatagcttgttgcttagaattttacttcagaaagatatgaaacagttttgggtcattctaaagaaaatgaaagaacaaggctattatattgatgaagaaacttatttgacaatgctagcacaactgaaaaaggaaaaaatggctagtgatgttgctgctttgtcccatttttacaacagaatgattaaagagaatgccatggatggtgttgtaaaacaggtggctagtgttgttttggggcaagaatggggtgacaaggttgagaaaaaattagcagagctcatagttgatttatcagataattttgttataagggttcttaaggaacttaggtcttgcccatcaagagcttggagcttttttcaatgggttgaccagagtccaagctatgaacacaatacaattacttacaatgcagctgtgagagttcttagtcgaagtgattcaattaatgaattttggattgtggttgagaaaatgaagagcgctggtcatgaaatggatattgacaattacataaagatttcaagggcatttcagaagaataaaatgatggaggatgctgtgaagctttacgagtttatgatggatggcccgtataagccctcgcttcaggactgcagccttctgttgaagagcattgcagcaagtgaaaatccagatttggatttggttttcagagttgctagaaagtatgaatctatgggacacaccctttccaaggctgcttatgatgggattcataggtctttgacaaagtcagggaggttcgaagaagcggaaaacataattaaagttatgaaaaatgcagggtatgaaccagacaacctcacttatagccaattgatctttggatattgtagggcagggagatttgaagatgcctgtaaggttctggttgatatggaagaacttggatgtactccagatatcaagacttggaccattttaattcaagggcattgtgctgctggtgaagttggcaaggcatttatatgtttcgcgaatatgatagaaaagaatgttgaggccgatgctgatttgttggatgtattattagatggttttctcagtcagcaaaagatagagggtgcttataatttgctggttgagatggtggataaaggtcgtttaagaccttggcaagctacatacaaaaatgtcattgaaaagcttttaggtgccaggaaatttgaagaagcattggaccttcttcgtttgatgaagaaacaaaaataccctccttaccctgaacctttcattcaatacatctcaaagtttgggactgttgaggatgcttatgaatttttgaaggctctgagtgtgaaagaatatccaacttcatcagcttatcttcatgttttcaagtcattttttcaggagggtagacactcggaggcaaaagatttgctattcaagtgcccccatcatatacgcaaacatcgcgacatttgcgatctttttggctctgtggagagcaaatctgctgtttaacttttattttaataattacttcctgttttttttctttggctgaactcaactagtcattttagttgtacaacaatctttgtttaggttaaatgaagttttttaatatgtcaacagcaaggaacaactctgtaatggcgcaaggttttcccccaagcaatgtaataaaaaatggttgtaatcagattgcaacttctttctctcattttctttattacaagtgttttcatcttgcaaatgtcatatcactattacaactgacttgcacaataggctgcaattcagtcactagccgcacatgaaaatacattatttacaaaaatcagtcagcaatctcagaacgttccctggctgcagtttcaatcattgtacgcaaaaatttgctggggtcacaactgtaaggatttgaaagagctgcatgtgctaaaaaagggagctttcttagggatcgtccgctcaatccctatagaaaacaataacaaaatcaaatccatggtcgaattaacaaaggagatccttatttaagtgtgcattttaaagcatattttgcttttacctcgcatgcttctgcagcttcaagcatatgtttgcacaactgcagtgtttcagcttcttggccctctgccgtattcaatttctccttcaaactagtatagtttggaagcataaattgatcgcaatcctattacattttcaattgtgttaagttgaagcggtttaatttaaggggtgtatatgaggtggtgagaaatgcataccttgaagctcgataatattctagtcctaataagttcctccaagcagcttctcagaatttcgtaacgagcttgaagtgttgggggaccaacatatgcttttatatcagcccgatcaataaacgcaatgtctgagacaaaaataaaaatgttaggttacatgctggcctttggaaaacttctcatgctacaaatgataaaattcagcaaaaaagagtacaaaggacaaaagaggatgttaaataagtatgaaggaataaggaggatgccaaatcctctcttttaccaagcagtgttcaagagtacacaatataaaagtaactctaaaacttaccaatagcagcagtaatattagatgtagtcaaaatgatcacatttgggaatgatttcagcttgtcaatctgagttagcagtgcattcacaacctggaaaaccaattttgagaggcaattgggtaaattttgatttattttttatcttgttcaaaatgattttgccaaaaatcattaaatagtttatgcagatccaataataaagagaacaaaaccatcttagaagagaagagttgcatgtcagtacccgaatagaatctgaaggttcagaaccagacaaagcagcctttctagcagcagcaagactctcgacttcatctgcagcataaccatgatccatgaatatttatcactgaaagctagaagaaagaaaagaaaagtgtgaaattagaagttctatataaattaatctcaccaatcaaaacaaataccagattgttttcttcctctaccatttcttgaattttctcaaaaagccttgcaacctacaatagaaatgaaccacgtaaactagattggattcttagcataatttctagtgtcaaaagcatagctgtaagggacactacataccagcttgccactctcagaaaaccatttactgaacaaagaatgtgcattcacttcaactaattgggactgtgagtatctacaaataaaaataataatgaggaaagatgcggaaaaacagtccacttaataaactctttactcattggataaatgataacgaacctggaattaaaacgtatggacaacttttgagcaagtgctttacataacgaagttttaccagtccctggaggtccatgtaaaaggacaacactgccaaaaaagctctccaattatacaaattctgatgggttagtgtatatgaatatcaatgaaatcaacaaacttgtccctaccgattccatgaaacaagaaatggatccacacccttttcggtaaagagcaatgcacttgcggcatacctcagtagccttttcttgagaccaggttcataaattaagctgcatatcaattgaaaatgcaatgtcacaatgtgaatgattttaaaattattcaagggaaaagaaaagttgcagaccaacctttcccacatgccatcaaattcctttgcaggaagactccattcgttgaaggtagaaggttgtccatccccacttaaatcctcagatggtccttcctcattaagctgaaagaacaagtattatgaaaaactttgaataaaaaaaaaaagaaagaaggcccagacaactaagttctgaagttttttagatcatggtaatggaaaaccttttcgggtttactacttaacaaagttaagatgatcagaaaatcaatatagtttctaataaaggagtttaacagaggaaatctatgattagactttccagtcaaaatatgggacaagttcactcaattctagataaaattacgaatctagttagcaagaatgttgaagtaagatgccaagaataaggtgcgcaaaagaaataagaaaacacaaatgctgcaactggaaatactgctatttgcaaaacattttcattttgtacctgaaaaacatgtacgtcaggcgtgacttgccagaacaaaagtatgtcattattctgcacccattcatctgcagaaagaaacagctaaattatcacaacaggaaaaggccaacacaatctcctatgtatggttggttaagcaacctaacataaaaactttatacttcttccgaaaaactcattatctatgataaaggaaactcagaaagcgcagtaataactcaagctgttatctgattacaaaaaagaagaaaaaaaaaaactcaaactgctagaatttgttttataattactccttttcaatcatcacagtactcttcaaatatttctcccaattattcctacacagaggtttttatttcaaaactaaaattaatgctaaaaatttatccaacaacttcatttcacatttaaaaaaaaaaaaactcaaatgtatacaagcaagcccttttaattgttcgaaagttagaaaattaaatatagtaaaagcatacctgtgtcacaaatttggatcctttccacattatctgtgagaaacttgttgtcaagaggcactggaatgggtccatctacatagcttaagctcctcttctcaagcattctaagcattttataataataatcatattaattaaaaaaaaaaaaaaaaacctcaatttgacaaacagaacatcttctccaaaaattcacgatcaataacttaatttttataatttcaacaaaagttcccaattaaaagggattcaaatacgtacttctccacggccaaacgaacatcttctatccgagctgtgcacgaggtctttaaacagacttcaactgcaaaaaaaaaaaaaagaaaaaggtttgaaacgatgaagaaattgaaaattggtgcttaaaatgagaagctaattacaagaaaggagaagaatgaagaagaggtcctgtaacctgaaacaagaaatttttcttgggggagagtggaaggacagacggctgattctgggacgactccgtttagttcacacatttgggtatcttgtgggttttgcagagtgatctccatggaagcagacattggtgtcagagatcagtaggagtaggtggaacgcatcagagagaagcagaaagatcggtttgactgaaccctagccaaggcagtgagagttagggcacaaacgaagaaaaaagtcagtctttgaaaatgagcgggaaatttgtaagagacccactcccacacttcacgcatctaactggtttatattttccttttctcattcatttctaaataattcttcataatattaattatttctttt

SEQ ID NO: 15103 - DNA, 7996 bp, Cannabis sativa
gattatttatgagctagctaaataaacttctctatttagggatttgatagatattgactaagattattccatggattaatgttatttgattgttctttctttccctattattgtgatttattcatatttgtgcttattacatgtgtttgattgaccatcttatatgcatgatctatgatctcaatacaaaatctaaaaagttagtgttgagaatgctctaaatgaataaacatagattttgatgtgaaacgagagtattcacatagcttatgtaacttttagattatagcttaatgcgaattgtatgctgttctatctcagagatgcagatgcagatgcagtagttggcatgcacatgcaatttatgacttttatgatctgagaagagtttatgttaatttataatttatcatcacataggagaaagaagaatggttaattagtgttaacaattcggtaatcaaagcaattgaaatcatatccctataatttcacatctatttaaatatattgttatttgcgtgttttgttatttaatgtttacttagattatttagtttttaatcttttttattagattgccaaatagaaacaagaatttaataaattggtacttaactacagtcctcgtgggaacgatctcacttatctgagtattacttgttaaaacgaaacgtatacctgcatgttaggtttatcacaacaaccactttacacgatatgaaccacaaatcccaaaccccataaactatgaaagctactatcaaataaaaaaattagtataaaaatcacccattaacttatttcacatagacattgataaccacaacactaatagttttagaaatcccataaaattctaaaaaatacgggtctagttcttaccgtagtcgagagaaggatcctcttcaccttgaagacaaaatgacatttcctaaaccatcaacttccactaattttttggattttcttcaatttcgtaggataatggcgaagggtttcctttgatttgttgggtttcatgtctttccccctttttcccccttctctctctctctctatatatatatatatttggggtttgatttagttttttttccttttattcttctatcattaatttgttattttcattagacattttatttttttttcctttaatttggatttttgttttttacctttgtttaaattggtcttaaaatgaaaagggtaaaacaaaaattaagtgtttcagtcaacatataccacgtcatgtaatttttagtgacatggcagtagcgaatttacctacacttgttcaataatcgagttacataggcaaataacacagttaggtgaatgaaagtgagatttcgctaacactgtaggggttttgccgtcaaaatttagattttgggagttaatttctagcaaaataaaaataggataaatactattttagattctgtgttttacaaaaattacagattggaccttctattttgttaaatgaaaaatggacaatgtatttttgaaaatagtacaaataggagtctgagctgatttttggtcaaaataaaacttaataataattcgacctagaggtgttataacaaatctggttaaattttttacatatgttcctgttagcaattgtcttcaagttggttatattaaaaaaatatcgaaaattaagctcaagatcatatttgtattattttaaaaaatacaggctccattttataatttaacaaaataaagagtttaatatgtaacttttacaaaatataaggtctaaaataatattttatatgccacagtttactcaaaagataatataggtgaagaaactcatttatggtgttagaacactcagagtccacaacaatctctttataataaagattctttaaactttttaactaaatgtgatgaaaaaaaaagtatctatagctcttttatattatatatatgtataataaagatatacacaaattagtgcaacttgtatatatatatatataattaaatagaaaatgaatagtttattttaataatataaaaataaaattttatttgtgtatattgtatatatgtttaaaaattattattttaatagtgtagaaaataaaaataatattaatttaatgatggggaaaaaaatataaagaaattatgtacggtataatataaaattaaagaaaatataattttaatgatgtatttaagggtaaatatatatatatatttttttttttgaataaaggaaaatttttattagacagataaattcgctaatataatggactaaagagcaagggaaacatcgccctcggtaaaaagacgacctgaccaataacaagcaccacgtgccatatagtgtgtggttttgttagcagaccatactgacaattctgaacaaataaactaaatatagaaggcatagagaccgaactaagaatagcttgaacaactaaaatgcaatccgtctcaacaatgacatttgacttgttattcttttttatctaactaagtgcctctttgacacttagaatttcaacaatttcgggttggcaacttatggtgaaaatagttaaaaatgcttcgattatacgcgcaccgcgtgttacaagaccagtaccaatcaatattacttgaatgattgagggattttatacattgcatgggatattaaacgtacatttccaataaagagagagatgcagaactgacagattatgatgatattggaagccagtaaatattttctctacttactattgtgtgtatattacatgttaacatatcaaaaacagttaccagttacgtacgaatataaatatttatatattcctttatttatatataattttccacgtaataactaaaaatataaaatctttttctttgtgaagttactgaaaattgacgagcaagaatataattcagagactctgattttgcagtttatatataaagatcttttagattgaatactacaaaaattgaataatattgcagattccattattaataatataactattaaataaatattgttaatattgggaaactacttttggtttggtgttaactctttaatttgattagcttataaacactaacatatcctctttcattttccccaactttaaaaaaccgccatgaaaaaagctttgctttcagctaattaataacgagaaagtaaagcaaatataatataagaccaaaactccccatatactaaactttctgaaactcagagaaaaatgatgatgcctccaacaatgggggagatgtggacgacgatgggttcgagcatagccagcttcatgttcatctgggcaatcgttcgccagtactgcccttatgaaatccgacgatttctcgagaaatgcactcaccgagtcaccggccacttctacccttacatcactatctccttccacgaattcaccggcgaccggctcaagcggagcgaggcttattccgccatagaagcttacttgagctccaacacatctaaaagcgccaagcgactcaaggccgagatgggaaaagacagcactaacctcgtgctgagtatggacgagttcgagcgagtcacggacgagttcaaaggggccaaagtttggtgggttttgagcaaaacggtttctccaataaggacaggaatgtcaatgtcttattgccccgaacaggagaagcgtttttacaaggtgagttttcacaaaaggtacagagatttaattactgattcttatttggatcatgtgattagagaaggtaaagagattagagtcaagaacagacagaggaagctttatactaacagtcctggttataaatggtcaagttttaagcaaactatgtggagtcatattgtgtttgagcaccctgcaacttttgagaccatggcattggagccagggaagaagaaagagattattaatgatctgttgacttttagtcaaagcaaagatttctatgctaggattgggaaagcttggaaaagagggtatttgctttatggtcctcctggaacagggaaatcaactatgattgcttgcatggccaatttgttgagttatgatgtttatgatcttgagttgactgctgttaaggataacactgagcttaggaagcttttgattgagactactggtaagtctattatagtgattgaggatatcgattgttctcttgatcttactggtcagagaaagaagaaaggtgagcaaatttcaggggaagattatgagagaggtaaggaaaggaaagaagcttataataaggatcaagaagggaataataataataataataataacaatggtggcaatggtaatagtagtaaagttactctttctggtcttttgaatttcattgatggactttggtcagcttgtgggggtgagaggttggttgtttttactactaattatgtagagaagttggaccctgctttgataaggaggggtagaatggacaagcatattgagctttcttattgtagctttgaagggttcaaagttcttgctaagaactatttgaaacttgaaaaccatcaaatgtttgataaaattcagagtttgattaaggaaactaagattacaccagctgatgttgctgagaatctcatgccgaaatcgcccactgatgatccccagagatgtctttgtaacttgattcaagctcttcaggaggctaaggaagaggaggacattgcagccacagatgaagaattgaaataaaaaataaagcaatcaaggaagaagaaggcacaagttcaattgaaggatagtgaaaacatatgtaatgtaggggaatagtcttactattaagagaattttcttagagctggtcatcatctatggtactttgctatgaaacggttctggttgattattaatcttgaataccattataactaaaataaaataaccctcttagtgatactattccttcttcttatatctttaaattataaattgaagcatgtatacctacaacccggtttggtcgttattttatgttgtttattttataatatcttaatacttgtaattatgacccataatgaagtagtttatttcatcttcaaggtacatgtaactaattgttgtaaatttaagagtttatttctggttgttcatttgttgcaccattgaaggagtagaaagaataaagagaaaaatctattataattcaaaagaaaaaaagagtcttattaccattcttagaaacaaaagtaaaagtaaaaatgaacatttttcacatacttgtctttcacatactcatggattgaagtggataagaatgattctcaaagggtgatcgataaaaagtgtactaaaatattagattgctggaaataaagtatgagcccactatattttttatttaaacaaagattaaattgtattattaaaaataaaatttctccacaagagaaagatataagaagtcctttttgtcttctgaatgtactttgcaacaccagaaataatcaatggggaaatgacttggacatagactcactagggtgactttacattagtagtggtgtgcaatatgtttcttgttttattgaggagaaagtgaccaactcattcttatcagaaaaagctttgtacggacgcattccaccatcaattttagactagttctatttttaattataaattgttgtggaccgcataatatgatttcaatttgattatatacgagtattgctattatacatgtatcacaccatatgcgattcatattttataatagatattcaattaaattttaaattaaatatttaattttatcaataacaatatagtttgttcggcagtattacaccttttaatgttttatttaaaaatatacatatttttgaagtaaatgtttttgtaagagtatagattggtttgtgttattcatgttttgggagaaagactaaattttaacaacaaaagcctaattacaggcccagttaagataatggattaagttactaagttaggtcatttaggttctagaaaaacatctcacccatgcgagagaaggacctagcagagagagcatttgaaaactgtttagtaatgcttctaaaagggtaattaaatagatttccgaatgtcaagattgatatgatgctcatttaatattgaatcccaccatattaggactttgtctctaaaatcaaatccaaaaattatgcaaaccgtaaaaggaaatatggtaattgtctaacaattattgaattgcctttattacacacgaaggtggcccacgttttcctccaagttgttttcacgtgtacaaataaccattttctcacaggctgggtctcagcgaatgagcccaaagtcaatatattacttgtatttacctcatcaatgggccatgcttacatgcaaaccctaacctataaatataacgaaaccctttcatgcaaagggtgagaaattcaattcttacaagctaaggcaaaagctagggttcataactagacaagaacacatgtgtaatactcgaaggcttttctagccaaataatattgactcgtggactagatttcattaacactcaaaccacgtaaaaattcttggcttgacttttatattttatttattttctttaacttttattctattttaaataaatttccaaaaaaactcaataaatattttgatactttcgttgagagctaaagaaatttgatactaacattgtatactgcaacaatgatagccactagaaccacaatcaccaaacctaccactcgtgatggggataccaccatggatgatgttaatcctcctcccactacacatgtagagacaagtgttgttggggagggagagacatcagaagtgagtagctgccccgcaaagaagaatcaacaacgttagaaatacattgatgaggatcccattgacgaggaggatcgggtggttcaggaggatgatccttacgatggttataacaagaacgatgaggagtattattatgaacaagatctagaagtgattcggatggcttaagaactcgctgagaccaaaaagaaattggtggagcaggaagaattctcacgccaaatgtgagaaaccttagcacgaatacataccgtgatcaagcctgaaaaggaagttcccgagaaaaatgctcctgacgagcctactctagaagaaaataataccacaaaaaaggttaatcctatgaatgttggaccttttgttcctgtaagggagaatgaaaaaggtatcatggaggaacctgcaaacaagaatgttgttgatgctccaaggaaaaacaagaacgcagccaaccaacctttgcaaaaaacaaaggctgccaatgctctagggtaaggctgccctattgatccgtgaggcggtgttgtgcgaaacgataggcctgatgcttaggtacaaaggcctacctcgaggattaaaaaattacccttgtgattttgttaaccagagtgaaggggtagaggagatctacgcaaaagatagtatgtcaatagcggacctacaaaaacgattaaatgcaaagagagataaacccaaaggtgagaaagcaagacctcacagaggcaatctcaggaatagtatcaatgacaggatttgaggatgtgagttcctggacgacaataccaggcagttggaagatcaaataactgtattaactaagctcacaaaatgtctatcccagaatcaaagcagggctgcatctgatttagaagaagaggatctgaaaccatgtgttagaagaataatagaggtacccttaccttaaaatttaagaatgcctcaaatggagctatatgaatgtagagcgtaccctggcccatttgtctaaatatattagactgatgcaagtggaaaatgcaagtgatgatgtgaaatgtctttgtttttcgttaactttaataaagttttctaaagattggtggaaaatgttacctctcagatccattcaaagctcgagagacctgcaatctctttttaaaaaa

SEQ ID NO: 15104 - DNA, 5934 bp, Cannabis sativa
  modified_base (3098)..(3101): a, c, t, g, unknown or other
atttgatcatatattacagatggggtctacaatgagaccagtaattttcaatgacagagtagcaacagcattaaagaactggcaccattcagccaaaaccaagaacaagaaacacaaccgaaattcggagacaaactcgccattctcaagtaggcctgcaactccaacatatggcatgtccccagttcatctgctgcaaaattacagaagcacagcaactgatggatactatggttctccgaggatgtctaatgtcgaaaacgattactatgagcctgaagggacaccatctcccaacaatggaccagctacagcaagtgaaatacaaatgaataactatgaagttgagaaggatataagtgaggaaggacacccaatggttcaggaacaaagctcctcctcacaacaaaatgaggtcaaaatttccttatctcacttctcatttaggaagtgaaatagataacactactgttttagtcttataataacttcttttctttatttcttattatcttttggttatgtacattttgttgaagatgataatatgtataagcttgaatttggtagaaattgcttaatacatatccaataccaaatacatgttgcattgatagattatcttttttattctttaggtattatgtactcataaaccaacttaattttactttttgaagtaagttttgtttaatagataaataccattttggttcaaatgcttagaagtaataagaagagctctacatttatttggcttcttaaatttttgactttgcccctagttgtagtgcttctaatatgcttagtggaattattcaaatcatcaatattgctttatcgtttctagatattccacctatactataatagcattagctgtcactattaaaaagaaaagaaagaaagaaagaaaaaaaaaaggtttgtagaactattcatggtgcgagttgggtgggtgactatggaaaaagatttcaccaaattctacatgtgcggtttaaacttgaatgtaatgtatttatttccctttcaaaaaggaaaaagaaaaagttgaataaaattgattagaaacttaagcatatttggtaaatttatttaagatatccttgacaaaagaaaagaagttaaacatcaaaataatatgaataatacttttctatcgtgaatgaacatgtgataaatcacaggtattaatgacaaacagttataattattcaaactaaaataatagaaaaaattatgacaaaacatgtccaaaattctcgatattaattatcgattaattataaaacatgatgttaaaagacacatggaatattctagaataacttgtgcatccaaatctaaaaaatgactagaaatcaaatgagtatagtaaaaacaccattattaaaagaaacaacaaaccataaaaatttgcaacacaagaaaacaaaaaaataacacaaatgaaaatagaaataattggtactactcccccaaagctcatggcatatgaaagtagggaaataattggtactttttcattctctttgtaacttctctttggtagaaatataatatcattagctaggtttttttatttatttatttttgaaacagattctccacgagaggtaaatgatttacagcgaaattaacaaatcggtaacaagtttaaaacttacaacagtagaaagattcttattccaaacagcccttactccattgtcaagagtatacttaactagataataaaaaacaaaactctaagaataaaattaaaaccatgaaattgggttctctaaagatccttaggttatgttttatactactttttgtttcttcaaattagtaattattgagagtgcaatcaaagttttttattggtatgagattttttaagaaggcacctaggaataaatttatgaaggcttaactcaaaacgaataataacataaagaatggacattatggttaaaattaacgattgatctaagaaatttatagttaaaatgagtgaacatttttcttggaaattctcatttcaccatacttgattttttttaagttgataatttatttttttcaaatgatgacaaaagaaaggagatattctcttaaaaaaaatagtaatcatttatcattaatatagtgttcttttctttaataaataagaaattagtattgctcttgaattgcaacagcaatatgatttggtttttctaatatggcaagaagaatatgattgatgtatcatgtatgaactttatcatgtaaatgagttgaatatattattcatgtgaactattttattagtgtaaatattaatattctcaacttcaaatatacttaaatattttgttgtttcctatgagattctcttcttatctcttttgataagtgataagatgattcttataattataacttaacatttttgtccacatacatgcatttccactaactaatcattaatttgcttttgaagtttaattaagagatatccgacttgttgatgtatactttacagccttcccggccctttttttctttctatttttccttattttctttccttctttaatgatctttaatattagtgcttaattttttatgtgtttcatgagtaatctagcctaattaataaaattagggtttagaatctacttaatgaaactaacttcctttctttcagttgctatgtttctctcagttataatggcaacccataattgcttatatatatctcatatgaaaaggggaaattaaaaattaattaaaagctgtcattaaatatttttaaaaatatattctaatcataatgctcaacactttttcttgtaaggtgtattagagagttgttggtaacaactaaataaatgatttaaaatactaaaaagaaagaaaaaacaaaaacaaaaagcctaaatgcataatatattcactaaaaaccagctaaatctttaactacaatatatataccttctttactcttccttaatttcttttttgtaagattgttttcttgaaatgttttaaaaggaaagctaatttccttagaagaaaaaaaagtctttaataaaaaaaaaaatcatttttatacttcaaaatannnntttttatatatttttacaaaaatttacatagaaattcacatagtaatcaacggagcaactaaaatcacataacaactcacataaaaatcactgaaatttaaccaaacccgtaaatttaaaaataaaaaaaaataatatatagagtaattctcttaaaaaaataaaaaatgaatgtgccgtttattagagataccgaaatagaatggaatagaaaagaaaaaaatttcattttattcttttgttaggttgcattttataagtattagaatgttattttaatataatttcctttctatcatttttttttgaataattctttactatcatattagtagaatgactatttcattttgaaataaaagaaaagattattccgataaaacatgtgaaaaaatttaatgattttttaatcaatttttgtatgcatcttaaattttatttaatttcattcttattcttatttttattcacattcacattgctattcttacgctttcattcctccccaaccaaagcacctaattttcttaaaaaaaaaaaaaaaagtcattaaaaaaatggaaagctaatttccttaaaaaataaaataaaagaggaaagttaattaaaacatatttcattattgtcatcattatgtaataacatagcattataaatatgttgaaatgaaaacaattattttgacatttatataaagccctaaacgggtcttcattgtacaattactctcattctcattacgaatctccaaattaaaactcaaattaaaaaaaaaaaaaaaattaaagaacaattacaaaaagcttggcttgctttgctcttttcacccaccctgattgactgaatcaagaccgttcgatcttcatcgattgcaatcatggaggtccgaccccatccgacggctgacaactcgtccgccacaccgcgccaccgtcagcttccgactgcttccggagctcgggcgaaacagcccgccgtttcttccaacccgatcgacgtcacctccgtctcccagaggtcagtcactctctcaatcttttctatgcgttgatctttttccctgggaaaacgcaagaaaggaaagttgtaatttgttaatgtggttatgattttggttggttcgttcttttttgcaggttgcagaaggagttgatgtctcttatggtatgttttcttgaaatgggtattgttatatattcgacaaaacaaaaccctcgatttacgttactgattttactcaatcacgaaagtgtattcaattcaaaggggttttgttagtattctatagtatctgattgttactgaaatctaaacttttttgaactcgtaacatgaattctgccattgagttgagactgagatttctaactcaggatcaaatttcccttgtaagtgttgtagggtttcttttaatctttgttaatgtttcttgtatgtgcagatgagcggaggtgatcttggggtatcagcttttcctgaaggagagagcattttttcatggattggcacaattgaaggtggaaaaggaacaatgtacgaaggtttatcatacaagctttcattgcgttttcctgtggactatcctttcaagccacctatagtcaagtttgagacaatgtgctttcaccctaatgtagatcagtttggaaacatatgccttgacattcttcaggtaattatcaatttggtataagttttcatatatatatatatatccattgctacactaaactctgagtgtgaaagatgcaaaagtacttttttgcaaatgagatttgccaagattaggaatggtaactcatttctttgaaaaattgatattttgggcatgttaaatttgcagataaacttgagtaacatgttggttttgtaaaattttgcaaagaaagtagtcgaaagccaatgccatttgtgctgatgttatatgtgtatctgttgtcacaggacaagtggtcttcagcttatgattgcaggactattcttctctctattcagagtcttttaggaggtttgctttctcttccctccttgagcttacattatcactcatttaaagagtaatgtttgagtgcacacatcattactaatacgctttaatgtttatgttttacagagccgaatccagagagccctctcaatagctatgctgcagcattgttgagtaacaaggaaggttggataccaatttcttccttctgccattcgtttatattttcaaaattgtagtagcattttgtttacttagcaattttatttttttttcgaacctcagattacaggaaaatggtccagaagcagttttttgctggggaagctttggagagttgattctcatgaatttgtacaatctgtatagctggggaatattgtcattttgaaaataaagattctcattcaatatattgcaaggctctatgaaatctatagttgtgttcatttgacaacagtataggcctaaagacacaacaagaacacgtttgtttttgtagtggctatagttggttaaatttcggttttgaactacaaatttttaaaaccaggcttttaaatcaaaatattgaggctttagaaactcataaatcatagtttaccgttgaaaaggaatcactattcaatcttattgtagtcatagatatcatatatgtatatggggtccgcaaccatttacactaacaaacaaattccaaaaaaaaaaaaatataagtctgaagtggctttgctaatattatttttaaattttttaatcacaaaaataaagtaaaatttttgtttttaaaattttatttttgaaaaataaaaatgtgttctataattataattatttttttaattt

SEQ ID NO: 15105 - DNA, 6235 bp, Cannabis sativa
  modified_base (3717)..(3722): a, c, t, g, unknown or other
agatcccttgctctctctcaatcatcttacattgataaagttttagagagattctcaatgacaaacaccaaaggggcgactatgccttctaaatatggtatcccttgaaatataacttttactataacgtagtcgtttcatcacattttatttaattttattgtaaaattagtgaaatggtggatagtagttgatgaattgatcaaaattaaatacccttcactttttttactttaatgaataatagaataaaaaacttttttttttataataatttatatttttagttttagttttttaatcataaaaataaaaaagtaaaacgtatttaatttgcataattttatcaactatcatctgtcgcgtcatttgttttacgataaaattaaatcaaatatgtttcacgataaaagttatatttcaagatgtattattaatgaatcgtatatttggacaatttaatagtataaaaatatgatgaattaccccatatactatttttttttcaaatttacggattgggtttttaaagtgattgcaccgctagttgcaataggagtttctatacgactttctattgcaatttaagttgcaactctagttgcaataagagtttctacgtagaatttcgtaaaaatacaaaaaaaaaaactgttttgaagtgtaacaatgaaaaagtccctaaaaatatttagatggaaaaatattaattattttttttaacatttatcatcatatttcgagtatacttctgttctgcattcacgtgtttttttttccttttttcttttagaatccgaatttttctacaagtttctgcgctttatctcaaagacatttacaatttagacatcgataggcctcactcactgttataaattttcacgtacattatagaaatctatatgcataaaggaatattgcaaataagttaaagattttacaataataagattttaatagagaacagcaaattagcaaatgtcatacaaaggtggtgcttagataattcccactaaaagcaatgcaaatacaaaacgagggaaccgaccagaccaaaaacactaatctccaaaatcccacaatatttttgctacataccccaatttccaaggttccaattcaacggtttgcgataaatagagcaaaaagataaatacaacagaataagaaactaaagaaagaaatgaagcaaaccacgcaggagaaaaccttgccttcataataagcaaaactattacaagatggcaaataagagcttgaaagagaaaaataaaaaggctgcaattccagaagtagttgaaggattcaccaaggagcaagcatctgaagatcttcccatggggccacctataggagccaatcccggaagagaaccagttgctggcactaacgaagaccttggtgtcaatgctccgacaccctcagactgaggagaaggtgacggtgcaaatattgaatctctaattaccgatgaaggcggtgctatgaggggaggaaacttttgtggacctgaaatcgtgttttggaacaaaataaacaagtcaaataatgagatactaatttcaaacaaagagcttaatcatgttttgagacaaacaaaagaaaactagttatggcaaactaatttgaaacaaagatagcacaccaataaagagaatgtctgatgtaaaatgaaacaatttattgtgttttaacaaaatctgctgagtgttaacaagacaagtcgtttattacctaactaagaaactagtcaggtccaaatatccactaagccataactaatcaccttcactagcgaaatgagaagaaaagggacagaacataaactgaatgtttaaagagagacaaaaacaaaaagatctgagatctctcagaaagtaaaacgaaccaaatagacagacagaatgtgatcaaggagaataattgtgaatattctacaatagtataatgataggctagttggttatttcttttatgctatttctattatgatgtagctatataaacttaatgggtaggaatgtaatgagggcattataattgaatatcgaatagtaaagctgagagtgttttctcccatttcaggttttcccctttgtcacggacatggcatgagctttcctcactcaatccaatcctctacatcataatgtttacctggacaacgaggctgaagagaagtagaaagcctgcggaatagaaacgtaattataagtatgttccatacaaatttaaatcataaggagagcaattagcacagttatgaaaaggtagcatacgttgtgataatggtgccatttacaaaaccaccatatttacaagaactaacgttgcaaccagcactggtctgctgcgtcgtataatttccaaccataaggttactatttttacattgcatactcgaacatgaaaccgctaatgaagcaggcatgcaatacaaactgcattaaaacatgtaaacaagattatttacactttatttaaaggtgatatatagtactataattaatcagaatcaataacaaagtccttcagttacttgagacttcctggtccacaactgcactgaacacagtggctagctgaaatggcatagctcccatttggaacaattaagccaaaatccgaggcgcccttggggaagtttgaggcacaagctgcaacaattaaaaaaaacagtaaaacacaaaatttctatgtccattcacaagctaagctaagatactttccataaaatgaaacaacaaaaatctgaaaacagagaaattcaaactaaagcttgccaaaatcacaaacatcaaaccacttcaccattaagttccaaatacaatacgaaaacccaaaagagaaaaacgactaaatccacattgaacacacaaaaatcttcagaaaccaactaaaaaaactcaccaggcaatggaaccgcaagtatgtcaccagccttaatagaggtacttcccatagcattaacattcatcaagtccgtaatggtggtggaatacttggcagcaatggctgtcagcgagtccacaggcttgaccacataagacaagtaaatagcaggtaaagagttatcagtgccattaaaacaagtacaaggaagaggcaccacaaggttctgtcccacatcgagaacagacgggtcagagatcgaattagcctccctaatctgatccgcggagaccaaacccgagtaaactgaatcagcaatcgacgagagagtatcagagggtcgggtcttgtaatgggtggagaccgattttcggatcccatcgacacaagaacaggtaatggggactttgaggaagagctgagatgggagtatgtggttctcaacgtcggggtaagaaatgtcgatggcattggcggtgaggatagcaatggggtccacttggaagagcgaagccacctctgagactttgagctcggtgtagacagtgtagccgagcatggcgttgcaagagtcggagttggaacagggctcgattgtggacttggagctcaccaaaacaacattagctaaacttacacaaaaaacaaagaactgggttttgctgagatttaaaatgggactttgattagccattctttcagagcttgggttagttcggtttctctctcccaagctcagtgtacaaacttgatcttgctcagaccaaaaatggggtttttattttttacaaaaatgtggtgtgagagagagagagagagagnnnnnnagagagagagagagagagttgacagtgtgaaaatggaaccccaatgaatgaaactttgactccaaaaaaaggtccttgttcctactatttaagactggcggtgggttttagggttttctccttccgttgtttttgttgtgttgtgttactttatttttcccctccctgctttaccactaactctaagtagacaaaacaaacaacacgagatgggaccaaaaacgggtgaacttgaagctagttacagaaatattcgatttttttcttcttcttcctagtaatgattttcaaaatatgatgaaactttctggttctgggtttcgaatttagatggatggctcaagagagaaagagagattttattgtgattcgaagagagagagagagtcgaagaagttcttgaaagagaaaaggcaagaaaagctggtcagaatagacaatgttgtatcgcaaagagtgtgaacagacagtagtcagattcttgagctaagtgttaaaactttaatttggactaaattgtcctctcaaataatcttcatggccagctcgaaacgctgtcgtttgaattgaatcttttgaattgccttgtgctttgtatattcttgtccattattatttaaaaaaaaatatttttatttcgctagtaattaattcataaaatttgattactccaacatgaagaagaagttggtcatcttaatgggtttaagttaacaagacatgctccctcgatctctcatttgtttttcgcggacgatagccttcttttctgccaagctaatgagtcctcttgccttgctcttaaaagatcattggatgtctaccacaaagcttcaggtcaagttctcaactccgacaaatctgttatgtccttctcaccaaatacaacactggcggctcaagtctttttccatcgacatcttgacatgtcaatctgtgaatgtcacgaaaaatatcttggtttgccttcctactcagggagggataaaaagaggatgtttagtgacattaaagagaaaatatggcgacttatgcatacttggagtgagaaatttttttcagctggtggtcgtgaagtgcttctaaaagcggtagtccaatctattcctacttatgccatgagttgctttcgtttaccggtttacttttgcaaccaacttgaatctatgatggctaatttctggtggggattgaatgagaatggtaacaaggttcattggcgttcttggaagcttttgtgtaaaaggaaggacagtggtggtatggggtttcgctctttcatgcattttaatcaagcaatgcttgcaaaacaagcgtggagactccttaagcaaccagattctctacttgcgaaggtgctgaagagtagatactacccaaataacgatttccttcaagctaacattggccactctccctctttaacttggcaaggcatccattggggtagaagcctccttattgctggtttgcgttggaaaattggtgaaggatgtaggataaattgtgctgatgacccgtggattccaggacattccacttttcgaccttaccacttttctggaccacctgattcgactgtttccaacctcataacagaagaaaggcaatgggatttagcacttctaaatcaatggttttcttctccagatgtagatcgtatcttaactatcccgctgagttttttccgtcatgaagatacccttgcttggaacccctgctcctctggcatatattcggtccaaacaggctatcacctagctgcttctcttgcagaaacggatgacagctcaagctcttcggcatctgtttcatggtggaactttttatggtcactgtccttgccacaaaagattaagatcttcatttggcgagtcttcaacgatgctctccctgttgcaacagcccttgtgaagcgcaagattattaccgattcaacttgttccatctgtcaacaagcttgggaaactattgggcatgcacttttcagttgtaagtatgctcgttcggtttggcgacatctaggaattactcatgactggactacggctaggcttatgcacaaaggagattatatggtacacttgtcttccctgtacactaagattgagatggaaaaactttgttgtgcattgtgggcaatttggacagaaaggaaccgtgtgattcatggtcacaaagccaagccagcaaaagaccttgccttttttgcacaaacttactggtctaattacactgctgcccaactgaagcgctcttctacagcaccagattccaactcctgtgttgcagctactgctgctcctttgccacgaaattctactgctgctgcacctttaatgccgtggactcctcctccacctggaatgctgaagatgaatgttgatgcagcagtcgatagctcacgcaaaatcactggtatgggtgctttaattcgaaactccactggtacggttgtagcagccacatctcagccgatccttggatgctatgcttctcatgaaatggaagct

SEQ ID NO: 15106 - DNA, 7465 bp, Cannabis sativa
aataaattatacatataccttaatggtatgagcgtgaagttaagatcgtacttttagactcgtgctattaagatatttacaaatcaccctctcagttaagtcttgtagaaaccaaaactcttaaggagactggttcagtgagtcatgaagctcagccaattcaatattcagtaccaaccaataatataaattaaaggtcaaatcctagccgattttattgtggaaacgtactaggatcgacgacgatacgaaagaactagtgccaagactcgcacgtgatttgaaaagtctatattgacaaaacttcgaacggaaagaggtgttggagctggaataataattctaatttcccctcatgggcaccaacttcaaagtgccatttggttcgaattcgtctcctccaacaatgaagcggagcacgaaacaatgatcgttgatttatatttagccgaggaagttggattcaagaacattgaagtttacaacaacacacatatagttgtgaactaaatatcaggggattatcaaagtaaaggaggaaagatggctccttctgtctccaaggctcaagacttaggagctactttagaattttaaaagatataccgcccgacaggtctctagggatcagaatgcatttgcagacgtgttggctaagttaacaatatattaagaaatagaggaacacagagtggtccccataacttgtcttggtgtattgaatacccaaatgctgggggtaaatgtcattgaccactccacctcgtggataggataccgagtacccaatctataagttcttaaattctagagagctgctcacagatagggtggccggaagaaaaatctaatgtcaagctctggatacgtcatcctggacaaaaaaattgtacaaaagagggttgtttataccatacctaaagtgcgaagctaggattaagattagcgcaagtgtccataagatattagactgctatttatatatttatttttgtctatacacttgagttaggctagatttacccgggcccgaatatagacgggctaggtctgtgcttaattaagacccaccaagccttgtgattcttaaaaaaaatcccttttaaaattacacatttttttattaatttaaaaaatactatttttttttaaataaatgtttaatttttttttctatagcctactaaattttaagatccatcctaaatttatattacgttagtgctagataaacaaaatgttggaagaaatgattgtaactagaaagaatgtatacaatgatttttgatagtttagaaaaaagatttacaaaaattaaaaataaaaattagataaaactttaattataattcaaggtgacagatcctatttattctaaaaatatatatatatggtaagtaaataaatataatcccaagtactcataatatatttcctgaagaaaaagtacacataatatatgcattctttagttactaaatcgaatgaaaaaaaaaaaaccattgtttttttttaatagctagtaataaaataaagtactttgtattgttatttgttggtttgtagaatagtcaaaacttgggtagtggtcctggagcatgagatgttgtattaattaaatatgtgaagaaaaatgaagaacacgtgttataatttgaactcaaatttcaataacattcatcattttaaatctagactagatcttttaattttcacagggtttatttcttcaaatggatttttcactatttttcaatgatgttattttaactgatcaacaaacaataattactcctactttgtctctcttgtgtttttttaacaaaaaaaaaaacctttttttctagcagaaaagaatgaattaatgatcataactcatttcaacgacttacttattcttcctcctttactacacatttaatatcaacacaaaaagcttgaataaaatatagattatttcgtactaatcatatatgtacgtaaacacagcacactagtattttctaatcgaataattaattacatataataataatatcatgtatagttgagtaaattaaaatataataattaatgacatcctcagtttgtcaccttatcaagactaattaattaacaataaattgttaataccaactgatgatctcttcatattatatatataatattatatatatggtaagtatctggtgtatatatgtaagactttgaattatcaaataatttattaaatttttcttcaaaaaaattaatttattaaattatcatgatggtttagctaagttaattaaatggggcggtgtttttagttcacaatattattattaaaatgtattagtactgtctaatattttttatctttaatagcattctttattttttttaattaaaatagtatagatattgctctaattatgtttcttactttaattaatatttcatcattttaataatattttataatttaaatttgtcaactattaattaattttataaaataataaaaaaataatattatctttgattaaaatactattagaaaaatttagcaaaaaaatagagaactaagtcagcttttttatataattggagcttatttttttaagttctcctctctattttagctaaaaattgtgtttagagaacatgattagagatactaaagtataatatcattatcgtagaattaaatatatctcatcctatataattgaatatattaatttttataaagtattattaaccaatcataatatattacttctatttttaagtatttaaatgtccatatataatacagccacgtgtctgtcagagaacattagggcacgattaggaccaaataacacaaaatcataatcataataatatttgtttctatcccattattattttctttaatagtatcgtgtgctgtagatattaaaattaaaattatatgcaattatgcattactatttttaattttttttttttttttttatatatatatacatgatattaacgtagaatcttgtaaaatctttgtcgagttccaatacataaaaataagctaaacacatttggctatcctatgttgaccatctaaaatttaactacataaaaatagtaataataacccttctcatacaaatagaatattttttttcaccatatacgaaattgatatttatagattaattactaatgtatagttgaactcaatttcttacttttcacatttatagatacaattaaagaaataacaattattagcttagctaagttcttttgagtcactaaattgtacagctctaaaagaagaaaaaaaaacaaagaaaaattataaagctaaaggagacataatataaacagtttgggttttgtttgtttgtattattattatctctcttagttttcttctcccttagatagatattaaagaaaatgtcccataaccaaacaaaagcataaaactttcattcacagagagacagaggagcacactgttatggattataatccacaagccttctctcaatctcatactaggcctcctcggaatttacttctgctccggccacttaaaccctttttccggcggttattttcagttccggctatctaaaaatccaatctttcagaccaagcttagcttataataaatcaaaggttctacctttatgtcttatacatactttttcttgctttgcttttgtttttatttaatggggtttgttgatttttctgtttttagaaatgggaccggattagaagaataaaattataaaaaaaagtttgtatttttaaattagttcttctttttttgcattggtattgttttttattttttattttcttatattgggaagatggaaagatcgagttttgtttagatttggttgctctttgataagatttttcatctgggatttttctttctttagttgttgaaaactttctagggaaaagggttaaagattccttcaaaaaaagaaagagcttaagtgaatgaagacaagagttttaaagtctagaacttgttttcattctgtactgggaaaaaaagaaaagaaaagaggtcattactcaaaatctggatttaattttgctttattctatttcactttgtacaagttgagacatttatctatatatatatatatatatattcttgtgttgcagatgagatgagatacttattctactagcctagttgagtagagtttttgtgttttttttttctactttctcatattacaagtggttgaaaatgttggatttaaatattaaaaaaatcaagaaaaaaaaaagtgtttcaccttttctgttaaagacccaacaattaattaatcaattgagttgcaacttgttattatcttacagttttccttttttcctagtcatgattagattaaaagaaaaaaaaattatgaatgcaatgctggaatttgtataaatattctctgcaaagtcttccaaattcattgttactgtttttcttttttagtatttttgtttgtttgttgattgttaattatcttattcttaactttctgagtcagattgtgtcctttcacatagtcacaagatcacttaattgaaaattctctgttttgttctctgtaaaagaatgtttatattcaaccattttttctcttttataaatggtggactaacacaactcctcataattgttcagaatttttgaacctcaaaccaaacacttggtgggaaatttggatattttaggctttgagctaatggggcatttttcatccatgttcaatggcttggcgaggtcgttttcgctcaagaaaggaaggaactcagagaacaatcatggcggaagagaggctgcagatgctatggctaaggatgcaaagaagaatgacttgattttacgcacttcgggtactgtaaatgctattggttctaacaactttgcctcagttttcactaagagaggccagaaaggagtgaaccaagattgctgcattgtgtgggaggtatgtagagtcatgatttttactgagttttattggagtatagtgtcccacatggaacaagtataaaaatatcgagccatttataagaacacgagttactcctcttattagttagattagatcaagtactttcttaactttttgagaatattgaaggtttttttggtttggtgataggaatttgggtgccaagaagacatgatgttttgtgggatttttgatggtcatggtccttggggccattttgtggccaaaacagttagagaatcaatgccaccttctttgttatgcaattggcaagaggaactctctcgaatgtctcttgacccgaatttggacttggaatcggataaaaagaatcagtggttcaacatatggaaacactcttacttgaaaacttgttcaactatagatcaagaactcgagcaccatcgaaaactcgactcgtatttcagtggaacaacagctcttagtattgtcagacaggtaacataagtttctactttcatgatagtgatagtgataggactgtagagtttctatattgaaatgtgtttgagaggttaagttgttatggtaatggattttgctttgaaagtcttctcaattagtgctcttcttgattatacttactccattcactgcatttattcaagtggtcataatagcttgccttttactttacggctcactaaactttgaaaaacaccatccactcaaaactccacaaccactcataaatgacaaaaaaaagtttgttttatccaagtgggaaataatttattcttgtttgttaatttgttcatactgtagctaagatttgttgatcagaacaattttcacattatgtttgttttcctctcttttgtagggtgaatctattgtcattgcgaatgttggcgattctcgagctgtattggctacaacttctgatgatggaaacttggaatctgttcagctcactgttgatttcaagcccaatttacctcgttagtcttttttctttttcctcaaaaaactccaaacaaaatgtacaatgtcatacttatacgaaatgttcttacactgttgtgttcgtttgtagaggaggttgagcgtataactcaatgcaatgggcgagttttttgtctagacgacgagccaggcgtgcatcgtgtgtggatgccagaccaagaatcgccgggtttggccatgtctagagcctttggagattactgtgttaaagattatggactcatttctgtacctgaagttacacatagaaatttaagtagtagagatcagtttgtggttttggcaactgatggggtataattttttaccactttaactaagattttcactaaatgcaagtctaattcagtgtttgattattattgttattgttttgtcctttcaggtttgggatgttgtttccaatcaagaagccgtggagattgtatcgtcagcaacagaccgatcgaaagcagctaagtctctagttgagtgtgcggttcgggcatggaaacgcaaaaggaaaggctatgccatagatgacatctcagcaatatgcctcttcttccactctcccccattgtctcagctaattcaccctattagcacctctaaatagaagaaaggacatgaaaaactaaagaaagcaaaaaagaaaaatggacgttcattgtttcatcatgttaaaaatgtacccttgatttgatttaatcaagaaattgttcatctctttttctcaaatggtcatcaagttcttactagactgtaaaattgttcagcaagtacatattagccttttccttttctttgttggtctcttaaacaattgtttaatctaaaatgtgttatgaaattgaagatcaatcaagattttctaatacaatttcatcatatgaaatgaaactgtagaaattaaagaagggttgaattttgcatataccaaagtactacaagtaagtttagattatgatcaaaagtgtttgtggtgaactcaggtggtattggagtcccacatcgacagcggaaacaaaagtagataagcatatgtctataaataagaaaccagctccttcaataaacttatcccgtcctgtcaggggtgaaaggcgactcgccaatgatcgtatagagacgacgagtcgtgccaacacccactgttatgaacactcaaacttcaggcgagtgggttgggccctactttcggttcgacccgcccgtcaatttttggaagcacccgttttacaacgggagctcaaataaattaattcaatctaaatatttgcctagttttacaaatttgtacaattattttttaaaatatttttactatgatgtattttattaatttgtattttattttttttatttggaatctgaatattttttataaaataggtagaaagacattgttttcttaatttttttttttaataaaagttgattgaactatggtaggaccgaacaaaagttccctaccggtaggg

SEQ ID NO: 15107 - DNA, 6140 bp, Cannabis sativa
attatactgttattggagtaattaagtattgagtctcatataacttaagaaaataacttttaaagaatattgctaacaaatcgtaaggcaccacttacagaaggtattggacaccattggtgcccaataatcaattctttcaattctttatttattattgatatgcttttgttgggggcaagttgaaaaattagggaaagggaatgaatagaatacattgagattgtaaagctttgtcagccacttccaccaaaaaaaagaaaatcttaatctaatctcatctagacaactttttggatagcatattctcttttcaagccttttatatatatatatttatataattatgtggaattttagcataaatagttttagaatttttaatttgattggttgtaatgaaaagactacactagaaatgagaatggaataaagattaatataattaaaaaaaaaatgcaaaattattttgtattagaataatttttgtctcaaaaattatatttatgaaaacaagagtcattctattaaattaaaatggtaaggaaaaaatagacattttaatgttttaggttgtttggtggaatttcaattaccttaataattattattaacttttgttaaatgaaattattttttatctttagcttgaaattatagtattaacaagaagactaaatttttttcaaactaaattacaacttgattacccaaagaataaaaactaaaaaaaataattacttcttatacttactattttttaatctttttttcttcttcaaatttatggtttaagttactccaataaattttaattttaattaaaatttaagttgcaatgtaaatttatgtaaaaacacacacaaaaaaaaaacattataattaaagtataaaaataataaaaaaccccaataaaaattatgaacttagttaaggtttaatgtcctaagaacttgatttaatgtactttaactcaaagttaaataaacccaatgttggatcaatagaactcattatataaaaacaaggatgaagccaagagagagaactcattcattaattcattcattcatattcacttcatgaaaattaacaaagccactcccaagataggagtacacaaaaaatagaatacaaaggtagaaaaagagagaagactagacaagacaagactatagtaatattaaaaaggcctgtttcttttaagcttttcagaaactttggccataatctctagtcctcacaccccaccaccaccaccaccaccaccacccacttacatggaagagaatcttttagtagtaaaaagagaaaaaagaaagaaaaataaaagagtcaaaaaaacttgccaaaactacagaaaaaggggggtcacatgttggttgttaagaagaaaaaaaaagggtatacaaaagaggaagaagaagaagaagaaaactacttaagagaggttggttttgaatgatacattatggtaaaagaaaagggtaaaatggtaattttgtttaagggcaattgggatttctaccaggaccaccatagtaaaagaaatgaccccaatcaccattacttccagtttgaacatcataacagtttgatttttcagtgaaggtaccaatgcttttaggtgctttgagattgtttgattcatccacaacttgaatgtttctaaagtaacttgctttaccaaaaccttcttcaggaaaatgaccacttcccatttgtgttgatgtgtgttgaccatctggttctgagttcacaacctcacctccccattcaatcatggaagcactatcagctaagtatgagaacaagaatgatggccaataacccaatacatagtcattcccaaattgcatccaccaatgcccttcttttggatcctatcatttcaaaagtcaaaacaaacaaaaaaagtcaacatttttaggcacacaacaaaacactgattaagactcggagccctgtacatggggttttggtaattggataaataccgtatttggtgtaattaaatttatttaactctaaagtcaacacttagcgcagctcggtagctgcgctaagtagctgcgctaagtgtaatcattgagtgtgtgtattttgtcctacatcgctcgtgtaagtgttgtatgtggggtttcggtaattgggtaaataccgtgtttggtgtaattaaatttatcttaaaaggtgtgtttttaccaccctttattgttgcctagattaaggtaaaaaaaaatatcacaagattattgagacatgatgttttgattaaagagtgatccaaaagattctcatcatgtgtttatttccttttttttgttcatatgagaaagaagaataatagctcttgatgtggattttagccaacaataggttttggggtttttaatctctatctttcttgtattttaatccaatgagaaactaactttaaagagtagacaatttttactgattccaacccacatgactctttcttggcagtatcaactttttggactctgtggtcaccccacacttactaaaatttaattctttaataataatcaataatattaagaaaagaaaaaagttttggaatttaccttccaaacaaggatactgatatcatattgtgaatttctaaagccagaaacaggagatatacttgcacccattgcaatttcactattgatttgaataaagccagaacacaagagattatagcaccctgtggcttgatatgcatcactctgtgaattgaaaaaacaaataaagattcaaactttatggacaaaggaatgagaacaaatgaaactaacaaaaggggttagaagaagaagcttacagtccagtaggtgaaaagtcttgtgttgttatcaccatatagatctgggctgacctgttgtttgtgtattgattgtgtcatcaaaattgaatttagtcaaatataaaacacttcttttttaactttcaattttggttacttaaaagctagttaagttagtacctgccaaccagcttcaatgctgttaagatcttcaccaaaagatccaccaagaatccatagctgagacaaactaaactcatttggttgttgaatcttaggttcccatacattaatagttgcttttgctccaaagtacttgtctccttctacataagctattgcatgctgattcaaaccagataaaaaaacacaaatatcagaaccacaatgagataaataataatcgaaaaatctttagtacaccctctaaaatgagctttttagtctaatttttcaattgagttaaaaaaaactttactaaataccaaaatagatagaagtctaccaaaataaacttatagacttacccaataatgataataataataaagaacaagaattaaagattgtatttttattaatgttataattattacctgatgaccactctcattgacaagatcaggatctgcagaccttggcttaggaatagatctatgcttcttcttaccatatcttttaactgaacttgctctcaaaacatcatcttttctagttcttctcacaggaatagtatcttcaggacatttaccattcacatgccataactgagtcattgggtttgtcttttccttagccttttcagagaccttattgtcttggaatagtccttctggatggtaacttggcctagtctgaaaattcaaccaaaccccatttgaataaaaatgaaaaaattatgtaaaaaaattaaaaaaaaaaaaaaaaaaagataggagagtttgtgaacctgaatcttgtggtctttgagaaaaggatgatcaaaagcaggctggtgagagatatgaacacagtctattatgtctccatctgggctctgcacttaccattaaagttaaataaagttaagatttttagtacaaaaacagtcattagtttacatttgagaaaatgggttattatcaagtacattgaaaaaacagatttttattttcataaggagaaatgcttgactcaaaaactagtagcattaaattttatagcttaggaagtaagaaaatttattgaggaactctctcattaaagctttctgtactcaaaagaaattattgaagagagagagagagaaaagaagaacaatgaaattgaccaagaagaaaaaatggtggaaacataggatgaaagctaaagaagactcatttgagcaaataaccccatttgggtactgaaaaaacccaacttgtaacattcaaatctaaacaaaaaatttaccaaatggggttaattcctatcatcattattccaacctcattttcccaccactttcccagaaaccaaacacaagagagggtggtgggaaaaggtagtattatagagcatcacgagaaagttaaatgagtaaaagtaaaggtgagaaaaagagagatagagagagagagagtgaaagtgggggacctcaatgcttttcacggcgggcttgttcaaccggttgaggtgtttctgaacctcaagcttctgtcttgatggatttaaccgagcagcaaaggaagaagaagagaaagaaaccaaaccccatatacatataaccaccattaaacttctcatctttctactcaaatctcccatcttttcaaaaacccaccaaggaaaaatgactctcaaagccaaaagatcaaaagaagaagaagaagaagaagattagcttagcttagctcactctctactacccaagttgaaaaacttgaagctcaaaccacattcatcaccattctctctctctctctctcttactcaagagaaagggccaaagttatgaactttggtgtaaagattggatttttttagctctggtttcacaaaattccaataaaactgcctcaatgctcactcacccacacaccccactttctctcactctaaaatctaaataaaatttgtcaaaatttatatatattttatctctcttttcacattaaatcctttatactctctctctctctctttcttgtcattttccatctacttttgttaaacacccacctctcattctctctctctctctctctaaaaatgggatttttattacacacgaagggtataaagggaaaaagagaatgaaaagaagagaaagaaaaacatttgcaatgtttccataacaccttcacttgtcgttttctaagtgtgtcgttttttcattttttccaattttgcccttcattatataaaatgccaccattctctttgttttaccattttacccctatcttcaattagaatttcagatttgcccccttcgtcttttttttttctcttacaattttaattataaactaattatgcttaaattggtagtaactaactatatgatgttatgaataattagtattttttataataattaataaataaaaatatttaattataattataataatatgacattttataataataatgaactagataaatacaataaacatttcaattactttagtatgagaaaagaaagttcttaattaatttaaagagtatgcaataattaacacactaattacttttattattgtttttgtttataggaataattacttttcttcttttttttttcttgaagggaataattacttttgttacttactacaaaatagatagatatattttaggttaattattgctaaagtttaccatactctacaaggttatgatttttttcccataatgataatatttttcttacaaaattatgaattgatactttctaattttcattctctttttactaattaaaacataaaatttagtaacaattacaaaattaatttcaataaaagtgtattatttatgtatatgacaatgacataaaggtcattatctatacatatatttatggcattaaagggtttgtaaagttgtaatgaaattatgtatttatttattataataaaaataaataaatacatatatacatatttgtgtggtcattgactatttgatattattacatatggtcttagactattgattgatatgaataattgggttctttttcactctttattattgatagtttttaaatggtactatcggttagggatattcgcggtgcgggtggggcggtttttgaccattttttcaaattaatccgtacatgcggtttttccaattt

SEQ ID NO: 15108 - DNA, 3083 bp, Cannabis sativa
ctatagactacacaaaatatatttttattagattttaatattttaataatatatttataagtaaactttttagatatattttttgtgtttatttataatataataaaataattataaaaaatatatttttagtgtaatttttagtattgtgattggaatagaaaaaactttaatattaaaattctattatttttgtgttgatttaacactaaatttaacatttacattaaaaatggcctaatgtcatactactaataataatagaataatttaaatataattgtaatgaatttagtataaaatctcatcagattttttgtcatgagaaagaattaaaaaaaaaagtaaaaaaatccatttatttttgcaaaaaataaataatactaaaaaaaaaaggaattattacatgttacaagatttgtgattggccaaaaaggcgcgttagtatatgcacttctttacatgttagatttttttattaatttaaattattgactcagctttcttcttcctttgactatatataaaccctactcccacggatcttactcttcttccatccaaatttcgagctctctccacaatcaaaaatggcgaatcgaatcttcatccttctcgcattcacagctctctttctcttctccaactccgttctctgcaaagattccaccaccaaagacatctccgacgatgacgacgaagatctgagcttccttgaagaatccgacgagaaaaccgacgccaccgcacatcacgatcacggcagctttccagatcaggaggatttcgaaggtgaaggagacgatgacttcgagaatttctctgatttcgatgagtcggagcacgatcaggagaattcgtacaaggagcctgaagtggatgagaaagatgttgttgttttgaaggagaggaactttactactgttattgagaataacaagtttgttatggttgaattctacgctccttggtgtggtcactgtcaggctttagctcctgagtacgctgctgctgctactgagcttaagggagaagatgtggttttggctaaagttgatgcgactgaagagaatgagttgtctcaggagtatgatgttcaaggttttccaacaattttcttcttcgttgatggtgttcgcaagccttatcccggtcaaaggactaagtaagtttcattttttctcatttctttgcatgttttagaggacgttttatttaatttgattttgtttgaaaattcagagaagctattgtgacttggattaagaagaagattggacctggtattaacaacatcaccacgactgaagacgccgaacgcatattggcttctgaagggaaagtcgttttgggttatttgaactctttggtggtatgcatttgctcttaatttctatttatgtttatttagatctacacaatgtacattgtagaaattgttaactttataacaaaattcgcaaccttaagatcgttttctctgtaagattatttgttttttgttgagtaataatatgtatacacataaattacactcaaacatgatacacagctagctaatgtggcaagtgtatgacctcttttaaataaagatgattggttgaaattaccatatgagtgtgtgttaagtttgtgtgtaaattatgtgcatacataattactctttttttgtttcttttaggagtcctattattgtataggataggtgggaattctcttttgtggagcaatgttcttctaatatttgtgctaacttagtgatcaattcattaattaatttgtttctcctagatatatgtgttaaaatgaagaaagagtgctagtaaaaatgtaaaactagtgattctacatgcacaaattttttttatcgaattttggataccaaatgatgtgatagttggtttgtcatgtttttaattggtttattgtaaaatatacataggagaattcaatgtatgttaccaattacattccaataagtcaattgtcatgtcatttggtatctaaaatttgatgaacaacttggtgccagtagtatctttcatttaggaatagggagactgttctgcgtttcttatgaaatattgctaaagggtatattttttatttgttcattacgagttttactgtactttttaaatagggatcagagagtgatgagcttgctgctgcttcaagactcgaagatgatgtgagcttttaccaaacagtgaatgctgatgtcgcaaagctattccacattgatgctgaagctaaacgccctgccttggtccttcttaagaaggaggctgaaaaattgagtcacttcggttagtttctaaatattctctctctatatcccgctctatttcaaatggaatttgaaagtgaatttcaactacttgtctgtttcttatttttgctttttatttctgcagatggtaagtttgaaaagtctgccattgctgaatttgtatttgccaataagcttcctttggttactcttttcactagagaaaatgctcctgcaatttttgaaagtacaatcaagaaacaggtaaatgagtcgtatacatgtaattgtacaaatgaatatattggtattttaatggaaaaagctattccattggcctttactcacgtgtgaaattgtgtgtcctcagctgctcctgttcgcttcttcaaaggattctgagaaggttctcccaatattccaagaggcatcaaaatctttcaagggaaaggtatgccccattacttttcagagctatgaacattgttttatatattgaatttttttaaaacaaaagcttcattttgcgagctcaataaaactggttgcttgtaatgatattgcctcgaaaaaatgtggcaaactaaatttatggcataatgcatacaaataagctttggcagctgagagtcacttcaaacagtcaaatgcagataaaaagaaattttttaaattttatgtctttcggtgagttatttattccaattctctgttatcattgcttgtagcttatctttgtttacgttgaaacggataatgaagatgttggaaagccagtttcagactattttggtgttagtggggatgctcc

SEQ ID NO: 15109 - DNA, 9112 bp, Cannabis sativa
tatctgccaaccacacattattcacaacaccaaataagattattatcaaagcaacgaaattaaatgtgtttttttacaattggtaaggccatgtttcctaatagaaatgaacagtaaaggtaatagaagtcaaacaggtgtttcaattttctatctccaagtaagtgtttacttaccgattcaggcaccaggtccctgatttctcacataattagttaattttactaactgatgtctcgatttttattcatctgctccctttctaaaccccattttttattcttttcataacggtatagtaaacacatcacatcctaaatatgctacaaccaagcccttgctttaaaatctttcaaaatcaaactatatacaatgattttcatttaatgaacatattggcaacaacacgtttcttcactaataatatgtttgagaaaataaaattttgaactgaaaaatttcaactgtatattagcactctaataaattgtccaaagccctatgtcacctattcagaagttacctgtccaagaggattacgaaatttccgtgcccaggtatgatggggctggtaagctcccattgcaatttcggtgtctctagtgccttccatagagcgctgattgatgttggcagatccaatgattacatactcgtcatcaactatcatgccttttgagtgaacataaatcataaatcttcggtttttcctactcagtgcctggaaaaggaggcaaagcacaccacttaaaaccataaacagaatttgaaacttatagaagtatgatattcctaaatttttataacaatcataaatgaccatcagcaattgcctagtagtagaacgaggtcattgcctacaagaaaaaaggcttacaagttcacgtttcatttcactctttttacgtataattagggaaataaacaaatcaacactgataagcaaagcaaaccaaactggatgccaaaacaactgactgatgaattaagtcagtttaaagaagatacctgaggactgtttgctgcggtaggactttccatgccactgttatttccatccaagtcctcacggttgccaagacaaaagaagtttaaataatcctggggtgagtaagcaccttcgagcccagcttcaacaagtgccttgtaaattgtctcatacatcatttgcattgtcttattctgaaacaaccaatttgatttagatacatacaaaatgcattgtagtctactagaataaagagaatcagtagtagtgattaatgtgctctacatgaaatttgatgaacccgttatgttttctgtaatttttttaaaccatgtaactaatgtgactatatacccttcttattccctccctttaagtaagtaaatttatagaaaagtattaacatatgcaaaacaagtaatccacaagaactattcacaataggagccacgaaagaaaaattgtcttcatcagttctagttgctacaggaaccattgatttgagtgaatgaaatcgtaggtaaaggttttccaaattcttgacactgtaatttgctagacgaccaatttccaccactgtaatgggagctaagcttagagctcagatcatttcataacacttgaaataaatgggggaaatctattaaagaaaaacgtgttcatttttcctgaaacaattgctctcatcatttacctttacctatcaggaagcatttcttaaaggacaataagaaatgacaatacaggtcaaccagactttttgattatatgtcctttcacctaagtttttgagacatctctatttcgaaataatctaagtaaaattaagtgtaactaaattgattaatcagtttctacaactgcttccagacatagccacactaaatgactcagaattatcaagacagataaactggtaatgatgactgatgagtttcaaaaacaagagggtggctaaatacctgccaaaagagaatcctttgggtagcagcaccagttggaacaccctctggccacattggaataacaatatatgcagcaaatctctcattggctctaattttatctgcaatcttaagggcaatttccattggaatcagattattagcacctgcaagggaagggcaccagaattgaatgagcataatccaaatccaacaagagtggagaagaatctgtgatatactgtgtcacagttacaaaaaaaattatagtgagaataaatacaaaagatagaggagatttgttatataaagcataaatctatttaatatattatattattagacttgaaaaaagacatttattttatctaatacaagaatcactacaaaagatgagagaacagacaatcctctaaaacaattgataaatcaaatgaacttatgccaaactaatcgaagaaaagggataaaaccttcattcaaaatgtttcacttgttctacaataatatatacatttacatttaaaattgtgaaactgtaaaaatgatgaaataagtttctattgatttgggaggtacacagattgtttaattttaatattacaaaaggggggttctcttcttttttatttttttaaatctccacctcaatcccagaaaatgttgccagaatttgaatattcaacgtagattatacattgggatctgcctgggattttgttttgttttttaatgaaactaaactctttttcaccaaaagagatcatatatcaaaattagacatttagattcttttctttagagtaatggcatgtgtacacataaatcacacacacacttatgtggcgattcatcttaaataaaaacgagtggttgaaattactttctacataagtgtatcaagtttgtgtgtgcacatatcattactcattttctttgtggacccaatctaaagatacactccctactgcattagtcaaatttattcaactgcaaaagacatgcattttttttttatactcactgtaagatcaattaagtgaaatctccaaataattctaattctctccgtataaaaagacaatttctcacctaaatctttgtgggaactccagttgtaagaagatccaataaaatactggttctcaatataaatgaaatgctgagctgcacgaatggcctttacgtaagccgtatgtatactcatgtcgattagcacattcttcccgcacaccaggttctgtaaagaagaagttcaattaccacaatctagtaatataaacagaatcaccaaataattatacaaaaagagaagattttatcactaaattatattcaaccttgcttgtggcatcttttggatccttagggaattctttaactgaattcgagtcgattgaacggaatatctgcatcaaaatccagctataagatacattgaaatctttaaatctccactataggccgacaataatatgcagaactttgtatctacattttctggcattagaagatttacatcttagaaattaccccgtcaaacttatatcattgatttaccagttgagcctaaggaaaaattattgttagttaaatgtaaatactacctgaacgtgccaagcttcagggtcgttctcactactgcaagtagcttcagacaacccaatgatgtccggaatcctttctagtctaagcaaggcatcgtcatattgttttctctttaatttggacatcccatgtggctttgaagcctttaaccatcgctcttcaaagtttgtcagaacatcataagcagcagggccatcaattcgagaatgcaagtcatgccatggctctcttggacaaccagcaagattaccctgttaagataatcagccagtaaaattagtcagtgtaggtttgattataacaataaagtcaccaattaaaacaaatttcttgacttctaaaaatttatgttgtaagcataatgacagttaagaaccatcaccaagaacttacaagataatgataacagcataataaacagttagattttagtacaagcattgttgaaaattctttatttgtttcaattttgctctagcatttaccgtaaacgtagggttgtggtaatcgtccttatgcacagtttgaagtgtcctaaatagagcgtgatgtggagtatcataccgtccatcacacaaatcaagtcctccaacaaaagccatgatttttcttctgttattgccagcatcagcatcaacaataacatttttctgatggtgtgtataaattgtctcaacttcctgaaaataaaaaataatcaagcagcacaatggaagattaatttccattttccattgtcacttgaaacaaaaagtataagaattagatactgaaaagcatcaagtcaagtctaaccctttgcttcaaccagctgtgtctttttccagcactgcggggacatagtagcacttgcactgatgagtgcttgaaaaatcggcgagtttcttcatcatgggttgccatgattccatcctgtattggtttttcagtaaattagaatattcagaaccagggtagagagctaataaccaaaaaatgcctgtagttgttgaattgataaattcttcaattcatgtcttagtcatatccaagggggaaaaaaacttcctagcgattcacaagggaaaaaagactgaaacatgaatgaaacctttaagagagatgctagagtttgtgaccacaactttctgaaaagtaaacatttaatataacttttgaattcagaattgtttcctaatcatacttactctctaaatataactaactagattagtatagaagaaattgcactgtgtgaagtttacatgataaatatacgcaagcaaaatttacagaaccaaatttctccttcatttttcctctcttacatactgttacctttcaattcatccaaatctgatactcattcatactgagctaccacatatggtgactaactacgtcatttatcattcaaaagtaaaattcatgaattcataataacacctgaacaaggaatttccaattttaatattacaacatatcacaataataactactgtgttaagagaaaagccataacaaggagaagtataaactcccaaatccctgaactgaagtagtataataaaccaattcaataaaagataagatacttacagttttatagcctaaaatgctccttgaagtgggatcatcccaaacaagtagcagcactctcactccttcctgagacttggacctcaaaatatcccccagggtaaaatcagatgcataactatcatcgcggactaatttgacgttgtgccatactgaccacccagttatgtatattaaacgtcgtgcctgacgtattgcatcaaaaatgtcctgccaacacttcccatgcacatatgtgtaaccaccatctagtctcaaatctggaagggctccatctgggacatgggcatcttgataaagtgtaactctgcaacccttcctaagaggaaaataagtcccaggaactccataataatcagggcctgcccctactccagagtggtaaatgctcagcttctccattggaaagtactgaattgaaagtcccaaaacggctccgggtttgcatggcttcccactagcattcaagatagggtaagctccctcaattttttctcctgagtataactgctctactggaattgccacaactccaatgagctgtgaccctacaacatcactgtcttttacaacaaagtgcacctcagcagcattatgagctactggaacattgaagtgttgcttccaaacaggatcctcagaattgctaatcacataagttctcccaattaccgcatttgccactgaaattgaaacatatggatcactagtgatcgtgttcttcatgtgcccttcaattttattggtcacattccctggcaacttcgcaaacacatcccccaatgttttatggaacatgtccatatttggcagatttttagcatcatgtacccatatatctaaattcccatgtagaagcaaaaccttcaaggatcctttaccttgcaatggcacaatctgcaaattctgactatgttgcgaaccattgaatgaggttgaagtggaatacacagagtgagtaggcgaagcaacctgatcagaataagcgccctcccaattactagaaaatgagctattaggatatccataaaactccccatggttttcaaacttagcactttgaggtgaacttattaagggtgacactgcaggcgcatgaggtaacactggagcagttggatggttatcatacaaatgcacattgttcaaaagagcatccaaaggagggtaaacagagtggctagcagaagacgccggtacattgtcaacatcatgatttgtagatggcccaactcccactgaactataactctcctgcctatgatgattcgagaagctattagctcgaggtgggaagctggctgggttttcaacaggtgggtaactcccaccggtttgttcatagtgatagtggcctgaaccatgttggaaacttccatggtgttgaaggtgaggcccaggagcacttggggtcaccggaggagctgaagctggatatggatatggatacggaagtggggaagaagaatgatgaggtgggtgtgaatgggatggggaagggggagctggagggagttgataatctaaagggccagaatgtgagtttgaaaatggtggcggtgggtatgcagatgagaatgaatatgaaggggcgtagggatatgggtatgggtgtggctgtggatatggagcaggggcgtacggatctgaatttgagggtgggtattgtgatgctggtggaggagtgttaggagggtatccatagcctgaattttggtaagggtacgaagaaccataattatccatttccaaacaaatttatagtacctaacaaagattttggcctgtatcaatcaaatatacatacacaaaattcaaattgaatcacaacgtcctgattccagatttcggagcaagaaaaggaaagagaaagctttctcaataaaagatcattaaaaaaagagattcaaatgggattcttaatgaggaaggatcaaacataatatagttacaggaaaagaaaatgaaaatgtaaaataccttttagggtctaataaattatgaattgagaatttcagattgagattggaaacttcaaaaatgaagaagatgaagtttgagggaaaaaggtacggcggtcatttcaatcttcctaacttaacagaatctacagtcaaccaccaaaccaggtatactttcacttaccgccatttccactatttatttttattttttgtttattttatacatgacagactcacccggttacctgtaatttatctactcttgactatcatttcatatataaatggctatacacgtcgtgcacacgttatgaattatatatatttttttatataacaaaacatttattctgagtaaaaaaaaatagctataaataattaaagatttataacatagagctagctgtaggaatttttatcatttcaataaaataaaagaaatagtaaaagaaagataaagacgaagaatggtagatggagtagtcttaccaatatataagaaagtggaaatttacgtacaatctcacacggtttcaattctgactgtggaatgaggtaaggtacaattcacgatgcaaatctaatctctgctgtgctgtgctgctttctgtttttattgggtttttttagtgaacaaattacttgtcactttactgccgagctgagatactttaattaacacataatgtaaaaattctgcaaatccacaattcttgcgtgtattttccattacacgtcaaagtactatattttactatttactaataataacttataataacttccatttacttccatttttttttttttttttgaaatggtttgctaataataacttatatttataataattgaatatatgaagaaaaattgcctgtagacaatattgacctggatggtacctatttgattaaattgcctgtagagtgtagacaatattgacctgtatgatacacgagaaaaacgtgagtggaagcaaccattaaaagaagcagccagaaaacaaacaaagaaataaatattaccagtcattacaaataaacagctcgtctttgatgaaataagagaatgagatgcccttgaattcttagacatgttatataaccaaatagctacctaatgtctagtttcatgaacccaaatgcaaccaacatttctctctacatcttcaaagaagattctagcctagaaaatagcctttaacccatttgcctcctttcaaattgagggacagcaagtccgtgtaatggagtatatatactccaacaaaagctaaataacttaaaccagacctcttttttttttaagcatgcatgtattaaagcctaggaacaaataaaccatttgattttgggaagatacaaggagtgagagaagtaacctttgtcaaaagaaatatatatctatatatatatatatattattgtaagtagcttaagagcaaatgagagcagcaggacagagcaagcaaattttcttttttagacggggactttattttccttaaaaatctttcaccaattggaatttcaacatttcatatgcaattattctagttggaggcgtgctttgtgcaaactactactggaactagcttgtacactgcccattcgctggcatcttatggtcaagaatgttacaagaatttgacttatctttggtgtgaagtgctgatttccaggatattatgcaccagatggatggccttggtggttctcagcgagatattaggagttttgggtttatgggtaatcataggaattttcaggaattggaagatgatctccattccttattagaatggagtgaaatgttggctggctgtttgaataattaaaactagggagtttgaagaatcatcttttctttctttctttcttacttttcctttttttttaattatggaatcatccttttcagtcacaaataatgattggcacttgtagatgttgatatcatttttaattaatatatacaattttcatctcttgaataaaagtgataccatgtgaatgtttgctagttcctgc

SEQ ID NO: 15110 - DNA, 5570 bp, Cannabis sativa
aagtgattccagctatcagctaaaaagtacagcgtccacctgttctctcttctttccattgatactgctttgttaaccaaatagtcttcatctggtctccaacttacacttttgtttcgcttcaaagaaattgtctcaaaacttatgacttactctgaacttcttcacagagttggattatatattagaatttggcataaaccctttacaaaataatcacttttatttgaagccccatcatcattgaaagtttttagttaacatacccccatgaaattaatttacgtaagttcttccagtcattatctgtttgagtcactccttgagttgcattgattgacatttagctgagttgcaggttcagcatggatggtcctatcccgttcgtttgtggagtattgtatttggggttgggacaatctaccaagaactcttcttatgtactacacaaactttgtttcttctccagagggctattttcagactgttatatgcaatgagccagagtatgctaagactgcagttaaccatgacttgcactacatagcttgggatatgcctcccaaacaacatccccacactctcacaattaatgacaccaccaagatgattactagcaatgcggcttttgctcgaaaattcaaacaagatgacattgcacttgataagattgacaaagatttgcttaatcggaataaagaaggctttacccctggtgggtggtgtgcaggtagtcctaaatgctccaaggttggtaacccaaataagcttaaaccaggccctggagctcagagacttcatcagcttgtaagtaagctagttttggcagctaagtacggtcagaatcaatgtacataaacttcattaaagattcttacttgaagatgggaaaaaaataatgagggaggagagaaagaaggggaaaggaaaatggttttctgagaattttgtttttccatattagttatattttagtatcagattttaacattattctgaacaaaattatgattgtcacgattttttattctttcggtagattttgtccttagctctagtaaatgagtataataacttagtggaaacttcaattttttagattcttctattaatggtataatctgggttggaaaagtccgtagtaaaggggaaaaaatcgctatattaatatatctttttttagtatttaatattggtataaatctcattctccatcatcaattataatatatgatatatttaatgatgatgctaaaggcgttcacttggtttatgttatcagtacacatgtcatgccgtcctcgtcacataattacaaaaagaatttattgaactaaaatctaatcgaaaacacagctgattttatctagaaggtaaagacttccaagtagtgtattatgatgtaagcaaattattcaaatccttaatgcctacacaaaagaatataacgccacttttgttctttttcaaaatatataatcagtaatttgatcaatgaggattgactaaaatccttgtgggtttggtgagagagcgtgactctcccatggctcatatggggtacaacattttcacagatggagcgttttcattttactttgttaaagggaaaatctgacaaaataagtaaagaacatctctgctatttattttactccacttggaccacttacaacagaaagattttgtcaaaaaaaaaaaaaatgctgaaaaattctaaataaaatagaactgagtttattaatgaaattatacacactagtgtctcataataagacttgctcatctgcttattccggcaaaaagttgtttgtggaagtttattcaactcagaattctttgttgccggaattttttgagcaactactcaacccagaatttttcattcggtaatatcgttcctctttttattttggtagcagtttattcaacatattttaagttgatcaagaaaaccagaggaactacatttgccaattatgttcatattgtataaaccaaatttgaaccgtatagttttatgttcggaaattaaataccacacatttttacctttctcttttcctttgaattatatctacaggatttttcaaacaagaatgtcctcactcatcacagcatccaaatccgctataatctaataccaaaatttttgttatgttgcttcgaaaacttccacttctgtaggcgttcatcggcttcatctcttacctcgcctaaaagctacataaggttgtctggtataagattgcattacatcattttcctgttcaataaacaattccgtatccatgctatgtccagatcatgaatcaatcatcaattgccaaagttcacaatcaaaccatctccagaagtttaatgttccctgcagaatttgctgcaactaaagtgttggactggccgcgccaacaaacagaggaaataaactggttggttttatccatttcgttgccagaatgcgggtcgaagttgttgaactggaattgtaatgctggcatggggaaagctttgtggtagataaaaacctgtccacagaatatgaaaatcagtgatcttcaatatgtttataatttgtttgttagtttccatcctatgctctacacaatagaattgctattacaaagcaagttatgttaaacaaagtagtccagccaagaaacaaataaagaacccaacaagcgtgtggaacctgactaatatttgttcaattcataatcgcgttacctcatttgtctccgagccagtagcaatgtaaccatcaaaaactgacaatcccacaaagttctgcaacaatgaaaagaatgcattagatatcaactacatatgagaacacaacattcataagtgtagccacaagactaatataatgacatgaataactaacactatgtatgtaatgtgcatttttttttttggttaattctgtaagaggctctcatacatgctccaggtagcaccaacaaaatcctggtagtgaaatttgaaaacattctataccttaggatgaaatcacagttgtaacatgggaaaaaatgcacaatccaagtaatatttcatcaagtttgattcatgtaaaagcagggaacgtcattaatcctaatgtaggatttatgcgagatagtgaagtacctttacattcacgtgacctgtgaaggaatgaactggagtgtcaataacacgagatgtacacgccgacaaatcccaaagcttcaatgagttatcagtggatgccgacacaatatttgtactatctacaaacttgacataactcacagtcttattgtgtcctactaatgtgcagagaggaacctttgcattgcgcagatcatagtaataaattttatgatctgctgaaccaaacgctatggaacgaccagagtccaagggaaactgaacgcagcagacattagcctttgttctgattgtaccaatgctcaccccctgcagtagcaccccaagtaagagaaacaacttatcatacatccggatttaagtatacacaacacggaaatatataactgcagtacgtttagtttcaaagctgacatccaccaaagtggaaaaatagaattgcctgattgatactccatagcttaacagaaccatcatcacttccgctggccaacaatgttggatctgccgaggaaaagtcaattgaccacacacgcctctcgtgctctctcatctccatttgcacttgactcctcgtcacgtcccataactggaaaggtcaagcaaaagagttaaaacaaaattatctaaaaccttaaacaatgaataagtttaaggttgacttacctgaaccacaccttcaaagttacttgaagcaatctgactttttatatagctattccagcatatactactaagcttcgacctagtagctatttccaccactggatagtgaatatcacgatcctcgtttataattgtgttgcattcaaaaactttaattttcttattaacaccagctgtggcaaacaattccccatcacgatcaaagctgagggagcatactaggtttgaagaatttagaagatccccttgctttaaatctgctttgactttcaatttactgaaagatagatacttgcacaaaccttccaagaaaggatttatccaaccactttgtcttctctcatagctcctatcttttgatgtcaaattattgacaaaacttctttcacttacaatagcagaacccttaccatcactacttattggagtttgtctaatcacatgtttccctgctagcttggcaggcctgcatcttgttgaaaaatatgcagactctagctttttgaagttcttcatcaatcgagaattttttaaaagaatgttatcttgatcttcactgtctgacttttgctcaccatcaatattatcatcacattcctctaactgaagattccttaatcctggtctgaatctttttctggatcccaagctagtagaatcatcattaataacaatattcattgaagggagagttgatgttgagttatcttccttcactagatcaggacatgaaccgccttttttcttcaaaattgattgttgcttcgtaacttcttcgatatcagaacacaggaaggagagagtattttgcaacttatccgcagcctctagctttctttgttgaattagtagaagaaactccaacaacagttcttgctcctctatttgctccctgagctctatggctgcttcacgttcttctaagtcatctcgcggctcatttaagaactcactttgtaacaattcactgtcatagatggtatgaaagtaatgtaagcttgatcatattgaagttaaattacaagttaatagatgtagcaagtgcttctattataaaaccctgtaacaagttcaatgagggcatgtacaataaggtaatgagatggaacatatttaaaggtttagagcaaattaaacaaatttaggaaactctacaatctttggaacacagtaaattatagcagaatgttctgcatgtcctcacgacgaatcaccatgaacatgacccacacatgaatcatgatgggtgaatttgtgtacattctaagttggaagaggaattagagattcaacagggtcaattttaaaatggaaatgaattcgagtgttttagaaggcgttttgtatggagttctcttaccccatttttggcctactagttggttcaggatgaagtagccataagcaaaatgaagcttctttcggccatttcagtagcaactgagcaggaagaactcgatgccttagactagacattgttctacttttttcttctctcgaactcgatggacagaataactaatcaaaaatagcaaaaccacatcagcatacaaagaaacaaacatgaacgcttcaaaattattgtttcaaattctattgctacgtgtatcgaaaaatgcaactaatactttcaatatcaaaggctatttagagaatatgtcagtgaatgacatctcagaatttttgcaagataccaaaacctcttacacaagatctttatttatagtccaaatgagtagctcaagaatacaaaaactgtataactaact

SEQ ID NO: 15111 - DNA, 5423 bp, Cannabis sativa
  modified_base (2781)..(2781): a, c, t, g, unknown or other
  modified_base (2947)..(2947): a, c, t, g, unknown or other
tttttatttctttcctaaaagcaacgtggtaacttgttgtcctaggagaatacaaatattaaatattaattttatgaaacattgtcacacatttatttttactcgtgattagtgtaaaagccaatacaatgttataatgataaaatatgatattacttatgttatgcattcactatcttctcctttatatcttatatttttattatatatcttattttatgtcttcactttttactttatttaatatgtcggtaactatggttggatagtacaatgaaaacctaggcttctccaacaacattactcctatatcaactttatatatattatatgattattttgatctaattagatatgatgattatcaaaggcttttctttcttttgttatacaaatatatagctcataatattttaaaattaatatttatagcattatattgctaattagtgtggatcatttgctaacttaaattaactacaatttgaaaatgattcaaggatttgtgtggctttgggttgtttggggtatctactagtctacttcattaatcaaaccaaacaaaaatcaatccatagtaacaagggatgctacttccccatcctaaaaaaagcgataaaatttagttggttgctcaataaatcatgtataatttttgtatctggactccaaatgagatgatttaatatgttttgaaaagttggaaacgagctctattattttgggtttcacaagatctttgagaaaatgataaaatcattgtcaaaaataggttcaaagatctcaattcttcacaaaattgtctttttagcacaaacttacgaaaaaaacacatcaaatttatataaaaataaatactattccatctaataattgactaaaaatgaatacacaaatatgcattcatcagccaccctatggacaaatattagaaagtttaggaatctaagatacaatccaagatcttgaaaagattaaaaaaaataataataattgatattgttttaagttaaagtttaagaataattaactttcctattatgggttgaattgccttataataatacaacaaaatacagaatatggtaattaatgattgaagtatatatattatgtacttgttcttccaagaaaaaatagggtaaaactaaaaatatgcaagttttgcctttttggaaaagaaaggccaaattttcacacaagaaaagaatgacatatctttgtcattttgtaaaagtaaaaccaatttattttgttgttcttgttaggtagggtaacaattgtgtacgtacaagggtattatggtaattcaatcaattaacaacttgtacaaaaatgtgtggtgtggggagagagaattaatcacaccaaaaaaagcacgtgttattcatgttaaggaatttaataacatttggccactaattaaacctagtatattttctacattaggttttgctttgtacactctttttttttccaagaaatcaaataagaaaattgtgtcttttatttaaattttactgaataataaatttgaaacaaaataacttaaatgaataaacttataataaaatctcaaacataaattataaaaatatcataaatttaattttatgtcatatgatttttttctattacaaaatttactattatgttgttattagtaacttcaatagatataatttaaatgagtaatttgactcaattttcaaaaacacaaaaaatgaatttgataaaaactggttgtattaatctaaatttttgtaaataagattaaagatttttagtatatatatatatatattttaaatttcaatcacacacgtagaatgtattaacggtaaatacgtgtgtatcaagtcgacctgacttatatttgaaaagcctgcaataatataaattgtattgtgctggcatataaaaagatatgagttatgtcgtatcataccaatatttaaaagggtaagcctgatacggctagtaaactcatatttcgtaccgtgctcggactcgtatcgtgttttactcgggttgattcatttttcgagtcaacctatttacttatatgagctcgaattcaagctttatttttttgctattttttttacaattaataatttaatcactaaattatatatatattttttataattttaattatttttatatagtaaaatttcattaaaaaaatttatagatagatgactccacctaattttttatactttttattattttccttttatatatatggagagaaatataacaaccagaccacactctgactactattactgtcaaaatttaaatttaaatatttatttagaattaaataattaaatttaagtatttataacattaattattcttaaaaaatttaaatttaagtatttataaatgactccacctaaatttttatcctttctattattttctttttatatatatggaacgaaatataacaaccacaccacactctgactacattattaattattattattattattattttcttctcaaaaatcatgcattttttttttattttattttgtcttttttaaaagaaagagacaggtctgtcttaactcttaagaaatgaaaaatttgagaaaatccattaccccatttctattattatcaataatatgatctttcctatgtcgacagaaaaaacaaaatgtcaatagtgatgaatatttttcacccaaattaaaaacaaaatttatttaatctatatataatttatgggatatgattttgtcctgttattgtactttnacggattgtaatccgtgatgtacagcagccgtcagatgagagagttatttgatcttacggctgagattgatctagaggtaattagggttaaaaagtagaaacgtactctaacactcatttaatgtaccctgagacccatctagtgtaccacggaatacattccgtnaaagtacatcacgggacaaaatcgtatccctataatttatattaattagtactactggatttaattagttgttgatatattcaaggcacacaataatgttgatcaatcattataacgccatatcaaattcaaaatattattattattattattattactaagtcaatcacgtacctaaatatatattcacacacaagttttttaaagtgcaaatatatataaaaatatacagttgcaatataatacatgatcatgtgacacattattaaattggattttctataactttacaaaaattgaacattgaatatataggtatatgtagggaaataaataaatattggtactgtttctaaaaataaaaaaaataatattggtgggcgttcaaatcatttaaccaaacacaagtttatttaatgatatattattattattataaagtaattaatacttctttaatttagttaaagagaatgaaaatacaaaaatgataataaaaatacgaatatataaaataaaatttaatatatgaattaaaaaattgataaaataatattatatttattttgttggaatagtttctcttaattttaaataaaatagtcattacaaccaaacaaaaaaaaagttgatttattttcagtctaacaagaatttttctattttgcaggaaattttgtgaagtacattaattaataaatatgactttttttggctcttatacctaagaatgagtttgcaaagcttgctttgaatgattgtcatactaataaattaaatttttattttatttatttgaacaattaaagttatttattattattataagattatttattgcatattgaaccaaattaattaatcaattacctcaaccatttgaattttgaatgtgttacattaattaattgtcacttttttaaagggaacatttgtatgaggtatcaaattaagttgaaaggtggtaattatcagtagggctatagatcggttagtttggttagtttatactacatattttttaacttaatataaacatcgaattataaaatttgaagtccaacctgctcaatttttttaaaaaaaaaaattaaccccagtgacagtttggtcagattaatcgtccaaaccaacttaagagttttttttttattattttttttttatttttttttttacaacaaatgaaaatagtttttccctttagaattttacaacaaatatatacagagatagtgtgagtgtgagagactgagagagatcaggtcatgtgatttctcttatatatacatatatattatttatattataataagtaaaaatttaaaaagtaaattaaaagctaaaaacataaatgtggcagtttggttaaatcgggttaatcggacaagttggttctattttcaactcatccaattaacagattgggcggtttataatttggtcgagttttttcgatttgtattttatattgattttttcggtttaatttgggcgggtattcagattggacggtttacaaaaatttatgtacaattacttacttaatgtatgactacgcttatttttttaaaaatacattaatttggcccctctaatgttgtacacatttatattatggcatgactagtgactatgccctaattggctattttccccaacttttttatcaatacctaataatatgaacattgctattggacaatagagcatcaagatgtctagtatctctatgaggtggcactttataattgagtaacatttttttataatatttattaaagtaaaataaataagatccgatatcaaaatacataaatagtaatattacacatcacaaaaatactaaaaaatatcataaatgccctttagcatttctctacaaatatatacaattttttttttctacttcaaaaaaattatagatttactcaccctagccccatcctactactcttcctatccttcctaccaaacaagtctttttacctctccttccacacctttctatttatctacacaaaccctaactaactacccaaacaataaattaggtaatagtattagtagcccactcaaatctaaacattattattttttaacccattcaattaattttataccttactgaaacaaccaattttttttttttttttggatcaaatgaaacaaccaacattgtatttcaaaaaaaaaaaaaaaaaacctttaaaattaatataacaaaaaccttaaattttctgataaaagtagtcggtgaatagtacgaatgtgtctaaaaacatgaaaataaaaagcaatagccaataggtgtactatcatattccttttatatataaaaatatttaaatgagaggattcacatttgttgttaaactaaggtgaaaatattaagggtgtgtttgcaaggtgtgtttggatatgaggtggtaattacatatgaattcctaatatcttgtttggcaaaatagttagt

SEQ ID NO: 15112 - DNA, 5515 bp, Cannabis sativa
aaatatgatatatttgcccctcattctccactttcagttgatcatttaattctgccctctctctttcataaatatgtggaggaattttgccaaaaaagctacttcaaggaagtttaagctctcttccgattctcatatttcttcttcttccagttctgcaagagatactaattttctacgaaaatataggcctgacacgactcgggctactgaaaattcatggttcccgttgctgggttttcgtcgatttgggataatatcgtcgctggataacattttgggacaacccagtttgttgaattcttcaagtaacggttttggtactcttggttttaaaggctacgcaagtgttgccgaggccattgcttctactgatgcggaggacgattcgtcgggttccgatgaggttcaggagttgttagacgatatggataaagagaacaaggtggattcctactttaaggggccgaagaaaatggtcgcaggaatgggaatcacgaagtaccacattcttaggaggcgacagataaagatggagacagaggcgtgggaagaggctgccaaagagtaccaagagcttttaatggacatgtgtgagcagaaacttgcacccaatttgccttatgtgaagtcattgttccttgggtggtttgagcctttgaggaacgccattgttgctgatcaagagatgtgccgggaaaagaagagtaaaccctcttatgctccctattattatcacttgtcagcggacatgatggccgttattgcaatgcacaagctgatggggttactaatgactaacagtggagcagttggtagtgtcagggttgtccaagcagcttgtcagattggtgaagctattgaaaatgaggtgggtcgctttaaagtttccatttcgttttgttcttaagcataatacatcagtatgaaagcaagtatctcatgtctacatttatcttttatttgtttggtaatttgggtaggtgcattttgtagctaactataaaatgtgcatccctgtgctactttaccaggaagtttgttgaaatagttcaattatcaatttgttagtttcagtttcagaatcaagtttgcgacatggtttgctttcagacatgattttagatttcattttctgagactatttgcatttttcacaattagtctgctatgatcaatggaattatagaaggtttgagtttgtgtacatgtagctgtctgctaaataagcagacctagaaggagctggcgtgattacgtgaactatatataatgatttcgtttgtaaaccaggttaggatacagaagttttttgagaagacaaagaaaaagaagaagaagaaggatgcaaatgcaaagagtgatgacaaggaacctgaggatgagcctgatgctgaaactattgagaaagagatatcgattaacaaggatcaacaaaaactaaggaaaaaaattacaatgttgataaaaaagcagaaggtgcagcaagtgaaggaaatagtgaagcaacaagatgattcaaaaccttggggacaggaagcccatgtcaaggtttgtgatgctcataacattggttcaaaattgtcatgttgttcttctcctcattgttactttatcttggttctgggaccatacaggttggatgccgtttgattcagttattgacggaaacagcctatatacaacctccagttgatcaattaggtgacactccaccggatatacgccctgcatttgttcacagccttaaaactatcactaaagaagcacagtaagaaagcttgcatctctggtgaacttgatctctctcattctgtgttcattctgtaatatatgcattttttttttgattaggaagacgagcaggagatatggtgtaattgaatgtgacccacttgttcggagaggcctggagaaaactgtaagtataactaaaactatggagggggtggggggtgcactaaaattatcctccttttaattttatttttttgttgtagatttatgtgctgttatgattgtttgcataacttcagacttaagtatcattcatagggagtagctaatcatagaagttttattgctgttcctacaggccaggcacatggtcatcccttatatgccaatgctagtgcctcctaataattggctagggtatggaatttaagcctctttgaatgatttgttttttcatttattattatataaaatatatatagataggtttttggagttcaagttactgctcatatagaaaattgtaacatcacgttttactttgaaaccaaataacctttgtatcaaaacaaatgttccattatatggcaggtatgacaaaggagcctatttgttcttgccatcatatgttatgcggacacatggagcaaaacaacaacgtgaagcagttaaaaggacttctaggaagcaactggaacctgttttagaggtctgagagccttgttggagtttgttttattaattcgttggtgattatgcttcagtgctctgccttagcttccccacaagcagatcttacattcacaaattgatctttcatctttctttatatgtttgccactcttgtttggcgtattattgttaggctaatgctttttttttttttcttctttaggccctggatacacttggaaataccaaatggagggtgaacaaaagggtgcttagcgtaatagacagaatttggtctagtggaggctctcttggtggcttggtcagccgtgaagatgtgggttgcatttaatttaatttgaattcttatttttcatgtagtgcttaagtactatacacaggcacaccaatttacgtaaacatacatatgtttatagtatgctgtgctctcgtgaacaaaagaaactcatattgcttgattgaagctttacatcttacctttatgttataatgtgtgtggggtaatggctgtgagttttaatcataaactattctaatatattaatttttaaataggttcctttgccagaagaaccagacactgaagatgaatcagaaatccgcaaatggaaatggaaacttaaaacagctaaaaaggagaatagtgagaggcattcacagcgctgcgacattgagcttaaacttgcggtaatattctctctcctttcttgttttttacagactttgtgttgtggaattgtaagttctgcttgaattgatatggtaatttttgttatgagaccaggttgggcgaaagatgaaggatgaagaaggtttttactatccccacaaccttgatttccgaggccgtgcgtatcccatgcatccttacttgaaccatctaggttctgatgtgtgtcgaggcatcttggagtttgcagagggacgcgctttgggaaagtcaggcctatactggttgaagatacatttggcaaatttatatggtggtggtgtagataaattatcttacgatggtcgagtagcatttaccgaaaatcatattgacaacgtatttgattcggctgataggcctctagaaggaaagcgctggtggctgggtgcagaggatccttttcagtgtttggcaacatgtattagtcttgcagaagcattgcggagcccctctccggagactactctttcacatatgcctgtccatcaggtatttttctctttgcttaacagtttgcattttatggttaatgtctatacttgatcggcctaaactagtggtgttgtgacatggttctttaattccagagaagtataaatttaatacttttccgtgaaaacatgaataagtgccatcaacagcgaagaagaaatttagtcaatagttaatgtagtatctgttttatttgtctctgctgaaatagaagtggtttcttcatattctctggctccattggtttctatagcacaatttgtagacacattgatatgttgcattgagtttttttgtgcacttgggttccgcagagtttatctttgcattgttcctttgatatactattggggttgcttttctgtgaaagtacattaagatatgtgttgacatgtggggttttggtttttgtttgaatgtgcaacatgagcttcctgctcatatatagattttgatatttgagctcatgataaatggtactctgggagtagatgtgtactgttctttactttgtcactgctaaaaatgttgaaaggcaaccagaatatttgtatttcaataccatgtgaaatcatagctctgttataaaaattaatcattttcctcttgttcaatttgcaaggatggttcgtgcaatgggctacaacattatgctgccttgggaagggacaaggtacccaaagttctcttttatgaggagaaataaaaaggcactttaaaagctgtataatatggctgttttgttgtaaattgcaaatgcttcaagtctacctatttgtagcatgttcttttttttttttggtatataaaactatactaaataatgcataaaaggaaactgtactcactaaagtctcatcttataattgtaatttgcaaatgcttcaagtctacctatttgtagcatgttttgtttttttttggtatataaaactatactaaataatgcataaaaggaatctgtactcactaaagtctcatcttataattgttttttcctattaactaaaaatttctttatatttgtcatttttcagttgggagcagctgcagtaaatcttgttgcaggagacaaacctgctgatgtctactcaggaattgctgccaggtatctgttactaagaaaataaataaataaataaataaaagaagaaaaagaaaacttgttttggtggctctgcccagaagtgaaattattctcctgtctgtcttgttgaaaaatattgttctttgtagagttctggatatcatgcgcaaagatgcaaaggatgatcctgcaacaaattcagatgcagtgcatgccaggaaattaatcgatcaggtctttttctcatgcttctcatcttggatcagtaatgaagtttgcttataatgtaaagcattgtaattgtaattgacattagcatagttttaattaaactaaatagaagtatttaggctgatttagaacagtctttgattcagattgcttaactgataagtaatcttaatttcatttgctcatataattgggaatgtgcaggtggaccgtaaattggtaaaacagacagtcatgacatctgtgtatggtgttacttacataggtgcacgtgatcaaattaaaagaaggttaaaggagcgtgatgctattgctgatgattcagaactctttgctgcagcttgctatgctgcaagagtaagtgaataaactgaacattttctcttatggaactgtactttttatgaagacggatgatgtatctgtgttttaatgaacttattttactgcatgagcagactacgttgacagctttagaagagatgtttgaagctgctagaagtattatgagctggcttggtgattgtgccaaggtatgactcatatatagtgtaatcacctct

SEQ ID NO: 15113 - DNA, 12204 bp, Cannabis sativa
  modified_base (49)..(61): a, c, t, g, unknown or other
tgtttatttcatcgttttagaatgtttatttaggatgttaataaacatnnnnnnnnnnnnntctaagatcctggtaaataatttccaacatatatatcatcgggcttcaggacaagttctcaatctagacaagtcagtgatgtccttctctcctaacacgaccctagcaactcaagtcttcttccatagagtgctttcaatgcctattagtgagtgccatgaaaaatatctgggcctcccatcttactctggaagagataaaaaggagttgtttagtaatatcaaggacaaaattcggaagcttatgcattcttggagtgagaaaattttcttggcgggtggtagagaagttcttctaaaagctgtggtacaatcgatccctacctacgctatgagttgtttccgccttcctaactatttttgtaagcaacttgaatcaatgatggctactttttggtggggcatgaatgaaaatggatctaaaatacattggcattcatggcacttgctatgcaaaaaaaagggagaaggaggattgggttttcgttcttttatccacttcaatcaagctcttttggcaaacagctgctgaaatgcaggtattttcctaataatactttcttggaagctcatgttggtcattcgccttcattgacttggcaaggcattcattggggtcgagaactactagttgaagggctgagatggaaaattggtaatggcagaacagtaaagtgtggtaccgaccattggattcctggtcacactaatttcctccctatacattattcgggtccttcaaactgtgttgttggtaattttataactgaggagaggcaatgggatattgatatgctgcagcacgtgtttttgtcgctcgatgttgaaagaaatttaactatccctcttggctacttcagcaatgaagacacccttatttggcaccatcactcatcgggttactacactgttcaatctggttatcacttggcttcatcattagaggaatctaccctcagttcgagctccactttagcagcctcttggtggaagttcttctggtcacttcagctccctccaaaggttaaaatatttgcctggcgggtattacatgacgctctcccagttgccacagctcttgttcgaaggaagataattatagattccacatgctcagtctgtcgacaagcctgggaaacagttggtcacgctctttttggttgcaaatatgcaaagaatgtttggcgatctttgaatatgcatttcgattggcatgctgcctcctccatgaagcaaggtgattacttacatttcctctcaacaatacattatacctctgaaatggagcaactcttttgtattctttggtctatttggactgaaagaaacaaagtcgttcatggccaagttgcaaagccagcagctgtaacaggtactactgctattactttacttcagagttttcaagctgcaactgctaaatatcagcatgtcaaaccatctgtagcaccaagttcttcccatgctccttcggctgctggtgcccctttacaacatcctgctgctgctggtttttgcccgagttggaaaccacctgctgctggccttttcaagctaaatgttgatgcagctgtcaattcatcaacaagcacaattggtttgggtgcaatcttgcgaaatgaatttggcgaggtgactgcagcactatcaatgccgatgaagggtaatttcttatcttatgagaaggaagctaaagcactattttttggcttaaacatggctttacagcaccaactgccaattcattatgtggtaactgatgctcttttggtctcaaatgctctacgagctcccttcaattaaatttcatcttttagtgacttgcttgtagatgttgttagtcttttatcctttttcccaaatgtatgtgtttctcatgtcaaacgtgatgccaatatggcggctcatggattggcaaaacatgcgttaggggtggatgaggcttgtgtttggttggagactatccctcctcctatttactctgttgttgtaaacgaaactcatttctagtttataataacaagtatttttcctaaaaaaaaaaaaaaaagtttgtaacgaagttatttatatgttgacaaaacaactacgaatgaagttttgagtgtaactataacatccatcctttcaaaattgaatgaatttctttagaacaaagaacattaggaatgataaataaattcaaacaaagctagtaagagaagcaatgataaaagttgtggaatttttcaatatttttttttcttttttttattcatttatttactttattttattaaattagccttttttttttattcttttactatgtttgcaatttttcctaaattgaaaaataacatcaaagagggtatttaggtatttttaattttttttattaaaactagagaaattttatttgcaccttataaatttataagtattctccaatattaaaaaataactttaactaattttaaaagtcacttttaatatatattttgttaaaattctttcttacattattttctcttaatattaataattattataattttatttttacatttttttaaaaaaaaaatatgtacaatttttataaataaaatttcatatatttttttattaatattaaaaaatatattttttttttatagatatatttttaagaatattagaaagaagaaaaaataaaaaatagtataaattaaatatattttttaatataacataaaaattattaaaatgaaaagggaaatttgactttttatagttacaaatacctaatattttttccctaaacacataacatgtaatatttgtgggatatgacacattttgcaatatccctaaaatatctccatttacattatcccctatcccctctcttcttctctctttcttcatacccatcaaaccccaatcggggtccccatcggacccattggacccaaaagtttttctagcacatgcatcagaccctaattggggtcccgtcagacccaaaaataggatttttgcaacacatgcatcggactccatcggggtccccatcggggtccccatcggaccccatcaggccatcgtcttccccaaactgcaatttccccaaatcgcaaatttgaacataaatcgaaccctaaatctaacaaaactcacggtagacacataaacacatacattatacattatacattataaccctaaaatcaatacctatcaatattccgaatcatatatcacacacacaaaaaaaaacaatgacaaaaaaagggggtgaaccttaacttggacatttcggttttgatggggcggcagtgtaggcggtaggtggtgagaagtgctcggttttgatttgggagggggccggtgttgtgggcggtggtgaggggccgacgttgtgggcggtggtgaggggccgacgttgtgggcggtggtgaggggccgacgttgtgggtggtggtgaagggggttggggttcggttgagagagagagatagaggaagagagagagttggggttgagttatgagaggagtatttttggcttttagataaagtggtcgtaggttttcaattttgatatatatattagtttagggataaatattaaggtattttatgcatatttttttaaatttcccaataaaaaattcttataatttatggaatgtgaataaaaatttccttaaaaaaatttagttgagagactttttatttttaccattttacacaatttatagagggtcctttatttaatataagaaagcttggagtcttttattgtcttaagataaaactcagggactttataaatcattaatccttattatttttggaaggtaaatgataagttattctttattattaacatgattttgtgcattaaaaaaacgtgtcctaaaaagatgcaaactttctctgtttgttgaggaaaattgtgcattttttgttagatcaaggagtgtggagatgtcatagatcggggttaatagaccttggcttccaaggccttgtgttcacttgggcaaaggggggtggctgttccaatgggatacaaaagatgaagagggcgaggctagatcgaggtcttgcctccactgactggagaatccttttccccaatgcagttgtcaatcacctatcggccttagaatcggatcatagaccgttgctccttgacactatgtgaggtgtaaattgcaagtgacgtcagttcaagtatgaaaacatgtgggctcgggatccccaatcgttctgggttgttaaagaagcctggaaggaaagacgacgtcctaatccaatgatcaacttccaccgcaaagtcaaagtaacttgtaaaaagcttcaactgtggaacaaaacgaaattccttcatttatcccagcaagttcaacaagcaaggaaccaagttcaggaggcggaaaagaaaaacaaggacaactttaacgaagtcgatcaagccaaactcaagctttcagaggccctcttgtgggaggagatacattggaaacaaaagtcctgagtacagtggcttcaagaaggggataagtgttccaagttcttcatggcctccaccatcatccgtagacaaaggaactatatccaatgcattaaagacactccgggaagtgattggatcatggatcggaatttaattgctcaatgtttcctccgcaagtttcaggaaatcttcaagaagaacaacactaccctcattcctctaaaggagggtactatgcagaaactaatatcgaattatgacaatgctaatttgaatgctatcccatcagccgaggaagtaaagatggccatctgggacatggggagggacaaagctccaggtccggacggactcccaccaagcttctacattcaccactggggaacggttcgtgaggatcttattgacatggtcactcacttcttcacgcgattggagttgccaaaatatataaacgataccttaattgtattgatcccgaagaaggactccccatcattagtgactgactaccgccctattgcgctttgcaatgtaacatacaaggtaatttcgaagatcattgctccaagactcctgcccttgctacacaatataatatccccaaaccaagcagcattcatcaaaggcagacacatagccgaaaacacaatgattgctagggagattgtccactccatgagtaatagaagaggcaagcggggagtcatgataatcaagttggatctcgaaaaagcatacgataaacttgattgggattttgtcaagacggttctcctttaatgtgggttcaccagcttgttaacggagtggaccaatgcttgtatcaaggtagaagaaattaaactgctgatcaatggctcaatagttgggaagttcattccggaacggggattgaggcaaggagacccgctgtcccctaccctctacataatagctgccaaagttctgtcgcgtcttcttattgaaagagagaatcagggatgtataaaaggtttcaagcttacttgaagtgggaccccgataacgcacccaatgtttgcggacgatgtcatcctttttggtcaagccacagttagagagacaaggggggttcatggattgccttaattattattgcaactgctcggggcaatccatctatctccaaaaatcgacggtattcttctctagaggagtttctagtaggaaggcccaatcaattgcagacatactcgggatgcagagaatgaataggaaggtaacttacttgggtctaccattgtttagatctgttaaaagaacagaagatactcaatatctagtggaacgagttctaaagtggattcaagggtggaaaatgaaactgctctctagtgcgggaaagacatgcttgatcaaggctgtgggttcgagtctatctaactatgttgcctcttcggatgtaatcccaatagcaacagccaacaagattgataaactacttcgagatttctggtggggtgacactgaagataaaaataaaatgcacacaattgcatgggagcggctttgcagaccgaaattagggggaggccttggctttcgggcaacggaaaccatgaacaaggcattcctcatgaagtgggcttggaaagtaatgactgaggaaagtgggctatggtgccaacttatgaaggaaaaatacataaagaatcaaaacttccttgacatggagcccaaaccatctgacacaatcctttggaaggcaattctccgtgcccgtgaggagctccaaaaaggcctttgccgaaaaattgggaatggacagtccacatccatttggtttgatatgtgggtgccagggaacaacagacaaccaacgcctcgggtaactattgcagaaggagtaagcttggtaagtaattttattcacaataatcaatggaactccgatatgatcaagagatggtgccagcaggaggatgcaaggaaaatccttaatatttccctccctaatagtccaacaagtgattcatggctttggctacctgagccaaatggaaaattcactgtcaaatcggcctacagggtgctcagaactatgatgctaactcagaaacggagaggaaatggagaatgatttgggggagcaatattcgttctaggctcaagatgatgtggtggaaaattctttccaactttcttcccatcaaagagaagctcaatccctttattgctttgtccgataccaagtgccccctatgtaatgttgaaaatgagaatagtcttcatctgttttgggaatgcaactttgcaaggactctttggttcggaagcagctggggggttcaaatagatgctactcatatccttagctgggatgactagctactctggttctcaaaggaggaaaacaggccatcagtgatcaactataatcagctcttagaaggggcgacgttaatctttgaacatatatggagggagagaaacagagtagtgcatgaggggcgatctactccagtcaaaatattagtcagaatgatcaacaacaggttaattgagatggattccatacgcaacacggcagaaggtaagcaaactgagtggcagccccccccccaccgggctggatttcctacaatacggatgtctctattgggcgcatacaatcagcaggagctgctattctcagagatcacactggaaatatactaaagatcctcacatttcagacaaactacagtgacccgcatcctagtgaaacctttgcagtgtgcaaaggagccgaggcagtggcgcaattgggatacaaaaacgtcattttccaatgcgactccaacaatattgttgcggctctgaattcaaaaccaatatatatatacataacctgcacttcaacatacaggacttggccagaaacttctccactttggctggtaatctcaacctctgggagatccaatgggttcctagaggctgcaatggtgtagcccatgcagtggctcagtgggcaaattcgaacaacaacttcggtcttctcgatttgcccaattttgacgatttcctccagcaagttgatgcagatggtcgtgcggatttaactaattagttttggttgtattgtttttttcctgctttgttttttctgttttgttcgttgggcgttttgcctttgtcactcttagttctttgccagtttggcttttgttttgccagtttggctgtttgctttgccttttggaaaaggctgtttgttttgtttgctgtggttcctggaaccattaataaaaaaaaaggagtgtggagatgtgttcactcaaaaaaaaaaagagtggaaacgatttttttttctattcaattatatgcattaaaaaagtctccactttgctatataaacccaaaatagtaaactatagtatggtagcaaaaaaaaaaaaacaagataataagttacaataaaatcccatagaaaaatgaatgtaaaacttggttttaaattttatgagaaaatgtctcaattttcagaaattgagaaaaacacccgcagataaataaaatggcaacatgcaaccattttaattatttaatttataataaaataatgtgtggcataaattcttaagtctaattatcagttgtaaataaatattttagtttaatttttggcggtaataatacttaagtttaagtgtgtttcgggggctcttaatgattggaatgatatggttttcaagaggacacgcgaggctatccgcaagaagaagaaggagcttagaggtgctcgactctaacttaaatgatagcaattagttgtcttataagaaactagaaaacgagcttgatgtcctgctttctaaagacgagaagtattggttctctcgtgctaagaactcttggttgaaattgggtgacaaaaactcagctttctttcatcaaagtgctactcatcgtaaaaagaaaaatgctcttggtggtattttttataagaatagtgtttgagttgagtcaccccgtggcatcgctgcagtgtttgaggaatattttagctctttgttcacctttcatgatccccctgatgaggttctacctatggtgttggattcggttcaacctagggtgactaatgagctcaatgatgtgttaatgagacctttttcagaagcagatgtgtggattgtgctgtttcaaatgcatccaaataagagccctggtaaggatggcatgactgctggttttcatcaaaaattttgggacattgttggaactgatgtgtgtaaggcttgcttaggttttattaatgggttggcttcctcttcttctatcaatgaaaccattattactttgattcgaaaggttaaatcccctaccctcactagtgaatttcggccaatcagcctctgtaatgtactgtataaaattattgctaagatgcttactaatcgattgcgggaggttctgggggatgttatttcagaagagcaaagtgcatttatctcggggcgcttgataattgttaatgcaatgattagttttgagtgtctcaacgctattaaaaggcataagaaaggaaggaaagggtttctggcttataaggctgatatgaccaaggcttatgacagggtcgactggtctttcctgtgcagtatattgattaaactcgagtttcatcctggttgggttgggttactcatgcgcttcattacttcagtgtcttatgctattagcattaacggagatattattggccatatctcgccttctcggggcttttggcaaggggacccactctaccctttttctgtttttggtgtgtgttgagggtttgacttctcttatcaagcgtgatattggacgatggacaatctcgggtcttcaatgtggtagaaggggtcctgtgatttcactttttttgtttgtggatgacagtttcttctttctggaagcatcggtggctagttgtgttcgatttagaaaaactttgcataagtacgagaacgctttgggacaacttgtgaacttgcgcaaatcagcggtgtgcttctctcatagtattcctcttgattttcgtgagtatctggcccacattctcggggtcctgcttgttccttgtcatgataaatatcttgggtttccatgttttgtaggtaaaagtaaaagtggtctgtttcaatcgattaaagataagatttggaataaaatttttggctggaagtcaaagctcttctcctctggagggcgtgaagtgttgttaaaatctattatccaggccattcctacttatgctatgagctagtttcgcttaccggttggtattatcaatgagattcaccgtatgtgtgccactttctggtggggtggggatgatgataagaaaaagatgcactggtgtacatggcctcatctttgttggcaaaagaatgatggtggcatgggcttccaggacatgtttctatttaatcagtctttgctggctaaacaggctgctcggttgtataactcgcctgactccctggcagccagggtaatgaaagggttctacttctgcaatggctctctgttaactgttgaagtgacaaagcgtgcttcttttctgtggaaaagtattttatggggtcgggatctcttgaagaatggttgtcggtggcgtgttggctctcgtgagtcaatcaaaattcatgaagatgcgtggatcccaaaggatcgtgtggggcggacgtactccttctcgggtgggtcgaacctacagttggttagtgacctcaaatttgattttggaagatggaattcttctctttttgaggagtgtttcgacgtgggggaggcttcaacaatttctttatcccgtgctccttgtttgatagtcaggataggcttatttggcatttctctgataatggttctttctcagtaaagagtggatattggagtactgtgtccaggttggggtggggccaagcttcgagctcctctagttcttcccggtggtggaaacttctttggcaactgaatcttccgcctaagataaaaaaatttgtgtggaaggcatgtctgaatttcattccggcttatgccaatttatctcgtcatggtatgaagtttctacaatatgtccaatttgctctcagaataacgagactactactcatgctctttggctctgccattctcttaagtctattcgtttggtttggtttttgagtggccttttgactccttgaaggacgcctcttactattatgagttgttactagggtgtatggatatcttgaaacgacaggaacttgagcagtttataacccttggatggcgtatttggaataggcgaaatacctttgtgcatgatcacaagctcctctccgataacatggttagtgcctgggccatggattatttatggaaatatcaagatgctaataatgtcgaaccagcttctttgggtccagcttctagcaatgcaagtaatcggctggcctcatctgagacggatctggttcttggtgagttcaatctttttttggatgctggggtttgtgttgagaaccgaaaaatagggatgggggctgtggttttcaatcgtttggggcatgtcctattctcgagtgcgactccttgcgtgggttttttggaacctcacgttgccgaagcaaaagctttactctatgggctttcttgctgcgtgctgatggggtatacgatgattactgctttctctgattgtcagcgggtagttcttgctgtcaatagcagggccccttgtttcaatgagtttggtattgttctcaataatattaatcatattagaaattctttcagtagcatatccctgtcgctttgtaatcggtcaaagaaccatgttgctcattctttagcaaaacgagtgttagatttagatgatgctcgggtgtggtggtcgggcttgctcactgatttagctgtttaaatttgcctatattttgtattctgatcttgtggttgatgccttttaatggaatctctttgtttttttaaaaaaaagtgttaaataaattgctacgtgacaatctcttattggtcaaaatcgttaattttttttaaaaaatagtttaaatatataaataagaaaataacacgtagataatgacttaacatttaatggctagatatctacataattctaaaaatacaatttaagtattattactaccaaaaattaaacttagatatttattttcaactaaaaattaacttaattatttataccacaaattactctttataatattaagtaaaaatcaaaacattaacaaattcagcaagaacttaattataaggcaggatagtatcacataaataccaggagaaataatcatgcaaattatttgtaattaacaaaagaaattcatcccccatgacactctaaaattactttaatgttatttttctctactctctttaattctctcatttttaatattttattagaacataaatctacaaattaatattttattattattttaagggtaaatggcggtaaaacccccaaaagtttcattttagtttcacttaatccccaaaatccaaatttatgcggtaaaacctgtaatatccgctttcttggttgaataattttttttttagtttattttgtttgtcaatggggataatttattattttgaatatttatgagtttggtggagtatgaaatttttcttagt

SEQ ID NO: 15114 - DNA, 3801 bp, Cannabis sativa
tttttttttttttttgtattctatttagtttattaatgcttaccatgtcaatgttagtcatatattttatatttgtcagaaattattagtaaactttatgtggcaaacactaattaaatataatatatataaaacaaaataagttgaaaaaacatatatacatttattgtgtttctctaataataatttatatcaataagcatatgtagaaagagatgggctagacagcaagaaaagaagtgaaagaaaaacaaaattagtaaaaaagagaaggcttacacaatagagtaagcaaaaactattatttatatatatcaagcccattatacaaggaagacaaggaagacaataacagaaaaagcaaaactaacataacttactatcaaaacagactaactaacaattaattagttaagtgacatcactaagcagtttattaacattccccctcaacgaaatggtgtaggagatatcttgaatttaactgtcaaatagttaaacctttcaattgagagagtctttgttaaagcatcaacaatttgatcaagtgcatgcacatatcgaactgataacttcttggctagaataaggtatctaacaaagtgcaagttatttgtacagtccaaaacaacctataaaattacattaacaatttaaaacatatctctaatcacactttaattagatgtttatacataaaacttacaatgttgtgattagaaatttatacccaaaatactcgaaaagttaatataactcagatagcgatcaacgaagctcgaaacgagccttagacaacctattacaatcattggcactacaaaaaatgtcacttttaccagcacagtttgctaccgcactggtaaaagtaacttttaccagcgctttttgcaaactgcgttggcaaagagatcaaagttttaccagcgtacatttgcaatggctaaaatctaacttttaccagcacatttacgcactgggaaaagtcttttttgcccgcgcttttcattttatgctggcgaaagttctataatgattaaggaccatgtgtaatatttacgaggtttcaatagaagttatactaattggtattaccatggtgaacatttagccactgcaaatgtgcgctggtaaaactttgacctctttgccagcgcagtttgcaaaatgtactggtaaaagttacttttaccagcacatctcatgaactgcgctggcaaaaaggtcacacttttaccagcacctatttgctgacaaaatatatttttactagcgcaactcatatttgtgttggcattacaagtaatataaaaccctcccccttaatactttttaccagcacaaaattgtgtcagtaaaagtacttttcccagcgcgttattgtgctggtaaaagtaagagtttttccagcgcacttttttgttgccaaaagttagacttttgccagcgcacatttgtgctggcaaaagtctaatttttaccaacacatttacgcggtggaaaaagttttttttgccaatgcttttcgttttgtgctggtaaaagttccaataccaacatagatttaccaaccccttttgccagtgaaaaaatgtgctggcaaaagtaaaacctattttaccagcgtaatatctaatttttgccaacataaaaatgtgctggcaaaagtcgcatttcttgtagtgtcatctctatcttgataatggacaattattcagaacttcagcaacaccatgaagatacctttcttttgccttgttctagtcatacaaactcttgagattaggtaaagggtcgggcaccactattcttttgagtgatgctttcttggacagtatctagatacaagttgtcactaatttagttttagtcacaaagagtattgtgactaaaaatacatctagtcacaacaaattgtaatttttgtgactagtacttttagcgacggatcttttagtcacaatacaggaatgataatttataattagtcacaattttactctcaaagctaagacttgagaaattctgtttgcgctccaatgggccaagcaaaaccaatggggagatatttcatttattgtcaagatgcgcaggttgtggtgaagtccttttcgcagcaaagatatcctcattagaattttctcaatttttctttttaggttttagatttaactaagcactttagtaattgtattttcagcaacatcatgctttagcttatgaactagctagaagtgctacagtttctagtttaagtgctgatttttttatttttttttaagagaagaaattccccttatatatgattcccattcatgatcattcttagtttaatcaacatgatgttcctaaaaaaaacatgttaaattggagaattgtaagcattaatgtttcaaatatttaattaataaacaaagcgttgactcctaattaattaaattaatgtagatgtatagtatgattatttaatcttatgtacatcaatgaaaatgcagtttatttttatttttaagtgaatgtaggttttgtttaattaatcaagaattttgatttggaattaaatataagtgtttttttgagtgcaattagctacaacataatcactgcggatgaggaaattactgtactactttcttagtatttagtcgaattaaattttattattagtgagagactaattaagaagaaaataaattaatcaattcctactttgtcccgataatggttcagcattttgtcgtttatgattaaaatatataaatatatatttgattaaagtcataatgttaattactaattattgtctcgttcaactttagtgggtgaagtgtcgtagtctttactagcttggctttataattaaataattaattacacatgggtggaaacaaattatatatgaactgtacacacaatatcaccactaccgtctcatcatgaaccttcataaatctatattgttttttatttattcattttttcttaaaagagaattgcactaattattatatgtacatgaatattgttttttcttttttaataaaaacgtgcacaaatttatgaatgcatgaactcagtgattgattgccatgaatagtcactaaaaaaaatacatacccatatatatatactagcaaaaagttatgcgtggcacgtatactaaattttatgttaagttttttctacattatttaaaagtgatacaattaaaaattaaagaaaaaatataattagttattaggtgaaattattattatgtgtatctaaatactataatttataattttcgataattaaaagtaaatactgaatgcaatatattagtgtacaccgtattctttgtggagttcttatcttgttgtgcagtagtaactggtaaaatcaaaactctagtaataaatgttgtttttgctcttgataaaactatatataagtgaaaaacttgttgaggtaatctaatatttggcctagacttatttaatcattgcaaaacttaaatcttataaaaaactgagtttgtttaataacggaaatccactattttaaaacaaggatgtggtagagaaataggggaagtagaaacttgatgatgagtgtgctttatttttatagtgtgaaaagtgaatgacttgtataatgattaatgaaaccaataataaggagttaattacttttgtttaaaaggaaaattaaacactaagaagatgcagattaacagtgctactaaccaaccgtatgagtttgactaataatatagtattcttttgatatttgagggtttctattgaaaagacaaaaatt

SEQ ID NO: 15115 - DNA, 6885 bp, Cannabis sativa
aataacatcaatgtgtgacaattatatttgtagaccaacatttgtgaaaatttgcaaacaaagagcagtagaagatttcaagccggatccctatgtagccactcttctcaattgtgcattgtggtcattctatggccttccagtcgtccggccagacaacattctcgtcgtcaccatcaacggcacaggattcttcatagaactcgcctatgtcgccatctttttggtattttctcctccctccaagcgcgtaagtatcctaaatttctatctcaaaacttaatttacttcacatttttttcagtaaacattactattcagatggctttataatttatgactaatttttttttaattacagaaaaagatcatcattgctgtaatgattgaaactatattctttctgattatagtaatcatcacactcagagttctacataccaccaaggaacggtctatgcttgtagggatgctttctataatcttcaatgtcattatgtatacttcaccattgacagtcatggtaatataaatatctttattcagattttagtatattttgcaaatatgtctgtaattaattatgtgtataaactttcagcgtatggtgattaggacaaagagtgtgaagtatatgccattctatttatcacttgctaacttctgcaatggactgatctgggttatctacgccctccttaaatttgacccctttatattggtaattatttttgctcaaataattaaccactgcataattgtgtacataataaggttttaattacttaattattatatgtacagataccaaatggtttgggagctttatctggtttagtacagctgattctatatgctacatattacaaaacaacaaaatgggatgatgatgatgatgataatgatgatgacaagtctacctctgaagttcaactctcaagtgtttagaattagagggacacaataatattattaagtactctaattaaaaagaaaatgctcacttcttttttgggtccttaattaagattaatcccattttaagttgtgtaccggtacaactttttgagctactagttttggtgatatatataagttctagactaatgtcgtgactaaatttttctatttagacttaatataattcacaagaagtattattacatttttactacaagaccaaaactaaatggaatattgcagcacaccatgtgctcttaagcttaatttgcttaaactataaagacagacagtgagtagagaaatttgttgtttgattgatacaagtgtaaacaaaaaaataaataacaataataaaaaaaatgaaagaaaaagaaaatagcaaaccctaaacaattcatattacagaaaagcctcataagagtaaagtaaaaccttttcaccttaagcctacatttccaaatcatcaagcaaaagaattcaccaatacacaagaaggccatgtacttgagagtttctttttaggttatgtgtggtatggcctggccaacttaattataacaacaatattattatttatggtatatgatgggagatcttacaaaggaggtgcttaagaaccaagaaaaacagagaaaaagaaggggaaaaaaaatactaacaaaagctttacatcctccgaaaaagcgaggtgtatttctttcagcagcgtatacccagcagcaatcttgacctcttgttttgaacatcccaaatttctattctttttcatcatcataaatacagattagatcgaaatctctccgatcctaagaataatcatacttcaaatttgttcatctggtcgaaagcaagagagcttcaaggccctcgatacttgcggaagcataggcaaccctgaggctggtcaccagggatcatacctccaccttttgatgtgtcaatggcctccaacaatgaaactacttcgtccatctctggccgtttgtccggattggcatcccagcatcgcttcattacgttggacagggaacttggacaacatcttggtatctctggtctcagattctgcaaatgcaacatgaagtagagttgattcggcgtgtaaaactatttctcaagaaacaaatacgaggctgaggaaaagagaagagaagtgaaaactcacctggcggaccacagctgaagtaacttctgagaaactaaggtcgggatatggcatgtcacagcagtatatctcccatagacagatgccaaaactgtaaacatcacacttccggttatagggattgccattgagaacctgtaaccaccagttttggttatttgttttatagagaataggactctcgtagctgaaacattcggatgactagtatagcattgttctttttaatagcaagtgacagagctttcaagcaaagtaaatgaactattgtttagaaggatataactaatttttaggaggcgtcatccacttcttcatgtatgggatttaagctggtttagtatgttggggaaaaaatgtagacaaactaaacagcacatcaagctaaattatctaattagtaagtaaatggacgaaaaaatacctcaggagccatgtaaccaagtgtcccagtctccccagtcatgtcattaggatttgaagcctcaactcgagcaaccccaaaatctgcaatctttactgtacgcgatttgtccagaagcatgttctctgtctttacatctctgtgaacaatcttctgcgaatgaaggtaactcaaactgcaaaacaaagttcatgatcgtctaagtattaagcttgacaagatcacaacccacaaatatttaagtgccaaaacagaatgctagagtgtaggggagatagaaacaagagacgagcaatataccctctagcaagatccaaagccagctggacaacgaccttaaaagctagttttcttcgtctgttctttatgaggtaagatttcagagcacctcctggaagatattccacaacaacacaacaaacactgttgggcatgcccatgaacccattttcagtctgtattcgtagatcagacgaacccattgttgcccctataaactggaaaatgatagtgcagaatattatcaatctactcagaggagatagtaacagaaaaccatctctaaatgtgtctagttgttcatgcaaaattattctcttgattaaacaccactcatttcaacaataataatgaatctgcatcaggagtctaagctccacatcatatcaagaaagaggccacgaaaaatagctctgagaattctcatgacctgattactttaaattactaaaattcaaataagctatgctttagtgagtgttcaatgtacaatgtagtactatcatatgaaagaaacttatcagtttatgtatacattcatgataaatgctactgcgctagccatttagaaagaagtcagaaacatacaacattgcttttactgtgattttgaaacagaagagccttgtacaagttaaaactacaacctattgagcatcacatagaaatgcttttctgacataataaggttaattcaattcagtttctgcttgcatgaggctgtataaaaacataacactaagttcccagttcaacattcgatcacaattcacaaatgttatgaagtcccaaaagaaattgaaaaaacaacataaatatcaaacttcacaccttagtaacattaggatgatcaagtttatgccatacagcaacttcttgtgtaaaagctgctcttaatgaagaaatctcagcttctgtcctgtggccctcttcaccccagtcaagcattttaactgaggttacaaatgaaaagaagaagaataaggaaaaaaaaaatactgagtaactcgtaacaaaagataaatatttatcaaattctaaatcgataagaagagaaaataagataatgtataaaatggccaaaaggccagacttagttggattgagatggaaatgataacgatgatgaaacgacatttaaaaatagaaacttttgctatcatgacatatatttatttaaatatacaattacatttaagccaacagatgagatcacatgaaagttcattaaaaaaaaaaacagtatcttcaatgtatgatgccgaacagcaaactcatccgaaatccgtgtaagagtcacggatcccataagactacaaattacattagtcaaacacccaaaaacctccaaaagaaaaatattaagttaaatacaaatcttgaattttgtaacaataatttaataaatataaaagtcttttcctgatcagagtaataattagatttaagggtactatttgtgacatcatatatacaagacaagaggagagccaatatcaatagaggatgaagaatactaattaatggtccacctaatctaatattggactacttgcaaggcagcatcaaaatcaatctcaattgcatacatcaactacatttataatatgaacccaagttgccaacaactagtctttttaataatctctcacataaactaaaattaaatgaacccaaaagaaaatattgaacaataagcataaaacatatagtaaaattgaatgaacatcaaaattatgatatgggcaattgggcatttggataataatatagaaatttttactttggactgaattttaattttaaagaattacgggaacaaaccagcaacatctagaccgtcgtagaaaccacgatgaaccgtgccaaaagtgccacgtgcaatgacggacttgatgaggagcttggaaggatcaatctcccactcttgtctctgcttgaagggactaaagacagattttccggcgccggcactggcggaagaaatggaggtagccgtggatgatgcggtggttgcggttgcggtggcggtggcggtggcggtagttggtagattgatttcttcatccttggtcttattcttgtccatagtccaaaccttgttgagatgcctctcgagctgttcatctaagctcttgagatcaatctgatctgctctcacaaacccatcattgccttccttcatctttgctctttctctctaaatcttctggatttgagacctttttctctctagaaactgagaataacaactcggaagaagatttccgtggtgggttttccttctctatccgtgtaaatcactctgagagtcagaatttcattgattgattgcaaagctttgttttttggctctaccaatttggctatggcttcttcactccaactctccaatcatccatgtgggcacatggaactgcctgcgcacaacgtgtacttctgacccactttggtctcctcctctccttagtccttccctcccttcctcacttcctatttatttactttttttttattatttaagaaaaaaaaaatattatattatatttgtattttgtatatgttgtatatcatagttatttatatttttgtgtggtgtatgtgcataactttaacttatcattgaccttcaaccaaatataatatatcattgaattcaaaaaaataaaaaataattaaggaagaaaaattcaccaatcatatatttatataccacaaaattcacataattcaactttttaattagccaatttttcgaccacatttgatattattaattgccgttgactccttgacgagtatttccatttctatcaaatgcacatttataccttatttttccaacccatattttttttttggctgaattttccaacccattattggttttcttcattttctttttcaacttaattattataattaaaggtgtatggttgataatacatttgtttggagcttaaataccttattttaatgaaccatctaaattaaaagtttagacatcgtgcctccactataattgtccatttacaattataaattatttgatagaactcaacaaaagggtaaattattaaagtattttgaaagattggacttttgatttttaaacacgtaaaactcattgagaataaggtattactcgttcggaagaaaaaattgaaaaaaataataatttattgaaggagattcttaaatgtggcaaaataaagtataatgtgatgagataaaatgcaatagaaacaaagatacatagaacaaattatttactctcttaattattataaatataggtgtgttgtgtttgactacacagtattcattcttagacctgttaaaagttttcgtgtaaataccaaatcaacaggattataagtctatgataaataatataaagtacaaaatcataaattaaataatgttacaatactaaataaaatatacacataaaatagagaatagagataaagagaagaattacaactcaaagcaataagctacacacaatatacaatatataaatagcatatatataagagatgtaagagcaattttagcaccacatacaccacaagtgtattacacttacacctttatccaaaagcttattttcccctaccacaagcacttagggaaaaggaaagaatgaaaatagctttctgaatttatcaagcttatagtttctaacaaggtgctctctttgatagaaactcacaaaaaatgtattttcacaagtgaaccaaaaacctctatttatagtgttttaagatcacatattttgaaattcaaataacctacacccaagggctattaccatttcttaatggggtgtaaatgagattaaaggcccgtttggcacagcttttgaaaaagcttaaagctgttttttaaaaaaactgtgataaaaatatgtttggaaacaactctaagagagtttaggtcccatcccaattactggttaccaatttttttcagcttttgcaaacaactctccaagccattacaaaccattcccactttattttatatcacttatacactttataaatga

SEQ ID NO: 15116 - DNA, 8247 bp, Cannabis sativa
gtaaaaaccattacgctacactcaaaaaaaaaaaaaaaaaccctttctttctttcctacctaactcccgaataagctcttctcttttgccctaacccccgaagcccccctaacccacaccaaacgccttcggccaccatgcacacacgcctccggccagaccctatgcagcaagacaacacacaccaaccacccacgaacacatcagcaagagcaacaaggtttttcttttttcttgtttcattttctccttcaactctctttctctctaattctttcatcttctccttctctctctttcaatttaggtcatccttgcagttcgaccctacctgtggtccaacagtctcttcctataatggtttcaactggatctagaatggtgttttgagtttgagatttagatatgagttttttttttttatttattaatattgtttttagtttcacctgtctctacccgcccgaacacgcccacactcgcacctaagcccaaaaaacttggccacaaaacgagcaagtttgggatgatgtttagtaaaaacacccgaaaaaaacctaaactcggtgaaacctgtatgatgtgcagccctagttatatctataacattcaagaaaatcacatgactctacagctaacattaagtcttaaacagtaatcagaaacaccatacttaaggttttatgtttatacaacctaatttcatgaatagtaattgtcaattaactccacccaaaaagaagaaagaagtacacctagtttattgtatatgcatgtgtgcacgtgtaccataactgtcgcataactccactctgttaatatatctactatacaatctaccattatcactattttgtgatcagtgaaaaaaaaaaagtatttttctaccgttcaaaggttaaaaaaaagcaaaacattgatttgggataacctaagccaaatattgagctgtacgaattaaaaggtctgaacactgaactctgaagtctgaacccttgactaatccaagccacattttttatattcatttatctaaattatttctatttatttacttttttgttgatgaaaataacagtaattaaataataacaaagtacaaacagttaataggaacagaaaattatgtagaaacaaatatggttgaaaggtaaaatggtctataatttgtcttcttcattaagttccaaaaaaaatcttctgtttgatatttaaatttggcagcaagcacaactaagctaaaacaccttaatgatccttctgagtggtccaattcaatcaaagtgacatacttaaacttatataaatatatacgtatacatatatattctatatatttggctagaccaaattctaacaaaattacagctgtatatatataagattaagagaggggaaaacgagtgaaataagcttccaagaacagattttgacactgaaagtgaaataataattaatatacacgtggtactagtagtacaaagatatacttatttatatataaatatatttatatatatttttattattaacacctcaagggaaaaaaaaaactacttgaagtggtggagttatttagaagagagaagaagatacaaacataataaaaaggcatgaaaaaacgctctgtttcccatgatctaggtacatatccaagcccaggagctccacaataccgtggaaatacaggaaattgtcaaaagggttgggcctcagagagattacctccaatcggaggtggtttgcagattggttcatcgtcatcaactgctgctttaatgagtttcaacagtggaagaacacttccctctaaatgggaagatgcagagaggtggatttgtagccctgtttttggacaagggggggtgactagtagtagcagtagtcacaattgcttgaatcataatagtaataataataataacaattattattatcagaagaggccaaagtctaaaagtggcccaattgttcaccctgcaacttcatactactcaaaccattctccagctgcagtgttggaaggccgcggtggaggcagcttgaggagctttgcgactgcggccgcggcggcgggtagttcgcctttttctactggtgttttgggagcagaaagtgtgttcagtggtggtgttggtgtaggattaggacagggacagggacaggtctctagattggaaagtgttcccctttggccagaattaggagagaacagtactaataattctaattcaaacccatctccaaaggtacaatctttgtcttgtttttcatattggctcaaaagggtctcggcaaaatttgattttgatctgattttttttttccttttttgatagaaagatggggaggaagcgttggtttctagggacgtttcgaaacgagaaatggcgaaccaaatgagtcctcctcctcctcctaataaggagtgtggtcgttcatctatggaggttgggaggttgtcgcttagttcctctccaccagctctgctttctataatggagcaacaaagtgaggatcactctcactctcgttctcgttctcattctggtaaattggaagtcaaagatgttgaggttgacaaacgagccaccatgattcggtggtcaaagaaacgtggaataagaatcagtaagaaagacaagcttggtgttaataataatagtaataatgacctcactgaaaatgctttgccagtttcggcttcttcttttgatgtttcagagtctgccatggacaactcaaagtacattattcttctctcttttcaattcttcattttcatttatgtactttcacttttggaacatacaaaaagagttcatcataaatgtggtgtgtggggatatgcagatggcaaagagaggaagccaaaatcattgcgtgggagaatttacagaaggcaaaagcagaagctgaaattagaaaacttgaggtcgagcttaaaaatcatatttttattattttctactcaagtactcgtctatagccttatcacattcacttcattttcaggtgaaactagaaaagaagaggtcagctacaatggataagatcatagacaagctgagaacagcacagtatagagcacaccaaatgagaaccaacttgtctgccgacgaaagccacagccgtagccatagccatgaggttctgaagactccacgcaagttcttctgcttacgaaaacagatgagggtgggatcactaggtcgcttctttagctgccgtgcttcctagctccacttttgtttttcccccttgaaggttgaagctgaattattgtttgattgaactagcttatttttattcttcttgttgaatgtgatttgatttgatgcaacaggtgaaatagaatagtgggtttgttaagagttagggagctcctcaaagttcaaatggttgtattgaaacaaaaataagccttttgttttgcaatttataaagaccacgacattgctttttatacattgcaaaagagctggtcggattgaatagacaacagttaaatacataagtaaacatctaaatgatgaatcatacaagcgattgatttgtaaagctttggaataaaaactaaatttctttcatgctaaaatatcttatccacgaccacaaatagagctttcaaagcacttttacacaagtcgatcaacattcaaccccaactaaaatctccatggaactaatagcagtataccgatttaggaaataaacaaattgactatgacattactttattatatagcctgaagaaaaatccccaacaatcctttagtatggcctgtacctccaatctgctctggacggtctcccgctccccattccgtaaccaccccactgcaaaacaacaacacaccgtttaataaataagatggactagtcatgtccttgaaaatcaatactagttcatttcaaaagtaacaaacagaacacaatgaaaactaattctcaagctcagccataatagtataacactcacgtcatcaaagtctagacttccatacatcctgccgtagccgccacgcattggaccgggatatcccccaaaggtttctgcactgttcatcatgtaatttccactagggccagcatcgtcaagaggtgtggccgtatctattgcaacctaaaatgtaaaagcaaaaataaaagtaacacaagttaggtcagcaacctacattttagttgcaactcacaggcattgcatagcaacttcagaggcgagaatttcaaagccaattagaagtagcacagacacagagtaaactaaaccctaaatataaaagaatcaacaaacttacaaacatcctaaactgacaaggaactttaacttgagagaataataattaaaaacaaaatgttacccaagtaacagatagaaatgattagtattcttgttttcgtagagcaacaacacaattcctaagcacagaacatagtttaacctgaaacttggaagagttcttgaggcttttgaaaatcatcaaggtcacacagatttcacacgtgtcctcttgaaaagattgtcccaattatcatataaatgataatgaattaattagtgatgagaatataaaattgctaggcatcacagaaatgatagaaatacaatgtaccaaaagcccgctcccaatgaaatggagtaaggagaggccaatgagctaaagccataaactaagtaaatcaaattggcactaggcgaccggaaagaatctggctaatccaaatagatactcagtatcccccggaccatattggggaaaattaagtctcaatatatctgtttggaatcgaaagcactgttgacgagacatatttagatgtcatggcatgacagtcaaaacgaaaaaaaaaattattaaatgatagtttagaaggatgtcatgaaaacctactacaaatgggttgggcctcaacagttagcaattaaacatcatttagacagatatagcacaaataaattcaagtcatacctgttgtccacatatctcatgagacctccgtgccacacgttctgcgacaccatcttcagcaaatgttacaaaaccaaaacctctgtggccacttcttttggggtcctaatattagacaatattttattagttacctaattaagagttttatttctacactaactgaagatacatgctatctcaccctgggaacatagacatccattatacggccaaatcttccaaagtattgccgaaggtcttcaatagatgcctctggaggtagcctaccaacaaagattttctttcccactcctcgagtagattcacctcctaatcaaacaggacaaagaaagaattgatttcatgaatcatttttaccagcataaattacagattcgctgcagcggcacttacttccatacataggtcccggatgatcatataaggtaggagcaccgagcgctgcatatctagttgctgcagaaatatatgcattatatgcgccatatccaccctgtggtactctgcttactggtggtggcctaaagtcatcttcctgataacatgacataatatttcttaaattaaatagtttttcatataagaattattcttgtttatatatataaaaagcaggagtgagaaaatgttctgaaaaattactttctatcaccagacctaccttaggagttgctcgatcaacaactacagttgaacctcccaactcatgagtgtcagccatcaaattatcaacagactctgcaataattaagatcaacatatacttccttaatattaataatcgaaattaaaaatgatcgtgcttctgtttctgaatgcaataactttaaataattgaaaaacaggataggcaataaaaataccacaaagttcatactatataattacagcaaaatgcaagatatttttttctatattgcagaagctgtaaattcaccataaacatgaaatgaatggccagacctgcattcgcaaaggtgataaacccaattccacgatgtgtagccgagccttgatcctgaacaacatttacaaaagttaaacacagcattacaagccttagaaagtttacaagcaaccaatgagcctatgtcagtaaggcaccgctacatgtaatattactgaaaagaatagtacaaacagaaaaaggtgtacaaagattgtacaaccagcctatgtcagttaggaatgtttttatcaagctgtatgtacacacataatcaacacatctactcaattacattttctaaagctaattctccaaatgtaattacatgagaggaaagaaagggcacctttggcatgtataagtcagttatctcaccatatttctcaaaatgactgcaaaaagaaaaaacaatatatcatgtacttccacatcctggttcatcaattgattagagaaaatataaacgcttacaaaaaatgaaacacaaattacctctgaaaagtagcttttgacactgattgtggaatccttgccacaaaaattctggtcactttttttgcaggtgctctcatttcttcctgaaaaaagaaaacacaacaatcctctttcatagacgctttaatactacatatgtccatacttagcattctaaacgaaaattaaagcattatgagttatataaaacctttggagttgcgactttaatctcaagcattctgctcccaaggaagtgctcccctgataaagcactctgaaagtagacccaagacacaaaatatcaactaatagagaaagtgttatgtaaaagtagactatataatattttcactagggaactaatgtttcttttttgctgaacattgggaactaatctttcaaaaccaaaataaagcgaaacgaccttcaggattgttcttccatccgaaatttgtgtaaattcgaagttgttatttcacatgttgttagtttggtaaatttctccaatagaatcaagaagtgactatagtgataaatacgaagacagaatattccaagcactattaaccgaaatccgcacatacaacaatttgaaatcaactatcaaaaattgtccaaatttaaaaatcacccaccttagcatcttcttctgacacaaatgtcacatacccaaatccacgagaacgaccagttgaacgctcctaggaacataaagaaaaaaaaaatcaaatatcacactgataaagccatttttttaatataaaataagggacatagctaaccttcatgacaatacaatcttccaattctccgaactttctcatatactctctcaatccatcggtttcaacgtcccacggaatacccagaacctaaaatccagttttaaatcaaacaacaataacgaaaaagaaacaattcgaaaattttcaaacttgaatatccaacaagagaaattacggaattatttacagaaaaacttaccacaagcttgcgctccatgagaagatggtcaaagaaaaaccagggagaaaccctaacactcaaaaacccagaaagctctcacagacagacagcgctcgcgctctaaccacaccctctctctctctcgctcgctcgctcgctaaatctcacacactcgctccctgcacataataagaacacctctttctcacacacaatcgtcaaataccaaatcaaactcaccattttttttcttttttctttttggatgcgaagaagctcaaacaaaaatccgattagaaacaaaaaacaataaaacaaaattgtggaatatactcgctgctcactgaccttgattttccttcctggaatcttatctcttcaaatcaaacccccataaatggctcgtctctctattttcctactcttcaattctagtaataacaattttccttcttccccaacttactccgctttctctgttgtttttttttttggtgggtctccgctttctctgcttggttcggcttcggccccttcggccgagtctctcgtgggcctcttccacaaacccaatgctcacttactcagcccaaactttcttggactttggcccatttttatatttttgaaggggaatttgaaaaaaaaaaacacatgaatttaaaaatatgaagaaaaaaaaaaaatagtttagggtcccttaggtaaccaatgactttttgaaggtaactaatttttttttttgaaggtaactaattactttatagtttatactgttttttttttcataaaataacattttttttaaaaaaaaaaagtcatatatttgcacacattaaataataacctgtgtaattttcacattttttaatggtattt

SEQ ID NO: 15117 - DNA, 3950 bp, Cannabis sativa
agtaattgttaatggatgctatggttaactactttgataaaatggcttgaaattattggtggcacaaagtgaaaattataagaaattggggagagcagattttttttttttatttcaagtaatacatcaatagctagctatagttatagatacaaaactacaaagaacttaccaaacacaatattgtaattacatagtacagtaccctgataaatatacccatatatgatagtttcctagaaattatttcctttgttgggattgttgtctaaattgacttttcattttagttgggggttgttaaattgaaagtttatcttatttacaagggcctattgtttggttgggaccatcgtaacattattaatcattatgcatgagggaccagtgggttggtgacaacaactgaaaatgcccttctttcctagtttccccactaaccaagtcaatgagaacaatacatgtacccttcttcttgctcttttcctatttttatattagagtaataaaacacatcatttgacttgaccaaactataacctttacgtacccatttctttaataatagaagattaattatcaattataatgataggataataagccggtgttaggtttagttgcatttcttttgactagctatttgcatttctatttcttttattcatttccaaatcccactaagaacatcaaaacaatctcaaccattgatttctaccaagttacatcatggcagagcctatataccaaccaaactctttcactgagtagtcatttatgcgtacgtaccacctagggtccacttggcacctaccaacctctttctctttatcttcagccatcgtctttgacaaggcccgctttctctctctcttcgcgcaaccccaccttcaaggcatctatatataagaccttcataccttctccatacaattcaaaccaaatcccatactttcaaaatccatttcttctttatctctcctaacactctctagcaatacacttcagtaatactatttgataaatatataaagattcttacttttctgtactacaaatggagagtttctgcaagactaagccaacacccatcgtctctaatgacccactcaactggggtgctgcagcagagtccatgactggcagtcacttggacgaagtcaagagaatggtggcggagtaccggaaaccaatcgtccgtcttggcggtgagactctcactattgcacaagtggctgccattgctgccggcggtgacatcgacggcgttaaggtagaactttctgagtcgtcgagggctggagttaaggctagtagtgattgggttatggagagtatgaacaaaggcacagacagctatggtgtaaccactggcttcggtgccacctcacacaggagaaccaaacaaggtggtgcccttcagaaggaactaatcaggtaattattaatataacactttattattatatatgtaatttgacagaacatggtatctataattaaaatttgattagaagaacaaattcaagattgcagtgactaatctatctctaaattttattgttttgcagattcttgaatgctggaatatttggaaatggaacagagtcatgccacactcttcctcgctcatctgcaagagcaggtttgcttgttaggattaacacgcttcttcaagggtactctggcattagatttgagatcttagaagccatggccaagcttctcaacaacaatgttacgccatgcttgccattgcgtggaacaatcacagcatctggtgaccttgtgcctctgtcgtacattgccggtttgctcactggcagacctaattccaaggcagtcggacccaacggtgagctccttaccgcaaaggaagctttcaaagtagctggaatcaattcggacttctttgagttacaaccaaaagaagggcttgctcttgttaacggtactgctgttggttcagctgtggcctctactgttctttttgagaccaacattcttgttgtattggccgaagtcttgtcggcaatatttgcagaagtaatgaatggtaagcctgagttcactgatcacttgactcacaagttgaagcaccacccaggtcaaattgaagctgcagccattatggaacatattttggatggcagctcttatattaaagatgctcagaaacttcacgagatggatcctcttcaaaagccaaaacaggatcgctatgcacttagaacttcaccccaatggcttggaccaatgatagaagtgattagattctcaaccaagtcaattgaaagagaaatcaactcagtgaacgacaaccctttgattgacgtttcgaggaacaaggctattcatggtggcaacttccaagggaccccaattggagtttccatggacaatacccgcttggctgttgctgcaattggtaagctcatgtttgcccaattttctgagcttgtgaatgacttttacaacaatggtctcccttcaaatctatctggtggccgcaatccaagtttggattatggttttaaaggagctgaaattgccatggcctcctattgttctgagctccaatatcttgctaatccagtgactaaccatgttcagagtgcagaacaacataatcaagatgtgaactctctaggattgatatcttcaagaaaaactgcagaggctattgatattctcaagctcatgtctacaacatttttggtagctctttgccaggccatcgacttgagacatttagaagaaaatttaaggcacacagttaagaaaactgtgagtcaagttgctaaaagagtgttgacaactagcgcaagtggcgagctccacccatcaagattttgcgagaaggagctgctaaaagttgtagatagggaatatatcttcacatacattgatgatccttgcagtgctacttatccgttgatgcaaaaactaagacaagtactagtagaacaagctttgggtaatggtgaaattgagaaaaatccaaacacttcaatcttccaaaagattggagattttgaggatgaattaaaaatctttttgcctaaagagattgagagtgcgaggattgttatcgaaagtgggaatgcacatatatcaaacaagattaaagagtgcaggtcttatccgttgtacaagtttgtgagagatgatttggagactgggttgcttactggagagcatgttagatcacctggagaagagtttgacaaggtattcactgcaatgtgtcaaggaaaaatcatcgatccaatgcttgaatgtctcagtaactggaatggtgcccctcttccaatctgttagttgtcttaataattttttttctctttttgcattttagtgtcacttatcctttaagtctttgttgtaaaattattctttttaagatgtgatgtaactttgtattcttacttttatggtatttaaataaaacactatttttgaataccaattcttacagatttcatattttttttatttaactattctatagaattttttttacatctaattaaggaacaaaaattgataaattctaaaataaaatactggaatagttatatataaaggaaagaatgtccattcacgaggatataataccagtcaaaattttataaggtaaccttactcaatctctctaaaggacccaacataaatcataataatatagcatatgaaacaatatcctaaagccctgaatggcaaatattttttttcaataaaaactatggaatagaaaatcaagtgatattctcctttaaaaaaaaaacaaaaataaaatttgactgtaggagtgtgcagaaagtcatccgatccaattacaatcggccaatccaatagaattggatatccaatcataattggatcggattggacgtaaattttgaaaatttaatcggatcggatcggatcgattgttgtatgggacatct

SEQ ID NO: 15118 - DNA, 8452 bp, Cannabis sativa
tttttttttttttttttatgaagctcctcgaaaactactactgtacacttatatggttggttggtccacaacatatataagcactttttaacctattattatagtatgcatcttcgattcaatcttctgttttcggggttttgatctcatgattacttaaattaaggtaacatgggatcacctgttgatgcaagcatttgtatttcgatttcctcctgtgcctgttttgttacatgctctctgcgtgcctcgcctgcagattttgaaatgaaacagaataaagaatgagtttatgttttgattcattgaattattaaataaaatgaaaaagcatagaagttggaaatgcataccgagagattggcgaagcccttttacagcatcgaaattcttgtatgtatagccaacaaagcttaaatctttaggagttaagagcaactgccatgaaattataagatgtatgtagtaaaaggtcataatgtgttatagaaagaacaagaggcaaaaagaaattaataaagagagtagaaatctatggcattaattaactgtcttaacagcagaaaaatcgactccataagagcataaagaattcttagaaaacgatgtgcataattctattcaatttatatcattagaaagcaatttaaagagacatttccaaggaaaattatagaatctaaaaataaataactgaaataatgttgcgaacctttcgggagggtccagagccacttcttgagggagttggagcatccaactgattataaaagcaaaacaataatgttattattagtaagcacaataaagaaacaagcaacaataatgaggaaaataaagaaatacaatagcatagagactgcataaatacttcatcaaacttcatgaagttctgggtatcaagctctccattgacttctggtttaaaagctgcttccatttcatagagtttatcccacatgacgccattgaaccaagggtgagactggtacaatagagtaatgtgttattactttaataacgaaatgaagaaggaatctttagaaaccttttcaaattatgaagagaaaaaaaaaacaccataccttaatttggtgtgcccctccagtacctagcctatgatcgacatcacagagcaacctacaaatcagatccttagcctcaggtgtcaactttgcatcttctgggaattgcaggtgggttctccaatgaacaatctgacagaaataggagaaaaaaataaagatacaaagcattcatgcatatctatcaagttaaatagacatgataaccaggaggtgaagaaatgccaaaagatgtggagctaaattgactgaaagcccaaccccgggttgcctaagaggctttcaatatttattaattttaagtgaaaatgagatattaatgttaatattactataattatgattccgttttggaaaccatttccattttcagttgatttctacatagtttacatgaaagaaaaggtaaggtgattatggaaaggtgaattttctataaagtatagctggttctctctaagcgagttaggcatgttacctttctgcacgtagctattggttcatctgaataaaatggaggataaccaacaagcatttcgtacataattgctcccagtgaccacctacattgagtcccaaaagcataaatacattgaaaagataagcaaaacaaagtccattataacaaatcaggaacagactagttagcggatgaagagagcaggtaacatcaaacttgaataaagaaaaaacccaatactaactactctctaaaatgattaataaaactagaaactaagagcaacacggttatagcactgtaagaaatgtgtccaaaattaacgatgttatccaaaaaaagatattctaaatgagtgtagagattgaaagaactcagagaatatacaaaatgaaaaagaaactaaccagtcacactccattccgtatcctttcttcaatagtacttcaggagcaatgtagtctggagttcccacagttgaaaatgccttcataataattattaaaaagagaaaaagtgaaaaggtgtcaaaggtacaaataattacggtaatgcgtgaatcaggtacaccacaagacattgtgatatcatatggcataatgaacaagtttaaggtgcacatagacaaatccttcatactttatgggttaataaatgtccaatcaaacatgagctattctatacatgctatttattctctattaagtctatcggaaaaaatgccatatttgtttaagcgagttagcctttaaaaaaatacatagactataaagttaatgtaaattttaatatttatccagctgaacaaaactctttacacaattgttttagaaatgcaaaacaaatagtcaattcaaccaaaacagttgatatgggaactccacacattacacttggctgaggaaaacaaaagtaaaaagatgtgtgacaccaaagatattatggctcaggactatttcaaatacaaaaataatgagagttctatatcctaaccgttgaaaacatttagctaacttatataaaggtaactttttcattaaaaataaaaactagaagaaggtataataaataataataaaaaaggtggaatttttgaagccattagaaagtgcgcttaaagataatgtagagaactacttccaaatcaagttgaatgtactaaattgacgagtcagtgaagataccataccaatttcctcctgttcatctgccaatgctgaagttgttcacgagggctcctccagcttttcctattatccgcctcagttccatcgatatccattgcttctgtcatattttcatcacccatagttctattttcatgcagtgcaggcaaagttgtacaatcaagaggtttacacaggccaaaatctgagagtttcatgtgaccatatttatccagaagaaggttgtcgggtttgatgtctctggaaaggcagcaaactttgaactagtgagacagattaaatacctggtatgtaacaaatatcaaccaaaataaccacaaaatcttctatctaaagctatgttttgagacaaaatggaataatttggacctatgaatatagttgtgcttgtgaatagattctatggcaagcacactctgcgcaatgtaaaatctagccacgtcttcgggtaaggtatcttccctcatcagcaaagtcatcatgtccccaccaggcagatattccataatcaaatacaggtattcagcatcctggaacgaatagtaaagcttcactatgcaatggctaccaacttcagccagcaaatttctctcagctttaacatgttcaacctacagaagaacaaaaggtatcatcagaacaaagtaaatgctattttgaataacgtaaaacaataaatacatattatatattagattaaaaagagaaaaacaagacagcatatttacatggatgaaccaataatatattaaaaaaaatcaacttttcatagcagtaccatgttatatagaaagatcaacataaaatttatggtctttaacaagtgaaattgtaattaaaaaattagttactttctaagttcttaatttttttttaattatacacttgattaaagcttatacagataagcaacacaataaatactatacagataagcaacacaataaatacatgttctaagagtggctggacaaggattctcaaataactaacactctaacagagccaaacactatatgtgattagtaattcttatgaatgaagtgatagttacacaacaagcatgctcacaataatttaataaggaaaatatcatagccaactgcagagacaggtttaagcattggtcatcacctgtccacgcataagcatttcagacttcttcaactttttcatcgcgtaaatgttgccagattttttctccctacataatcgaacctgtaattcaaaattttacatgatgaatacataaaataaaacaattgaataaaagagcctgtgtatttaaagatgaaaaaagtctggcacgtcttccgtagcaaaatttattgatatgaaaaaagaaagccataagaatctgagagtcaaactcaaatgacacgtttcaagaacttcaacctcgccaaaggccccccttccaatgatggttaaaagctcaaaatcatccacgcatatcttgtgccttttaagccgcataaattctgtctccttccgttctaaatctctaatcaagttcatttgtacgtcctcaggcacatctgacgaagccaatttcctttctaacatccatcgtctgcaatacaaaatttatcacagagaatgaaaatcaacattgattgtagtactttaagtataaataaacacaaatttcataagtaccaaagtcaggtttctttattcatacacttcatggataaaacattgagtactgaaaaatgcacataaatcattacaaaaatttatccaaaatcactggatcagaaattttataactgacattctaagaactagtaatgaaataaatcattacatttcaccaatcaaatggattttcagcagcattaaatctgaaacaatacctaaattaaaacaccacaaatgagttcattactgaaaccatcaacaactcttaactctcaatgtctgcacttgtgatttcaatgtaccaataatctcagtaaacaaaacctcgccaaattcagttgaaataattacaatacaataaaagtcctgttctcgcacattctgttttctcaccttttttctaagtcaccaaacacattactaactaaaaaaacaaacaaaaacaaagatctaacaacaagaatatcagatagcatgccctaagctaacaacaaaaatgaaatacagtacatccaaaattcatagctcaaacaaaacatttctccagctaattagctcttaacagccaaacaataacagagaaagaaaaaaaaacatataattcaacaactgtgcaagtaatgagattaatcataatatctcaccaatcatgtggatttttagcagcattaaatctgaaacaatacctaaattattataacacctaaacttcaatctcattgtcagagaaagttcttgtgatttcaatgtaccaataatttcagtaaaccaaacaacacaagttcaattaaaatcattacaacacaaaaaaagtcctgttctcgcacattctcttttctcacttattttctcggtcaccaaacacataactaactaaaaaaacaaacaaaaacaaagatctaacaacaagattatcacatattacgccctaagctcacaaaaaaaaaaaaaaaatacagtacatcaaaaattcatagctcaaacaaaacatttctccagctaattagttctcaacaacaaaacaagaacagaataaaaaaaattacatataattcaaacaaactccaaagcgctacctctcttttcgctctttaatgttcttcatctgagctctgtaatgattctctatgaactgtttagctgcagcaaccttctccatagtcaagctcgagccctgtacctcttctccgttctctgattcctcaggtagatcctccattttttgcttttctcactactctctctctctctctctctctctctcacactttctctctctaaacagtactaagcagcagtaacagctttctctctctagaatttgtgaaaactgtgtgtgaagagctcttatttattgctcccgaaaaaaaaaaaaaaaaaaaactcaaaacccatttctgcttatgcttttcgctggcctacccctattctttagggactgaaaataattctctgctctacggtccagaagaagttgtgtagtctaaacgagtagggaaacgacacgtgtacaaacatgtagtcgtggctgacgtggaacctttgcattgggaagagcttttaagggatcgttatttgattgggtaggtgataagtggtgcttcgttgttttattttatcaatttggtttcacgattgctgtcatgacttcacgcatgttgattagcgcgtgtggtggaatgagtgtcgttatcggagcttttggtagtgaaagcaacggtgttgtgagatgtaattggtgcgtggtgttcagtcgctgtgagtgagtgtggtggtggtgaattctttggtcagtgattggctgtctttgctttcataccctcgtgtcatgcttcgttaatatcttaaaaaaaaaagagtaaaaaataatatagtgtaaagttggaataatcctctgtgatgaggtgcactgtaatcattgttgataaaagtgtgtgtttttttaattttttaatttcggttgggtttatgtcttttactataaaacaaaatcttgtctactcattttgttttatttttaaagtgggtttaattttattttaattttttgattatgcaatttttaatttaaaaaaataatactaatgagagctttcgtattgaagaaaacaataggaccaaaggacaaaaaatgtggtttttaatagtgttaagttttcattagtgaagcaaaagaaattacttagcaaaatagaataagatattcatgtttttaatcaatagactgcattttttacggctcttttataagttttaggggttttatttttagttattttttattatgaaaaaaaataaataactattattgaaacgaatgctccctctagattcgcatttcacttttataaaacgaaaaaattgaagtgtttttttattgtgaaaaagcagataatttttgttgaaataaatattttctatgaattctcattttacctttataaaacataaaattttaagtgttttcttattgtggagaagctgtttttttgttgaaacgaatattctttataaattcgcatttcactcttatgaaatagaaatttttaagtaatttcttattgtgaaaaagcatatatttttttgttgaaatgaatattctctatgaattcacattttacttttataaaaaaaaaaattaagtgtttttatagtgaaaaaatatatattttttgttaaaacgaatattctctatagattcgcattttacctttataaaaataaaagttttaagttttttcttattgtcaaaaaaagcatgtaatttttgttaaaacgaatattctatgtagattcgcatttcacttttatgaaacaggaaaatttaagtgttttcttattgtgaaaaagggaataatttttgttgaaacgaatattctctataggttcacattttacctcatagaatggaaaaatttaagtgttttcttattgtgaaaaataggagtgcatatcgggtgagttttaccgagtttcagatttttcgggttcatgtgtatataattagtaattcaaacccacatgtttgtgtgactgggttttcgagggcgggtgggtcgggttcgaattgaaccgggtctgtgcgggttttgatcgggttcgggttggattggcatttttttctttttttcttttttttttttgaaaaatatcatttttatacattttttattaaaaaacacaaaataatgaaaataaaaaaaaaataaaagaagaagaagaaaataaaaatgatacatcattgtttagaattggattttttttttttgttttaatttaatgtttaaaaaattataaaaaaaattacaaaaatatatatatatttaggtttcgggtgggtttaggtgtaactcgatttttcgtgtattgggttaatgaagctcgaatccaagtggtgatgaatcgggtataacccgaacctaatttactaaaattgtaatcccattttttcagatttttttgggttgggtgggttttcgggtgtaaatgtgcacccctagtgaaaaaagcagataatttttgttgaaatgaatattgtttataaattcacatttcacttacatcaaatgaaaattttaaaatgttttcttaaaagtagataatttttgttgaaacaaatattctctataaattcgtagtttacctgcataaaatataaaattttaagtattttcttattgtgacaaaatggataatttttgttgaagcgtatattctatataaattcatatttcacttccattaaataaatttttttaaatgcctttctaaattgtataatttagtattaaaataaatattctttatagattcgtatttaactttcatgaaatcaaaattatgaagtgtctgcctaaattgtataatttagtatttttaagtaaattatatagccattcaaaaaaaaaaaaagtaaattatatagtatgttggaaatttttgtagcacatctcctaaaaggaatatttttgtagattttttatttgttttaaattttcaaaaagttttaaatagtttaatgtgttgaaaataatgtttatatagttacttacaatgtataaaagaaaaaataatca

SEQ ID NO: 15119 - DNA, 7428 bp, Cannabis sativa
aaaaaaaaacattattttctcattgtaaaatttgtatttttattttccgggaaaatgaaatgaaattagatcggggccgatccaccaatgaaaaagctcctcaagaactcgtaaagaaaaacttaacacacaaaacacaatatcaaataccaaattttctctctctatattttcttttctttctctctaaacattcccatttggtctgagattatttcctttttttttttccttaatccaacgggagagaaagtgtttggtgacgcagaaattcaaattaaaagatatagtttttgtggaatcataaggaggagaagggagaaatatacgaaacccagttgttgaatctggccaatgcggtctttgagaaggccgcaacgagaaaaacagcaggagaagtatagatctgaattgggttttgaatcgggaaggcattgtcggtggtcggtggatgatttggggaagtgggttcggatctgatggtggtgagtttgaggctatgggcgttgttgttgctgttgttattggtagatgtttctatagtttcgagttggggcgttggttcaatttgtgctagcgtgaagaaggggctgcataaacgacgatgcagcttcgcttctcgcctagcatgagaagcatcacgatctcaagcaccaatggctttattgacttgatgaagatcaaggtcgcagctcgccatatctcttacagaaccctttttcacaccattcttattcttgctttcttgctgccatttgtcttcattcttactgcagttgttacccttgaaggtgtcaacaagtgctcctcatttggtacttttctcaatcaactttgttttgatcactcttgtatttgatagatcttgattgttgttccacatattggtttctttctctgaatttaattgttttatcatatgggtttgttggttcgtttgcctgaattttgattgctttgtcatttgggatcagttcccacatttgttttttgctctgagctttgattactttgttattaggttcacttcgatttgaatcaagttctacgtattagtttatgtggcatttctagcaatttcattcgtgtgttcatgttgtggtgttctatggtattggcattttgtatcactagattggattaatctgttcatgcaacttctttagtgatagcttaaagcttcatctcatttggctcgagtagtcagttcaaattaggataaactttaggactttcaaccttaaattctgcagagcaacaacaatttacttttgactcaagttgtcatagaagatcaagcagcatttcatcgattattcttctgcatggttttttttttaattcaatttttaattgtgatatgcataatgaaatgtggtgattttgattgctgtacttcaggtcttctaagatctgtagtggagaatggtatatgtaatgtggtttgtgttgatttgaatttgaatctttgtatatcttctcctttgagaacaataatacgcatttgctagtttattcaaagctatatgatctttctataatcatgctgctttctatgtccctttctctttattactttgtttctttgatgacggtcatcgacttttatcctttaatgctgttatgatgagttaatgattttgtgctccttttatttcatgctcagattgtttaggcagacggttgggaccaaggcttcttggtagagttgatgattccggggtaaaacactttctctatgagccagtttttttttttttctaatttccttttaagctgaattctttattttgttttgactaacaaattgtatttatacgtttttctttctctttttgtctagatctttggttaactattctctttggtgatattttaagctgaattctttattttgttttgatggtgcagcagaaacttgtcagagacttctacaaggttcttaaccaagtaaacgctgaagatataccaactgatttgaaattgccagattcatttagtaatcttgtttccgaaatgaaggacaaccaatatgatgcaaagacctttgcttttatgttaagggcaatggtatgttacatgtgccagattcattttgtcacttattttttatttttttcaaagcaaatatagtttttcattttccctttgttttattggataatatatgtaatctgcaaggattccttgctgtcgtaaatctagggataaattgtttcttacaagtgcttgcttattattgcacagatggagaaacttgaaaaggagatgagagagtccaagtttgctgagctgatgaacaaacattttgctgcaagttccatacctaaaggaatccattgtctttctcttcgtttgactgatgaatattcatccaatgctcacgcgcgcaaacagttgcctcctcctgagttactacctttgctctctgacaattcttaccaccattttatactggcaaccgataacattttggctgcttcagttgttgttacttctgctgtccagtcatctaaagtccccgagaagatagtttttcatgtcattactgacaagaaaacatatgcgggtatgcactcatggtttgctctaaaccctgtatcccctgccattgttgaggtcaaaggtgtccaccagtttgactggttaaccagagaaaatgttcctgtgctcgaagctgtagagaaccaaaatgggataagagattattatcatgggaatcatgtagcaggagccaatctcagtgatacatctcctcgaacttttgcttctaaattgcaggctagaagtccaaagtatatatcattgctcaaccatctgcggatctatttacctgaggtatttatttttaatatattttttgttaaaaagaaaatctttgtgatcaaagtgctaattatgtccacgatacagttatttccaaacctcaacaaggttgtgtttttggatgacgatattgtgatccagcaagatttatcgccactttgggacattgacctccaaggaaaggttaatggagctgtagaaacttgtagaggagaagatgagtgggtaatgtctaagcatttcaggaattactttaatttttcccatccccttgtggcaaagaatatagatcctgaagaatgtgcatgggcttatggaatgaatatctttgatcttaagacttggaggaagacaaagattagagagacataccattactgggtcagagaggtaaattcaatcagccattttcatgattttagtatattgtgactgctccttttttatttttttcactatatgattagttttagtatttggaagactgttcctctttgctccatttttatggatttaagtaaattgagagtctagaaatgacactttacttttagtttttaatgcaaaacataaacttttaattgtgtaatgctttttttttttgtgtgtgtgtgcctctgtccaagtcagcttcatgctctattccgcgtagtagggctaaacatattttttgtgtggacattataaaattttgaaggcagcagtttcactttcagacaatgaaagtttgttttatactttgtttctttaagatggaagttttgtacacttttagttgacaatgaataaggttgtctggactagcactaagaaaatatataataagatttgctgagcaaaagtaaactttgttaggcttactccatgtttctgtaagctggcagttttgttcacttttagttgacaatgaataaggtcttcatctagaatagcactaagaaaaactataagaagatttgctgagcaaagtaaatttgattagggctgtattcggttttgttttattatgttgcgtgattatttatatagcgaaatattgagattgctgtttttttaaccctcttctaattttgtgggtttttcaaagcagaatctgaagtcaaacctgacattgtggaagcttggaacgctaccaccagctttaatagcatttagaggtcatgttcacccaatagacccatcttggcacatgctcggattggggtatcaaaataaaaccagcattgagaaagtaaaaaaggctgcagttatccattacaatggccagtcaaaaccatggttgcaaattggttttgagcaccttcggccgttttggacaaagtatgtcaactactccaatgattttatcaggaactgccacatcttggattcatagtcatcaagctggaagaagagctaaagcgaaataccggaaaatggaagaagatcacagttgatacaggtttcatgttagttttttgcagcaagacagacaatccaagcaagaattgtcaaaaagggcataagttcccctgttcaatatgtactgtcatcccttccacatctgcagacaatgaccagcatcctctgtcacaggcatatgagactcattctttcaatctgtatcatagaaatccgtctatttttttggttggagaaggatatagtattattggtcttcccattgggggggttttgcttgatattttttagcgcatatttccgaataaaagtgagatactgaagattaaaagactgcctgcctgtgtcaactccattatgctgattgattgggtgcaaggaagaggaaggttaagttcttttgacaggctcctccatttgctcaactcaaatatattatgttttttgccccacaaattttttcccaccactttaattttttttttccttctttgtttcatttttgttagtgccccatatctttccccccttttatttgatatcttagcatcttttgcaaatttaggagtagttccctgagttttgctttgttaaagatcccattgaaatggggagagctctacttagaacatatattgttatttgttatgtacgattcaccatagacatttgaaatgtgcagaaattctttacctccttcctttcctactctcttttatctttctttcttagtcactgaaatgtgaccatattgttttgtttatttctttgatgttactttagatcaaatttggcaacccagtcaaataatttataagttgacttgtcattttccttttacctagttgatgtttctccaattttctaactctttcttaaaacataggaatcgttcacgtgaaatgtcgtttttgttggattttttaaagagggttacagaggatgataatattttctagaggcattagttataagattcttgatcatagaattttccaagttgatgatgacaaagaacccattttgggatatatttttctatgtaacacttgacatagacgaccaaatctttgcatttctgatcatttcaatgtgcatgagtggaggaatagataattatagggattagagagggagcgggttcttgttttgattcttaaacaccaaaattcctaactcttttgtcattttgctcatctttttttaaattaatgattttataatcattgattagatgtttacaaaatgttataagcacaatttgggtttgattcttccaaaaattatataatagaagaatctgaaaggtgcttagacatttcatccacctcttctcatctaacatattaatatttatataataatataaatgaatatatatagagagagaaagtggaacaagtacatacttcatattagccactacttggcatttggtaaagagttaaatataaatataaacgatgaaccatgtcttttcactgtgttgactttgccatatatttaagattagacattgtaaaaagtaaaaacaagaaaagaaggcatatattgtatgtagtgtgatcaattcatttatgatcctattctctgaatatgttatcacaatttatttcatattgattatgtttttgaatgttgtgcaagcataggtataagtacattagaaaaaggtcaactttctaatttatttttttcttggcaactacgtcgaataccaattggcaaattttactttgaagtaatgagatttaattgtataggatacgaaatgagttgattggtgggtagtgagggatgatgatgaggaggaatataatgcttttgtttatagtatactattattattatttatgatgaaataatgaatgaagaatgaatgaatgggttggtaaggtaaaaacattgggaagaaggcaaaaaagggttaaacactctttaaaaagagggaaaatatgtccatttccatagcattaggagatttgagggagaaggcaagaatggagtcattgaccacagatttagaagactttgaaaactccgaaacagcctcttcctctcacttatttattaatattatttaaaatctaattgcatccactattcttcttccctttggaattttgaaccggctccctctttcgctggttggtggtgccaaaccagaacacacaacacatacatacatacatacatacacatatatacatacatacccagatcagtttttgagtcaagtaagccaaaacccaacaaaagtttttatctttttctttcttctgtgctttatggttcttttggagttgacccagttcaggatttggcttgatttaaggtttctatacacacccatatcaaaattttgtgtgattattttgtttagttaattaagagttgtcactgtgtacatctttgtttcgtttgttatcaatccaatttgatagtcggtgctgctgatgtaattttcacacaacactcaatgttttggttctttaggattaaaattcattacaataatatgtgtagatatacatgacttttatcactttatttttattattatttcatttgcaactttacaagttcaatttttatgtaaaccccacttcaaagaactcaatttttttacctttttgtttttcaacagagttttgaagagtacaactgaagatttaatgaaaacttttctgtttgagatctgattgaagtattggcaaaatccaatagagttagccaagtggtgccagatttttggttcttggattcaaaggattatatattaaatctactgagtttgttgaattgttgaagatggctgtgattcaagatcagttggagatcaagtttcggttaactgatggatcagatattggtcccaaaacttttcctacagctacaagtgttgcaaccttgaaagaaagtatactttctcaatggcctaaaggttagagatgtaccctgatacatactgtgtttcttcagaatttacttatctacatattgttatattttcagagttctaacagaaaattactattactctgatgattgtgtaacaacacaaggaagtcatatgacccatgtatggcttttctgtatctttattttcttggtttctttattttctgtttttcaatcctcactgctttcttgagtgtatttatcaaagagatcaatatgacatagaacgtttttggtagt

SEQ ID NO: 15120 - DNA, 7473 bp, Cannabis sativa
gagtgtcatcatcctgcagtgtagcaacactgaatttttttctcagtgcagctaatatagagccaacaatgacaccaactgggagtacttttctcaggtcactgctctcctgaacagcagaagatatagccgcaacaatgtgctctccgttaagtgtatcaacttcttccaaaatactatcaacactaaggtattcaacattggaaaccaaagcatgctccacatcatatcgaacagatagtgcgacagcatttgccacttgttccaaatcactagcaagattgggttcaaattcatccgtaccagctgcacctagcttgcgaccaacttcaaccttcaaggcatccaatattatcttctctacaaacagcgttaactccactaatatgttgtcatcaatttcaatattttcttctttgtaactagtttcaaactcttctactggttcttggtgtgtttccgaatctaatattacatacaatggttcgataactttgccatccccttctgtaggtgagctggtttgagcttctttttcaacaggagttccattatttcctggttgttccagtagtttccactgaccttcttctggaatatactcgagcaaaagagcagtagttgcatctgaatctagtgattctaaaggtatatctgaggcatgatatttatgcaaattctctttaaaggaagagctaccaaaggtatttggagtaatgtgcgatggaattttatctactttttttattttacctgaacttttaagaagaagattgctaccaactaattgatccttctgttgatttgcatccttacccaaacaactagctgtatctctgtctttcaaaacttttgtatcagtcccatttgatgatattgggtgttgattggattcctcggcattcctagggtgctttgaaacagaagaatcacttaatttatcaggctgtgcacttcggtcattaggagtggcatctgaattttgtggttccgtattgtggattggaatatcattttgctcttccatatcttgatgttcagaatcatgtattctatcagcttgtatactttggtcgacgggagtggcatctgacttttgtggcatattattctccattgggttatcgttttcttcttccttagctttatcttcatgttccggctctacatctagttgtgatatcacatcctctatcacaccaaaaatactgttaactgccacttgagtggaatcgtccatcccagtaaaggcatcgaaggcctgagaaacactaaaagttggagaagtagactctggggcaggcttagattgctctggagcaggcttgatgtccttcttctgattatcagtctcttccttttccattgattgagactcaggtgaagataccgaaggtgaaacgctttcacttaccactccagatgccgtcatcttattttgatcaggctctgatttctcttcagttttggcattattatcgtcttttttttctgccaaaactgttttcacattttggtccttctgatcttcaggattcgcttcttcagttttcttttcagcatggttattagcaattgaccctttttctgtttccttctcaacaatctcagaacttacaacaccttgtcctgtggaagaatcttcgccaatgttactttttccagaatcactagtttctttcttgagagaactgttagtattgtttccatcactacccactgaatgagattggtctgaaatgacagacttttgagagctatctgactgaggaagctctgcttccgttccacctgatggcatctgtgagcctggttgattgttagcagagctatctaacagtgtgtctgcctttttcatctgatctgacggatgatgatcctctgacaaaccttctacatttgatgttgatttttcatccattttcggcttcaatcctgatgacacgctgggtttccgagaaatattcaggagatcagttagtttttgttgtgtgccttgggcacgcaaaatcccagacacagcagttgtaagcttttcacgaacatcatcaggcacagcaccttgcaaagcagtcatcactgtctctcctcgaccaatggcagttatgacctgcacatatttgatagataaacacgagtgtttagactaaagcaaacactgcagttaataatggaagttatgagctgcacaaattgttcatttgaaattttaaaggttagctcatatagaatatatcaaatttgtgatacaaatgcttactaacactttcatgtagaaattaaggaataaaattctcggcaaataaaaaaaattaagaaataaaatcatttaatagtaacgtcaacacaatagaacattttttttgtttaaaaaaaacactagactctatagcattatgcgtgtataactttgtttcaataccaaaatctacaatatttaagaaccatgttacaaacttaggcttggaatttgagttgtcatggattttaccaaaccacaacatgtggttttagatgctgtaggttggacggttgtgtgagattgtggtttgcttgttcaccaatactaaataaactaataaatattactctaataataaaaacataaagagagtccatgtgtcaaaaaaaaaaaaaacagagacaagtaattgtagcattaggagcataaattgggaaatggtacttacctttttcttcttttcttctgttaaagtaccaggcatggttacatcaagcatattcataatgacttgtgctgtttgtagcacttcaccattttcaacttctgaactgatttcctcatcttcaaccatatctgcatcgactgtgttagtctgctccaatgcaccattttccactttctgcaatcccttatcttcaactccctgtcttttctgcaattcctttttgggtcttacgatcatgctggcagcagtgtccccttcttcaactatttcatgaataggatctgtgttatatctatttaaagaatttgaaggactaagatccaaaatcttggtatctttcttagtatttttggttgcttttccttcctttaaggttaacccttttgacaggttaatggtaatgtccacatcttcaagtagaggatgacgacctttcagaagtccaagctccacagctgtgagccactgaatcaagacaaacatgcttatcagaatacatggttcaagttatcaaatttccaactcccctcacatcgcacccaacccacagcctcttccagaaatgaagatgaattaaaaatgaatttgacatgcaacttccacccaaaatacatgaagagaaccaaatatatatcagatatagacttgtaattgtaaatatgccccatatcgcatgaggtggcatctcttgtgttttccaacttaattgtttttaacgtttttttattataatgaggcccgatttcaataacaagcaagtatattagcaacattttttttatccttttcccgttattggctctagcaactatgccaaaaactatcctaaaggtttcctcctcttacaagttctgtactttttttgaaaaacaaattttgtgaggtatgataattgacttcaaaaccaagagaaacggtgtagatgtggacaggatgcaattctctttccaacccatacagcatactccgaccaaagcattgttatgcaccacttagaaaggtttaaattctttcaattacactgtaaattcatcactgaatgtttgtaagttatttgtatcaatttgtttttaaaaaagagaatgttgtgtgtgtgtcaaaatatcaacatgctcaaatctacttttcataaagaaataccaagtcataggtacaatgatttcatatattaaatatttttatataaggtattgtatgatcctgaggtgaataaacaattaaatagtcaaatctcattacctcaatcgtaagttgctggcaccaagctatagcagacctaccaccatagatgccactagaaggcaaacacgagcacaagagcaagctggtgaatgggttttcagctatcgaactgcgtgggattgagaagagtggtgaagaaccattgtcattctgataatgaatatgttagtaagagccttttagttatgcataagaaccaagaaagtattgcgtttaactacatccagacaattcatgcccaaagaagaataccataggtgaatgtggaaggccatcaaagacataaaagtgtatgcatcaatgcatgtaacagggatttggaaatttaaactttcgcattctcggtacttgctacttggcacccacgtcaacactgtctttcaggtatttccatgtagaatggaaatgaagtaggggaaagtatttcttcatgtatatctttacagtctgctgaaatgcttaagtttctagttttaaaaattctcacattgtgagaatcatctagcccatggaacatttcttgctgaaatgcttaccactttagaagaaggggtggggatgcttggtcggtaatgttttttaacagcatataagcaaggacaactgtaattttataagaacttgagggggagacaacaataaaaattaacaaaatacctgtatgaaaagaacaggaatcttcacatctccaatcaaatttcttgtactagattccgaataaaaatcttcaatggcttcaaaaccataagaaaccatagaaatttccttttcaaaatcacgaacagattttgccgatagagccttttcaacattaaaccctttagctcttccttgaaatattgcctacataatcaagcaagcaatcaagtagataagttacaagcaccattagaaagacttctgtaaattggtcggcataaaaggaagacacgacattaggacttctgcttttgaactgtcaagattccgttgtccaccttattagatctcagaatatctatcagtccactagtgagattgttatcaatagccatgtgacgagaggatcttgtggcttcctctaaatcaaatggattatctatgcatgctgcagcagtgagcggtgtcccttctccaacttcagccaggtactttgtcaacatatttgcgccataaccacagccaacccccatcaatgtactccacggccttgctttattgatgtaatgtatagctgtggagatatcatcgctgtcagcagctgtaaataacctacataaaataaagtcgtttgagaagtcctactaacagatatatggttttccaaaaacaaaaagcccggaagaaatctactgcctacagaaaggtaggataaaactttttccagcatataaaaatgattaaaattcaagagtagaatgttatgtgtatcctcattgataatcttcgcgaatatataaaataggatcggaaaaaccacgtacgcggacaaaacatacaagcaagcgtactattctcacatgattcccaatctaatggtgtatgtacccaccgtatatgttcaacatactaagctcaccaaagtagttattcataacttatgaatcataagcactttcaacataaaccaatcaaaatgtaagaaataaactaataaaaaacctcagtaataagtaataacgaagcaaagctgttaccttgcagttgtgagaggtgaaccagcacaacccctgggattcatgactattggaaaacaaccactcttcaaagcgtcacaaacgaaagaccgtatattgatgtccatgctaccttgagtcgaacccggaaccagcaacagagtagtatccaatccatgctcctctctaagatccaaattcgcaggccaatccaacgaaatcactcccccatcatccgtactcaaacacactctctgatactccaatttctcctccaaaccacggtcaccgccatgcaccaaaacccgcccactatcgagcctcacatagtgcctatcttccttaacaagcttctcattcacatcctccaacaactcactccctacaaacgatatcgatggacaccgcagcaacacaaaccggttaaacggcgtcggactggtgaacataatccactccccaatatcagtaccttccggaaccctcccgtaaccaaaacgcgaagcataaagagcaaaaccagacgctaacccgatcaccggagcaaaaaactccaccgatttcgccgacggaagctgcgccgtcaacgtcagtaaaaaatcttcgacaggccccaattgacttcgcataggaaatttccggcatcgtttgagtctccggcgacggtatactcgaaattcacgaaattggagagggtttggggagaaaaaggagcgaaaacagtactgatcacgaggattgaaattgattaaggagccgagatttgatgttgaggctaagctcataatttaggttttggaaatcagaaagacgtgtggttctgttatcatacagttgagttgagttgcagaactaagaaatgaagtgagagaaaggaagaagaagaagaagggcgcgaaagctctggaaagaaaggagtgagtgggtgagaattgaatagtagaaaaaagcgagccacggtgggacccacccagtgccttcccgagtcggttgtggatgtggtgaacccttttccccgggatggttcgtgtgtgtggactctggatgttgcaccaacggtccttattaaccttttttttaaaaaaagaaaaaaaaaagaaatttcctttttaagcttttcttttgtatatttatttaaattgtcgtttttgacactctattacttaattctcaccgctcgttcgtataaaaaaatatatattttacatattgggatctatttcaaaattttggttttatttagtgagggtgagtccttatgacacgtgttggaaagttatatgagatcgtcgacatagaaaatataatgtcgacacggggaatatagtcatgttatggcgtagaaaaagttgaagctaaattgaagattaagtttagagaaaataatcctttcctatagaataatacatctgcccctatattagttaataataacgctattattttgatatgggattaaatcatagctcataattaaataagtgatgcaatattataataaaattatcttgagacttcttttattacaaataaaaaatatacatttataggacttttctaatgtgaagatttaaaaaaatactagggatttaaaaataaaatgattttcattgcattttgtaaatataaaagggggttcgtggccataaaatgtggtgtattgtatgagattggaattgctttttaacatgaatctcattcatttaatgttatgtttaattgatgtaaaaagacattcatttttctttttttttttctttttataaaaaattacacaataaattaaaaggatcattacataaaatactactttttgtaaaaaaaaaattacatttttacgtttaattttttttatatatataattttacggttttccatagaaaca

SEQ ID NO: 15121 - DNA, 2946 bp, Cannabis sativa
  modified_base (2684)..(2692): a, c, t, g, unknown or other
tcactatagtttataaggttatttacggcaaaattcctttatatatatattttatttttggaatagaaatccctttatattttaattttatacacttaatttttttatttttttttcttggtggcaaaactccttatgtttatttatttatttcttttacaaatttgatgtgtcagttaggtataatcattaaatattaactagattaatactgtattggttttgaggttttattgtcacatataaacaagtgtatatagtggttattcaattgatatttaactagtacctcaaatttgtaaagaaaaataaacttaagaaaattttatcacaaaaaataaataaaaaaattaaaatataaaagagttttgccgtcaatcactttagtttataaaagcaagcataattaaccttatctaatttacctaatcataggtaaatgtttgtatcccacattgaaaagttataggcagctccatgtggccacataggtaaatacccttatgttgtagatagtaaaaatcacttttttgcatatgctaatttatagttcattcctttagacataaaactccacgagaggcatctcagtaaaaattatttatatattgagatgcattttcattttatcctaattgtttaggaccgaattatgatctatgtattattgtgttggttgattttttttacttttaaaaatagtttttaaattattcacagtattttgttaagtttcgtaacatatagcaaacaaaatgataatataaatgtttccaataaaaaatatgtgttttaagaaaatatcaatattaaaaacttttaatatttaattctataaaaaattattatttttttttttcaaaattatacatacaacactaccgtgccaataaaataaattgtcacaataacattttagttagccacatatgacaaaatttaacaaaatgggcacaacaacccatgaattagtttggggatctttaacattttgaaaaaaatcaaagacacaataatatataaattatgcaaaaataacctttcatctttaccttaaaatatcaccctctttgtaaattttggttcattagtattcatacatgctcttctttcaattctttctaggctataaaattagaaagtaaaaccctcttcatattaggactgcacatcgggcagatattctgagttttgagtttattaagtttgttttttttttgtttttggattttgtgtgtggaaaaatatctacagaacctactcatttttagtgtcaggtttcaggtacaagctatcgagtttgatggatttcacccgatatacccaaaattttgaaaaatatatatttattttgtaaatgataattataaccctatcgaatctcctcattgtcctctaaccctcaatctcatcatcaatccaaaaagaaaatctaatctaagctatcctctcccccttatatttaaatatgtataaatatatacacaacatataaatcatatatatactataagaagaagaagcaaaagagaagaagttgcttgaggagagggggggagcggggaaggggatatggcgactggtgaggtgagtgttagatttaaggttggatttatttaacattatatatataacataacgtactgagttcggatttcacccaaaactcaatatttaaagaatgtcaatccgatactcgcctaaaatatcattcagttgcacttgaacgttattcttttaattgtttttcttaggtactactgagtccagatgggcaaagacaagtgcgtcaagtgagctgaattttcgggtctaaatattcagtcctacttcacataacctctaaatagataagttttgtgctagcccaaagcctactcctccaagcaccaccaacaaagtcagaagtcaaaaccttgttaaactctactgatgatgccgcttatgaacctcgatatacttttgaagtttgaaatgataatgatctttaggtcagctacaatgataaagctttcatgtactttaatacagcaagccagtatgcaaagtgtgataaaaaaaatatatgatttttgattttacaaatagaaatcaagatgtttgcaatatattattttttatgtggggaagtgatggattgcagacaaacctccacccatcctaacaaagcaatagaattatcgtgccatcatagatagtaagtagaaacaacaccatgataccaaccacagtggaaaacttcattgtcaaaacaaaaacaaacaaaataacacgaaaacaaatacaacaaaccaaaacaacacaagaagcaatcaatagcaaaactctgatatggtggacggcaccagtgcaacgcaaacaccttctccaaccaaatcacaccaaattgtttcttttattacatcgttaatatctatcctaaagatgggaagggattaaatgttaagacttttattcggactttgttgtattagatcatattgcaaaagttactaattaaattctattttgttaaataataaaatgaatcctgtattttttaaaattatacaaatagaaccttaatctaattttttactaaaattaaattaaataataatttaatctaaaaattgttataacaaaactaattgcattttttatatctgttcaaagttagaaattatcttaaagttagttatatnnnnnnnnnaaattattaaaaattgagctcaaatcttagtattttgttatttaacaaaacgtcgaattggtaacttttgcaaaacacaagatccaaaatagtatttaccctatgtatataaccataattttcaattaagaaattgaaattttatgaaaaaattgtttttaatgtttcatacaccaactagctgcgtgcttagctcaaacatcaaatttaacaaaaacaaatatattcagagtagcaacgaagcagcacaattt

SEQ ID NO: 15122 - DNA, 2780 bp, Cannabis sativa
aacgtgcctgtaaattggactgtaaattattccaaatgttttgtaaattagatgaagaaaaaacaattgctgcagtcaaataacacttgctttattagtaaactaataaaaacaatttcaaaacatgtttttgtttactattctaaataataaaaaaaaagactaattagtaatttttcccgttaaatttttttttttaattttagtaaaaaaattttaagatacatattaaaatttaagagacatgatttagtagatatcaaaagtctggaaagtatgttttagtacataaataatcactgaaagagtaaaattgaatgaaattagacaaaagtctttaaatttaacaatctgaatagttcggaagaatttttaacggccaaaaaattcagagacacaatttaatacatggaaaagttcaaagaaaaaaattactaattaacttaaaaaaatatatataaaattaattaaaaaaaatgttaggaaaacactaaataaaataaacaccacataagaggatctattgttaaaaaaaaaagtttctttagtaaattttttgctttcttttctgtagatcatttttacaaacacatggagagcattggcgttctgatgacatgcccgatgtctagttacctcgaaacacaactacaaaagcgctttaagctcttcaaactgtggtcctatccttcattggcggatttcctgaaagagaatgagaacttgaattcagtcaaagcagtagtcggagacaccaaaatcggcgccgatgcccaactcatcgattccttcccggggttggagattgtgtccacctacagcgtcggtttagataaaattgatttgagaaaatgccaacaaaaggggattagggttaccaacacccccgatgtgttgactgacgacgttgccgaccttgcaattgggttaatcttggctgttttaaggaggctttgtgtctgtgatggatttttgagaaatgggtcatggaagaaaggcgatttcccattgactacaaaggtaattactttatttttttatgcaaagtttggctttttcttgaatatttttactaatatatttgattaaacaatggcatgtttcctgtccttataaacagtgtttttctatgttacatttgttttagtagcttagactaatttacaaaactattatattggatgaagatgaggattatgttagaaattaagagctctttgttatgttgtgtattatattgaattgggttatatattatatttttttatataatattatgtcaataacacacaattttatttataaatattacataaaatacaattttcagtttagtggcaaagcagttggaattgttgggctgggaagaattggttcagcaattgctaaaagagcagaagcatttggctgcaaaatcagttacttgtctagaactgagaaaccatatccaaactacaaatactactccaacatacttgacttggcaaccaattgtgaagtccttgttgtggcgtgcgctttgacagaagaaacattccacattattaaccgtcaagttatcgatgcattgggtccgaagggcattctgatcaacattggacgaggctgccatatcgatgaaccagagcttgtttctgctttaatggaaggccggttaggtggggctggtcttgatgtgtttgaaagggaaccggaagttcctgaagagttgtttggacttgaaaatgttgttgttttacctcatgtggggactgacactcatgaaacatgcgatgcaatggcagaccttgttgtccagaatttagaagcatactttcaaaaccagccattgttaacaccagttgtttgattttgttaacttagcttttggtgtactttcactttgagggaaaccgttgttagacatattatttagaactttgcttcttgttttctgattttgaaaatagcagccattgttgattgaacttgtaaaaagatgttacctttacatagtttcctagtaaagtttcctcttttttaggcttcttagcagccaagcatcatttatgaaaaggtaaatccataaaagatagacactacattagctaagcttcaatacatacaaacaaacatagctacactataccttaaaagtccaaattattagataaggatctagaaagatacaaacaaaggaaggtgacgaaccacccaaaaacaaaggcactaaaaacagaccaagtaagctattcaaagttattacgaaaatatccaaagaaataaagaccaaaaacattaatgggtcataaaaaccagctaggaagttaatgggcagtagtcctaggagggaggaagaagtcccacgtatgaaaatttcgaaggaaatctcaccaaaaccacagcattgatcatcatcatcaaagaaaggccacaaacaacagtcaccctttcacatgacgaagccaaaatcaaaactaccctcaattatttaaaccattttgtctccacaatgatcaaacagttaaagaaggaaaaaaactgtacggtactgtttctgttgccccctctattctttctctcgaacatccatagctgtgttaaaaaaacttggcctttgagctcattgagaggaagaagctcccctgaagatgagaaaactaagagtctccagggtaaaatagatgaaagttcctttgttatgagtgaagtaacacccaaagtttgaacccaccacacattgccaaccagacccatatctcttatcaaactcctgtcataaatcaaacctaacagctcag

SEQ ID NO: 15123 - DNA, 3847 bp, Cannabis sativa
ccttatattgacttgtatacttgtatggaattaagttctaagatgaatacacattttcacaggatacgagtttgattatgtttttgactggacaatcatgaagtaccagcaatcacaacaagcaaaagcgcagtctcaattatctgtaagtatttccatgagcattttttgttctttttcttccttttctcgttagatgtttctgataggctacagcctttatttacataaccgtattttgtttttaatgttacgtttatttatttaacctttcggcattgtgttggaatttacagccaatttgtgtaggtagcagtcgagcacagcagattggagtaaataagcataaaggtaagatccagttttgaattttcctgcccgagctttcagcatgctaagaattttatatgtatgggaattttcctggttattttatcttattgattctcttactcttgggttatagaaccaagaagctcaagcaacattgcaaacccggatgttcatacgcatttcagatcaccaacagcccagatctcaagtgttgaaaagccgattgctaaaaatgtaagtaacattgtgatgtagatgatttcatgtcttcaagtggttattaattatattcattgaaagtatgtctattacgtacactcatgggatttgttctacattacccgaagagacagtaatgattacgattttcagttttgtaaaattctcgaatacttcattttgggtgtccttttgtatttctttcactcgagaacttgcaggcgataaattttgtacaagttccattggaagttagaaaagttgttttgggtgatgctttaaaaattctcagctctttcatttatttgatagatactcaattcactatggttcaggttgtgagtaatgcgccagttgcttccacttcattcggtaacagaagaaaccttccgaattcagaagggccatctgaaaatgcaaaaaagagagatgtttcttcaagcagctggttcccaacattaaacagaatatcctctgcaaagtaataggtactgcaattttcaacactccttttataattttccgtgctttcaaagtcgttaactagtcaatctactgataattcttagttcttttccaactacagatgtgaaatacagtgtgctcattagctcaatcactcattcctccaacagaagacaagacacctcggtggataatgctgggccaagtaaggacctaactcggatgttgcttacacttgacctatcaaccggggaggttttttttgtttgtttgttttcttttcgagcattatgtaaaaaaaaaaaagaaagggaaaattcatgtgttcatgatgtgtaaagtgttgttcccccgaacattctgctgtcattattaatatgataacagagttttaatccttactgttgttaatgggttgttttgaccatgtatttcattcaattcaggagtgagttgctttcttctgtgttcttattgctgtatcttatttggaatcaaacaaagcccttggatgttcacctcagaaaacaaggaaaaagtaaaccttgtgtttcaggtatcctcttgctataaattttcttttgaatgtctttacagccaaagactgcaacaaaaaaaatgagatatgctcatattatatccattcctttttctttctttctttctttctttcttttcctttgttgatccagatattgaaatgagagaaaggggaatggttttacaggctgaatgagggagccaaatgaagtatatatctctctcttatcttctgtttaatttttccattgaagggttttatgtaagtaagtaatattgaaaatttggatcaaggttttctagtaaagttttaatctttttccctttttgaattttcccaaaaagaaaaaagaatcaaaaaacaaaatttgcaggagctgctctgacattttgactggtacaatatagataaagaatctcattcatgtttggtaagctttaacagattgagactgagtaactaagtagtactatctttctactttctttgtctttgtctttttgtttttctactatacatactactttattaattccttgaagaaaaataaaaattactactttattaagctttactttgagatcatgcaattattattattattattttaaaaaaaaagtgaaaagaaaaaaagggaaaagtaagcgtgcaatgttaatttagaaatgtagtggttcattattattgttcatgatatgatataatgtcagagataaaaaatgaaaaagagagtaaaaaaaatcatgatttttcataagctttttaggtatttttcaccattagagttcaatataaattaaggggaaaaaaaggaatggttttttactttaaaatcataccaccccattatttattaaaacaaaataattatgttcaagaagaatggagaggtttgtgttttttttttttttttttcagttaaactacataatcatttcctcactattcaaacaatcatattctttaacactaagagaaagaaataactttttatgaagtgtgtctaatttagcacaattataaactaatcatgtaagacttttttaaattaaaaattactaatgaatgaagtcaaaattggtgtttggttatgttcaactgaatatggcaaaagcgggattaaacattagatcatttctaaggtggttgttcatgcaatttattatacataccatatctcttctcagtttggtttgattgattgtaaaattttatttatttttttaaacaatatttttgttgtctttgtttaatgatctgtgaacacggaggtcaactgtggcacgcttgttctttttagatcatcggtttagtggaaggtttgttcctactaatctattttgttagcggatttgttaattaatactatagcaaaattttcgttcaaaaaaaatgaacaaagaaaattaaagcttcatatgctatttcttttaacagaaaataatagctttcattaattaaaagttattcgaaagtatggacaataaattagtagaaataaattctttactaatagtacaatcgacattggaataaaagtctctatctaatatcttattcgttgatcgattaataaaagaactaatttatttaaccattcaaataataataatttagattcatgagttaacatgtcgtattgataaatcatacaaactttactctttattacatgtaccacattgacacaatcaatttccactataacatttaatcattcatgagcttttattcaactcagagcttcattgattcttactatctctgcaatctctgggttgatattacttgatttagaagcatgaaaagccaagtaccctcatgatctctagccacaaagtcatatccgaaactatttgattgaggaaagagagctcagtttacattagctttgatcatagcatagtttggtttagtccattgctcatctttctcacaaacaacaaaattgttatgaaaaaaattacaatgttatcatatattcttaaagagtaatgctagatacacatttaaattacacacaattatgtgtattaaatattagccatttatatatttaagtaggaaccacgtcacttttgattgtatggttaagattgaatgcacatcattgtgtgtaattagtatgtacaattcaaatgtgtttctagtattactcattttttttaagttctaaatacaaaattaaggataagtgcattgtgtaaacaatgagctatatatatatatatattatattattttccaataatttctcttgctctttctctctacaatttttagttttga

SEQ ID NO: 15124 - DNA, 6184 bp, Cannabis sativa
  modified_base (1702)..(1708): a, c, t, g, unknown or other
tccattttggacatcttgtgcctgggattggtcgttctgcacataacgacgcaagtggggattgttcttccttatgaagaattcattctccctcttcaaattctgacacttattgatgtcatggtcgatatcattgtgaaatcagtaaaactttgacatgtctctcttgctcatctctctagacttggcatatgctatgagcatagtaagttgttatattatatgttgggattttaggaagtctttgcgaaaattcaataattaattattacaagataataaaggaataatatgatcacaagagttctcaaggattaataatagagaattaataacatgaacataaggagataacgattagagataacaaatttgactgaaaaaattaaatcttcaagaggcatgccacattagaataatgttatccaataaatctttactccaaatctcccatggattgctaatgacttctttgtagaattagatttgggactttaaaccttgaattgtttagggttagcaaaactctagaataattgggagagaactagagaacttgttttgagagagaaagagaatgttagagagagattgcaaaatgagtgattaattcattttgactcactcaacacctttatatacaataggaatcatcattaacaataattcatgtgattagatcgttgaataaaattattttggtcatttcttgcattttatgaaatcataaaatttcttatgcaaagctccagcaacatgtcgcctaccattgggcgacaagtcgcaatatcaggaaataaaataacaaaactcaaattactgtcatgctcactactaaaaaattgggcaatttcggcacctcaatctcggcaattctgtgtggaactatagagatatataccaatctcagtggttacacaccgaactatcgagactggtgaattttttaaaacacctgcctcactcactagccagcccgcaccccatcacttttttccctctctttctcttcttcttgcttaacactaagagcaagtccaaagaggctgcatttatccatatatgcagtgattcatcctccaaggagactttatttagtgcaccattttgacattttttctacagtgcacgacatatatgcgtgcactgtagtcacgatattttttttttatatatatttaattaatattaatacatttatgttattatattcataaaattaagaatttatttttagaaaataatgtacgaattactcctatttgttttggcatagattttttcagtttatttttttttataaagtcgtgtatattatagttatttaaaatatcttataaaattttgagaaatttataataatttaacatgctgaaaataatgcacttctttaaacgtggcatattgatatacgcctacatgtttcaacattctagagacttgtttagtttttttttaatgatcgtgtatattatagttatttaaaaaattctgcaaaatttaaatttaacatgctaaaaataaaatttaatattattatctttaatctaattattaagtttatttaaattattatttgaacataataattgtggttatttttaggagaattaccctatatactattcttttaacttttgtttcaaatttacagtttgagtttttaaagtggttgcagcgttagttgcaataggggtttctnnnnnnnattctgtaaaaatgcaaaaaaatttgttttgaagtgtaaacataaaaaaatcccttatttttattaatttatatgatactgctttttttttattattttattaaaaaattaatataataataaaaaatatttttttagtgtaattattggtgttagggttggagaagaaatattttttgaccctaaatttattgatagtgtaacctaaagcacacgccaaagagcacagccaaaccagatccgattccggccattttttggtcgtcgttcgccctccagccacccacacgcaccaaggagcacagcccgcgcccgtctctctttctcttcttcctaaaaacatggcaatttatttttcttctccatctcttctccctacaaaagaaccaggccactcttctattgctctacgattcttcttcttcgattcccacttgctgatctactaccagttggtgctctagattcattgacttaacataaccacaaggtatatatttctaggtctttatttactctaccatttacattttgatttgcttctttttcttttctgagtttgttgatctaagtaaatttatcatataggtttgagtttgctctaagtttgttgaatttgaataatttctctaatattttgaatggttagtaagagaaagcttgtctagaagctatgccttggttcgttgaggtgtgtgtcctctttcaaattcaatatttatgttgtgtggcttttgaagattgtaggttttctttgagttccactgaattgtattttcattaaaaaaacaattatacttgatgatagtgagtaatatgaggttgaattctctacatcagtagagagttgcttttgctctctgcctttgtaagggaatttctctctatgtttctttaattcaataagagctcccatctttcctactattttcttgtcactgttctattgttttctattgttattgctactaattttggtatattatttatagatataaaaaagttctgctttgtttgataaatgataatggctataaaaaatttaattgttggtatggcatggttatagatgaaattaattagttagctactgtaatgcttcatttccttttaggaagctctttagttattttactgcaacatcaattctgatatatttgaatctttattaaaagaatggtatgtttctaatttttcattatataaaatattagtgagagaatttttattttttaagtgcgatttggtgattgcgtttgcttgtgaatatacatatatatatataaatatatttatatgagaaaagtgatttttcttcttccctttatccactgttttttctcacctttaatccacattatttgattttgtaattcgtatgatcatggaagtttgattgcaaactgtggtcatatgtgttattgcctagtgcttggggctcataagtgtttggcttagtttatggaatatcagtagtttttgagtgagtattttttatttctttgtattttcacacaattatatattgtactgtgttctatctgtttgtgcttaatttggaagcaaaaatatgattatgtaaatttattttaatttggaagaatataaataaatttttgtagccagtgtatttttatttttttttttcttaaaaaaaaaaaagacctatatcttttggcaatggaggaaaacttttgataattaaaaaaaaaatacaaatgtacgcaaatgatctcaaataaatccataatgaaagaaaaaaaaaagcatttagaaataaacctaatatttccaaattatcaagaaagagaaaaggttgagacttttgacactttcgtgaaaatacaaatgtaccaaatggaatttaaaagtgaaaaagagatcatattgaccatggaaagaggcagtgaggttaagaatagttttagcaaccggaataatttcttgagtgatagcatctccatggagcaaagtaatgggaggagactggggagtcaaagcacataatcctacgtgacggcttgggagagtaaacgattctatcatgttgagattgccaccttttgacctatcttggcaattcaaaaggtaactgtcgagattgctatctatctcggcggttctaagtgtcgagaatgcacatatgcgtgagcaaatgacacacctgtctcaacggtcagagataggtctatctcgtgggtttttagctgttgaagtgacatgtcgctcaaacatggagacatgtctccttggacttcgacggggttcttggttagttacttggaaaatattctaggcgatatgttactgtgcaattttctctaaaatatgcagttgacactgttgattggctcagaacttctcgggtggcttagtttactcaaaatcaaattttaggacctaagagcaagttccaacactcctacaaatacaagtttaaagtacacattctcttaatgtgttttggtcttttaacttgtatcattagttatacatttctcatagattagtctttactaatcttattgtattaactttaagtatttaaccattatagacactggttagaagcattggagtagacttaagttgattatgtgatatgtaaaaggatctctgaatattgatctcatactcagtgctaaagctccaaacacagaagaagtatctaactatgttgatcatagaagaagtatctaactatgttaattctgattatccaggttgtaagataactatctaattatgatatcataggtcaagatggatgttattatatactatcatataatatatggttgaaacaaaagccgtgtcaagccatctggttaaacaatttcattaatcaaagtgttttgtagttaatgaaaaatcccatgttccataagagatcaaatgacatcaagttaaggatgtgatctcaagcaaggaagttaaagtaaagaagattaccataggtcacaatcttgctgatatgttcactaaatgtgtaactcaaagcaagttttggcattgcctagacttactgaaagttagtaatgttggataggtctgaggttcacgaaaccatctctactgagatagtttggagataaggaagtgactaaaccaaggtgtacatttgtgatgtttatggtttagccttaattgtttggacaagctgttacagttcttcaaagtggttaagttagttatctattgccaaccatttgagctctattctagaccgtgctctttaaataaatgctaatcaattcacttagagatagaggtttggaagagaagtttagagtagtctgtagtttcattgttaaatgcttatgaaccatttgagctgtataaggttcttaagttttatttgtttgaagttaatctttgtggataagttttgatccttgcttgtttcttttaatctttgcttgttttagtgtgttcttgttaagtgatagataagatgacaacagtaggctactgaatgcatacccaagtccatgcaaagaacgccagttggaaagaattctgcaaccacaaagccaatatatagttatatatatgtcattagaatgttgctaagcttagaaattatttataatatttccacaaaaaaaaaaaaagaaaagaaaagaaaaggaaaaatatgttaaaacataatgccacatgtgctattaaaatgtaatatcaataatatatcgagggagttaccaaaggtataaatgtcttacaaaagcaaaaataccataaaaatcttcaattttgttataccaacttgaaattatcctatatccagattgaagttaaatggaccatgcactttttattttctctgataatggaaacccacaaattttatatttaattactactcgaattggctttgaaataaagtagcaaaatatatgaaattcagtcgaaaagtcacctggaacaagatgaagtgcataagatggagaagcaatctgggtcggcccaaccagaagaaatggtcactaggcctcactagaaaagtgcctcttacgacttcagatttatcatggccgtccaagctcatcttagttatgatgctttgtagattcgttcccactactaatagcatctataagaccataaatttttagtaaacatacggtacactatatcacatgacattttataattgatgactaattttttatattatttatttaattaaaatatgtttgaccaatattaaaacataccaataaaaatatttttaatggagtataaatgtagtttataaatacatctgaacacacttaataattttttttttttttaaataacacttaataaaaattattatcctaatgttattctaaaagtgtgttaaatttaatatatgctaaaagttatgccaaattatatacaaaatatagtattgtattaaatttggccaacaataaatgctattttttatttaatataattattagaatttattgacttttaataaacttt

SEQ ID NO: 15125 - DNA, 4870 bp, Cannabis sativa
  modified_base (4017)..(4019): a, c, t, g, unknown or other
tgctttgtgttttattcgtgttttataaaaacacagtatttttgagaaaaattccgtgtgacagtatttttgtaaaaattcactcaaatttcagtatttttgtaagtttcctcataaggaaatgggagcccaatcagtccataccaaatctacagtagagggcccaaaggggctaaagaaacgagggtagtttcggcattctaggaagcaagacgacactctttgctaaaaccctagaatagaatatgaccttgcgcgctcattagttcagttctcctccacaagccagaaggcctaaactgctcagccgaaacttgaagaagaggtggccatacacaatgggtaccttccttcttcttcctcactctttttctgatttataatacctatctatggattctctatatcttatttatgcttttacgtattgtttttctcttcggcactgctacactcaaatgctccattttctttttagctacacttttactttggtaattttttctcacgctcccattctccattgtatctgcattggtttgaggattgtacatttcaactgtttgagattgcttttttattgcgtttatagtactgaacttggtgtattttggggtctgcgattaggtgcctacaagtacgtgtcggagatatggaggaagaagcagtcggatctgatgaggttcgtacagaggatcaggtgctgggaataccgtcaacacccttcgattgtgcgtgtaacacgccccactcgccctgataaggctcgtcgattgggttacaaggccaagcaggtatggtcttctccctttagttgagacttatttgagagttgttatattcagtggttaacgaggttgtgaatttatatataacctttgttattgattggtattggtctcattcaaatattgtactttttggtagcctagaaaatgattgttaacacttgaaaatttgatgagatgtgtttagtagaaattgggtttccggttgttttaaacaagtttcattcgtgggagtacttgattgattcatcaatcttctattgcctgaatatttttgtttagttaattatcctagaaacatagtccaaaagactccatgtatattcttatatgtgctttgtatgaggatgaaaaattcaatgaaatttatgaagttcacttactttcgtcttgaataattatttttgctaaacaagaatagatgctttacaccgtctgtaatttattttgtcgtctgtatttgaaatcaaatgatggttttgtaacccatgataagtttctctcaattgtgtaagatataatcgacccaagttttattcttacagggatttgtaatttaccgtgttcgtgtcagacgtggtggacgcaagaggccagttcctaagggtattgtgtatggaaaacccacaaaccagggagtcacccagctaaaatttcagcgcagtaagcgatcagtcgcagaagaacgagctggacgtaaattgggtggtctcaaggttcttaactcttactggatcaacgaggtatgtacaaagaacttcatctcatttagttttactaataatttagtacatatttgtattaaaacatcaccaagcattaataatcatattcttaacatctatgagatgtggaataggatgagagactcattataaatcatactctgcagcaattaatgtgctctattgaacttgtataatattatcatgtaatattctctgaaaacaattatctgttatagcatagaacttcaaataactaaacttgctttcattctcttaggattctacgtacaagtattttgagataatcttggttgatgctgctcacaatgcaatccgtaacgacccaaggatcaactggatctgcaatcctgttcacaagcacagagagcttcgtggactcacttctgctggaaagaaatacagaggtctgcgcggtaagggacaccgataccacaaaaacatgccatccaggagggcaacatggaagaaaaacaacaccgtctctcttcgacgttaccgttgataatcgccatgactttgatggtgcacagatctgtaactgttttatcttcagctgtaggaagtttaagccggaaaagactatctccatatttttattattttattgctgagacatggtcagtcatattgttgttttggctgtgaagttttgttcttagtaatttagtttttgaattttcacatgttatatcggcctgtgtaatcattcccaatggtttgatttgaattttttgttcttaaacatagtcaactatttggtgtctatggatgaaaacaggatgatgagcttgcacgagagccattcactgaacacagctgagcttcttgcaaagcccatatgttctaattttattcaaaaacacacaagaccatctctgcaagatctaaaatttatgttaaatttgacacgaaaaatgagtttgtgctatatttagcccactatttacaattgtgcactaataatgtaaaataagtaaaaaataattgattatactaatggtcacttcatattttattgagaatatataaaatttattatttattattcttttattgtttaaataatgataatatggtaaataaaatttagtaaaaaatcataataattaatgacattatagtaaataaaaaagtagcatttatcgtaggttaaatttggcacaatactatatcttgtattaaatttggcacaacttttagcatgtgttaaatttagtatactttttagaacactattgaagtataattttttttaagtatgttaaaaattaaaatataacaattgagcacttttttggtattctattgaagatgctctaaccttacgaagagggcccaattactatgaatatacccttctcaaggcaacattgcgaacaatcaagctcgttgatgaactttagttgggtcatgattttaataatgaaatcaaagttagatctcacggatgtcttcacgccctaggtctaatccagtaaagcaaatcgatagaatgaacacgagaggcaagagctaatctatagtagtttcatctttcctatcttgcaatttgcaatttgcattaagggtaaggaaaattaagattttgctcttgaactttgacatactttaaattatggtttttcctttttaagatttttgtctaattttgttggtaagaaaaatttaacataaatgaatgttttgcgaacataatttagtacatggacaattacaaaatttgtaaaattgaatgaaattggataaaagtctttaaatccaacaatctcaatagttcagtgaaaattctaattagcattatagaaacttttttttttttttaaaatgtttatttatttatttattttaattttagaacaagacgtgttatccatttttgattagtgattgtttttaatttcttttaatggatgaatcctctaattatgagcaagtgccaaggtggaacaaaaattgaagtggggcctacataattttttgtagatacttcaaatttttatttgaaaaatgtattgaattagatataataaaatgtaaattaatacataatcatcttaaaaataactttttttaatatcatataagtgaagtgacttttatgcaatgatattttcattgttcaaatttcaataataatactttagttttttttcaaaaattaaaataaaattgtggagagtagaacttatcaccttcttaaattttaaaaaaaaaatctttaccactacaccaaataactttatttgactagaaaagtatttgcataaaggcctcccaaaaaaatcatttaaatttgaaactcaaatagcttataacctatcttaatttcatgtggggtgacggtcccacttagtccacaatgccgaccttaggcataggcgggctaggcccgcgcctagggcccactcattttaagggcctaaataaaaaaaaataccttttaaatatatacatattgttttaataatttttaaaaatannntttatctttatagtaagggctcaattttttttttttttttttttctgcttatggcctatttcaactcagggccgaccctagtctacatgtggcttcgcccatgattacgaggacaaaatatattaaagactaacttttaaaagttagattttagtgagaaaagagaaagataagaaaaaaataattatgtttgggttatgaaaaaaattgtagaaaaaaaaaataattcaacaaaaattttcatgctaaacaagaaattttgatttatttcttattctccccattttgtttcctacaattttattttgtcatcaaaattcaagttataaatatagcctaaaagaaagacaagcccgaagggaaccaacataaagttcaattcaaaataacaagtggctccaagaatgcaacgggaatttctcggtcaaatcgacatacaaggtgatcaagaatgtagatgtcatggccgactgtgacaacaagtggaggatcatttggggttcaaaaatccatgagagactcaaaatgctatggtggaaaattgtggccaattgcctccttactaaggataggctgaactccttattctctatcgcggatccaaagtgtaccttatgtcatggtgaagttgaatcctcactccatttgttctggtattacaatttgcgagggcagtgtggttcggctgttggtggcagataagaacgaattcagttaatattgactggtgggaaaggtggttagattggttttctatagattctaatcgtcttgatgggcttcaacgtactgcatctttttcttggcgggcctgccataatctttgaaagcatatggcgagaaagaaacaa

SEQ ID NO: 15126 - DNA, 4734 bp, Cannabis sativa
catcataaattcttgagtaattctgatcatttcgtaaaaaaaaaaatatggttacgatattattttaagaaatgctaaaagacactcatgtcgcatagcattctttttgtaggttatgatatcattattgaaacaaattaatatcgaatcttaatttaataaactttataaaaaattacttattataagatatcattttgtaatgttaacagagatcttggtgtccaataacaatgttgtattattttatattattttgaaaaatataatgtctaaatttttattttactattattaacgaaataagaagattagcggtaatttttacaaaacataaactaggaaagaatattttttataaggaaaaagttcattcttaaacaaagaaatgacataaactagaaagattcaaaaatacaaatgagtgtttagatcaaaaatttcaaaagagtacaatttgacaccagacttgacttgacaaaaccacactaataataattctcttaaataccaaatctacccctctaaatcctaattaattttttttttttttaaaaaaaaagacagagggccccagattcttcccaattgtgataccgtccacgtgtcaacatcccgataccagaacagcacaatgacacgtcagcacacttatttttttattttaattttatttttggtttcatctggagtcgactcgagccagagcttccttttcttcctctcatggcggtcaacgacttgatataatatcatcatcgaaaactctcccccaaaactacagttccttagccacaccagactacgcaccttcttcttcttcttctccttctgtacggactggcctaagaggagttccgagtttgagtccgccgtcgtggactgatttttttttttttttttgggtttcgaacagtatggggagaacaggtgcgaattcgaagaatttctcggctaaacgcgaagattatcagcttcttgaggaggttggttatggagctagtgccactgtttttagagcgatctatattccgcttaatgaagttgtggctgtcaagtgtttggatctcgatcgatgcaatagcaatctggttagcttagctgtttttatttatttttctgcatctgtgattgttgttattgacatgaggatgtgtttggtttggttagttttgagtgtgagttgattttgttttgggtttgggattgaatctatggacttcgatttggttgtgtggccgatctgtggtttgtggtgatttagtgttgattttttggtgtgagattagtgtgttaagtgagatcatggttttggagaagctttcatcactctgtttagttaattagttctagtttgtactggaaagtagatacatgtactcattggtttggtatatttatggttttagatccccagttgtctttttcgaggtttatacggatttacagtacagcttgctagtctttatgattatatttctaatttttttgcaatatttgcttcttcgcgtgaatttagatttgtgatagtcaagattttgatggcttcaatctgctctagttgttcatctattataaatactcaatatcaactaaattttttattgaattgtgaaaaaatcttttcggaaaagtgactttaacataggtgagtgtcatgatttaagctgggttttcgaggaaatacctcaagaaacactggcaaacgaagttctagatttgcatttcatgcatgcacatttaatgtttggcaaatgaacccatgtattgatctaaattttcaattatgttttaatggggcttaatgatgtgtcaaatgcaagagaataagaaatctcgatggcgtagctgacggtttagcattgtctttgtattcttcagcatgtgtcatattgtcatagttttaagttttgggtggtgggggcaacaaagagcttcatagcagcttatttgctcttgctgttggtaattttcatttcataaaaatggactttccttcataaaagacctctaacacacgtttagagttagtgtttttgtaaattgagtacagatttatacttgcatgtgtttgatgcataaatgacattagattttttataacaagacaaactataaatgtggaatttgaatgctacactagagcgtaattttttatttacctgatgtactgtatatttcgcaggatgacatacgtagggaagctcaaacaatgagcttgatagatcatccaaatgttgtaacagctttttgttcttttgttgtcgatcgaaacctttgggtggtcatgccattcatggcagagggttcttgtttgcaccttatgaagattgcatatccagatgggtttgaggaggcagctattggctctattcttaaagaaacccttaaggctttggattatcttcatcggcaaggacatatccaccgggatgtaaaggtcagtagagactgggagtttctcattttatcattttgaaagatctattgattgaccatttttttgtttgaatttgatggctgcaggctggaaacatactccttgataccaatggaattgtgaagcttgctgactttggtgtttcagcttgcatgtttgatgcaggcgacagacaacgttcaagaaatacgtttgttggaacaccctgctggtacgaaatgtcattcattggacattatgtattaattttggtgacactgaactctttctctttttctaatttccgtatgcttgagattgttactcatcttctccttgcaggatggcaccagaggtattgcaaccaggaaatggatataatttcaagtaagttgattcttcgtttataagcttgaaagcaaagtagaattgctgtagcgttctctcaaagtatttatttcaagaaattacacgagttgcgtttaagtgcaatgtgttatcatttagatgcaagggacattctttacctatattgtctgctcactgaggagctgactgactgatcatgatgtgtctgcataactatttgataatatgttcattaaatcaaactttgtgcctcaagcaattactttggatatttacattgaaaaaggatcatagagtctgatcactttattttatggtgcattttccttgtacagagctgatatttggtcacttggtattacggcactggagttggcgcatggtcatgcaccattttctaaatatcctccgatgaaggtacttacatcaactacacatgatgagcaagaatggatttgcaaatgtggcttggcatcatacaaacatataacatatctatttaacttttctctcataggttctgttgatgaccatacaaaatgcccctcctggacttgattatgatcgtgacaaaaagttctctaaggtattggaattctttctgaatagagaatccactggccgatttatatatatacaacctaacttctaagaattcgccactgttttacttaagctgagtaacggtgtcaaatgtagttacttctttcttcccacatacttccaattgtagaatgtattctaattagaggatttccagttgtgaccagtcttttaaagaaatggtggcgatgtgtttagtgaaagatcaaacaaagagaccaacagcagagaaattattgaaacactcatttttcaaacatgcaaaacctccagagctttctgtgaagaaattgtttgctgacttgccaccactttggaatcgtgtcaaagctcttcaggtggtacccaaactatattcatatataaatttaaagaccttcttggttttactcgtgctcttatgcttaattatggatttgtgtaatgcttgaagcttaaagatgctgcacaactagcgctcaaaaagatgccttcagcagaacaagaggcattatcacaggttcgtagcttctcttgattgatagcaattgtgactgaaatttttatttcacttttttggcattcttttgtgcaataaagttgtagtagagagcaaaataataccctatcctataagtattatcaatgggacatgatctagtagctaatgcaaagaaacaaacactatcaattgtataccttgtcacataagctttaatattatatttgggagttcttttgttttggctggattcaatatttttatgtagttctaaattatttaaaggcacacactgcccagaaagcacttcattaaattctaaggtctagtgtatatggtgaagagtgattcatttattatagaggatataaaagcatatataacctagaataccataatcaggaaagtttataaaagaaaggttaccagctttcctcctatgaatcaagaagaagaaaatgataatcccgccgtacagaataaaatggaaagggaaattttctgctaatctatgaatttcacacgtattatttagcacatttaatcatattattcaagtccataaatgcatgctattatttgtgaatatgatttgcaatggcacgatgtcagactcttgtttctttccatatgactttgtggctgaaaagttaactcatagaaagttagccacctaataatctatgtaagatcagataacatagactaaatagcttttgcatctaattcataatacaattaaaatgacaaggaacttgggagcatcaagatcggaaatgtatacactgcttaaccttttgttcttttgaagttccattactattttctcatagctactctcattgtgttccctggtcagagt

SEQ ID NO: 15127 - DNA, 9626 bp, Cannabis sativa
  modified_base (50)..(59): a, c, t, g, unknown or other
  modified_base (106)..(107): a, c, t, g, unknown or other
ccactaaaatggtggaaaggacatcctattggaatgacattccaatactnnnnnnnnnnaccaaataaaagaatggaatgaaaattgtttccattccatttcattnnctccaaccaaatgccacctaaatttatgaaacttatgaaatatataaataacatgtgtgtagatatatatttaaatcatacatatgtgcatattttgttgaagaaagttaaatatctttatctatttatgtataaagtgttactatctaatagaaattgttgttttaacgaattcttttatttttttcgttaaaatattagttaagtgattattttttgaataaatttattagttattttgctatctaatattttcatgatgttgaactgccatttctacctttttcatgctttgtaattattaattgtaacatgtaggggaatggcaaggacttttttaccaagctcagaagatggtggaagggtgtaaatatatttcagaaggaatacatatttgttcctataaatgaagagtaagtctttgaggcatctagatgcttaagtgcttttttagaaaagggaattttttctactaatctttcaaattacagtgttgttaaatgttgcatctctttgacattttgattaattgagacatgatttatgttcctgttctattctgcctaattataatccatgcacattttctttttctcgttttggtgtattcagtcttcactggagcctggcgataatttgtaatccagacccgaaagaagagtcaggaccaattgtgctgcatttagattcattaggacttcactcaagcaagtcagtttttcaaaacattaaaaggtgagacatgaaaaggctttcccaactttagttatacttttgttcgatcattaccatgtagagtaaacatttccaaccattgactttgataggcactgacttggaaaattagagatacacacactctctcatacacaaatcaatgagcagagcatattagcaagagttcaaaaagtttccgagtgttctagagacttgacactctccctagagtagctcactaaaattctccggtacaaattatctacctcactagcaaaccagtatatatttctctacacattcccaaagcatagccactttctcaatctttgcaactcacttattaattcattatgaaacagatgaccattaactcgatacgtgttcactacactctcctagtctttttactcgttgtatacctaaaacataaagcattatttctgattgatatggaagaaatccttttctgcgaaagaatatcagtttcctgtaagtatgtgtaaatgttcattgtagatttttgagagaagaatggcagtatttggatcaacaagcaacttctagttcagattttcctttgccagaaagcatatggagaaatcttccaaacaaaatcacagataaaatcattacggtaaatttcgtcctcaaatcattcacaaaattctgtaaatactctgtgaattatgtattcatagattaaaattgagatagatagcactggtatctcatatacctgctctctatattttgttgcttgcattttatttgtttcaactgcgtccacactatttattttgtaacattattaaatcatagttggttttaattatttttttttccttaagaagtgaaatcacaatatgattagaaaataatgcatattggtggagggatttttaacattagcctaatcaagcttattgttttagctgtttttctgtgttttctcgggcttcgaacatattaagcttttgatttctatcctcttgaaagtgtttggtcagattcttaccactttatcttggattcttctaacatttcccaccaggttcctcaacaaagaaacgattatgattgtggtctttttgtacttttcttcatggagcggttcatcgaagatgctcctgaaaggctgaaaaagaaagatctagcaatggtacattaacattttgatttcaacttgtgtgttggtgtgttctttcccaccgtaaattttattatcatatgatgtttgcacttgtcagttcgggaagaagtggtttaaacccgaagaggcctctggtttgagggagaaaattcgaaagctactcatagaagaattcaaaaaagcaaacgctaattgcacatcagagtcttcgcaaggttcgcctcctagtgttgttttacaagaagaattcaaaaatgcaaaggctaattgcacatcggactcttcgcaaggttcccctcctagtgttgttttagaggaatgaattaaggggcaacagaggtctctcctttttcttcaagtgattgcttcagatgaataatgtggggccaactaaaggttagatttgtgcacattgcttctcacactctaaagcctctctttttgtatagttcacatagttgatgatgcatcatgcaaatacattgcttcttctgacacattcatttaagtcgtaaatggccaatcagctgtataaagttctgagatcagttttgtatagatcggcacaattgtgccatactttcaagaatagcaacccgaccagttttgactgggacgcacagtcacaatttctggtgactttgaagaaaagccctctaaagttgaggatggtgatggttctttgagcaaatgttcactaaccatgtaaactgactagttatacttttttttttggactgactacctatagttttaaatttctacattaatattttaatagtaaatttgagattgagaacaataattataactgtatttgcaatctgtactagcatttgaggcaacttatccaataggtagggagcgatttgatcacttccataaaaaattctcgtttcataaaaaaggtgagtactcagagagataggatgtaaaaatttatggtttagaaatatttgtggtgaaagtatgtaggattaattattttaaattaattttttggtctgttttggtatagtttgatgcaatcgtcaaatctgttctatttgtgatgaaagtaaccagaaatatttggtgtacaattgaatagatatttgcaataaaaataattaattaaaaaaatatttcatattactcactaaagtatttgatctcgtgaaatccaaattgaatcttgcgaggtgttttagtacagcacatcaatgatttttgtttagaaattggattaagtttcaatgaagttgtaaaccaaagacaagcactcacatcgaaattacttgggagtgaatacaacaattcatatggattggccatagaacatattttttgctgagcagagtatttggttggggtgtttacaaaattttcagcagtaaaaatgtatctgatctaggcaggcattcgggtagtaaatgtacattttacctcattttcagaaataataagggttacgttacgtgcatatacatttctttatgatgaagtacttttctttgtatgtgaatgtgcgtatatgtatctacgtcttccaacaaaacaaaaaagagagctaaacacttgatcagtgtttaccttcgacgttttttcttctcgggagtttcgtgaacttgctttttcataccgtacgtctttagctgaaaattttcaaatgcagcagagactgcttccacctgtaagatagatatatcatcattaatggtaagtattatataaagctgaggcaagaacaaatccttggactattatagcttaacagaccagttcaggcttctttgagtaaactctaacaatcgtatcctgataaaaagctggcaacaggtgactgatgcgatcatcttcaatgtgaaatgtatcagaactctcataatcctggaaaaaagcacaactattaagtccataattgagaaccattaatatacgagcaatgacatgaattataaccaaaagggcattaggtagctgtaccttgaaaaacttgatgctgtgagcaaggagtgaaggcatgagaagagaaaaacccaattaataatgagaaattattagaaatgaaaagagttacataattggattattctcaggtacctttgcaaagggttatcagttccacgagtcaaatcaattttaacattgcttacagcaacatcttcttctgttaatgaagtgtggccagatttctgattgaaaaaacctactcattagcataccacatacacgctaattgttccaaattggaacataacgtctaataaaaaataaaagaaattggacctgggaacagattatatcttttggggtgatggctttgaagtagtcaatttcctcctttgggacagaaaattcgttgcagaactgaaaatcagatgaaatggtaagaatgtgaacaaaacttggcaatagatttctctaccgcggtgataaatagctaccttatattcttggtaatatttatcataccttgtacaaatctctccgccgaattcgagttatcaaatctttcgcctcctttaactctggctcagaagatgtttcaattgctttcaaaattgagtcatccaactatatttgaagataaacactcaatcccataaacattaaaatctagttatcattagagtaatagcaggtgatgtttctcaccttccagaattcggatggtctaaacgcccttgacacaatttggtaactgctatcagcttttctgagagcatctacaaccatgagttctattgcctgagaaaaagattggacccaagttacacaacagttagaaagtcaatttacatagaataaataagcttttgattttcccagatagaaaaagtaggcaaacttctaataccttcactttggcatgggtatagactgtcctatgcaagtcagcacgagtggcaaataacttgtggatggtcaaatctgttcaaaagcagaaaatataaggaaaaaatgtggggaaacaactgattgttccaaaatgataatggaatattcaagatttacatacaatccttagcacgataacatatttggttatccattactcgcatagattccatcaacctgcaattcgaaaacataatcatatattggtcaacagccccaatcaatacatagtttctgtgtgatgaccaataatcacacaaattttgagttaacttgaaattattataaactacaggcgctaagggtttccgaagaaggcaaaacctttcaaattgaaaattgcagccaaggccgcaagcacgagagtcacgtacaatgtaatcaaatctgtttaacaaatagtattctttcaattaaggaatctcaaataccaaatgatccaatcaaatgacattttaagtaaaaatcaacgttaatttctggtggcttacttgtcaacatctattcctgttcgaccattagcaacaatatcatacaggaaggactttggcttcagactctatattttaagaaaaatggcaaaaaagagaaatggatgaggatataatacgaagatgcatgttaaaggtaattatattatgccatgagaacaattttaaaaagtattgccaaaaaaaaacacattattgagaactggagtgcaaaaacttatgcgacttacagtgagtaaaacatctttaggacaacaagtgatcatatcctgttcatcagaacagaaatttatcagtcagaataatgattaattcactagtatcaagataaaagatgtagtgatatatgatatctaccagctccgctttcatgagcattacgtgagagtataaaacatttaaaagtttaatcttagtacccgaaaattgcaaaccaaaaataagagaacaccaaaaatgagacaatggaatatgtctgaaagcattcatatcagaaagaaatccttttcaaatgagatgtgggaaaagctgatcttagtaaccaaaattgcaaaccataagagaacatcaacagtgagacagtgatatatgtctgaaagtgtacatagcagaaaaaatcctttccaaatgagatttaacacaaccaatactaaattaatatgtttcgatcaataaagatacagtagcataactaaccttcactctcttgagtgtttccggatcaatatcaatgttgttttcatcaaccatgtactctatcatttttacagacatgttttcgtgagacctgaaaacatttcaattcttagcagaaaattagatgagtttctcaaatgaataataattactggtcacaaccaggtaaaaaaacgggttcaagctattgtgaaggcccttcacagcttctataatgtataaagtttattatttttattttatgcttcataaacatgccccgaagacaaaaaaattcaacagattttgtgtacaattcaaacgactaaagttgcgtgaaccaaatgattagtgatgcgtagattacatcttgtttcaactattttatgcaaaatatagcctaaatagattgaataatgtgagtcaccatatattgccaccaggtcccatggacatgacctcacgctcaaataagtgactgaatggtccatgcccgacatcatgtaataagcctaaatatattcaatagaagattggtcaaattagtttgcttaagctaaagtatatactgtgtgactggaaaagttggcatacctgcaagttttactgtctttatatcatcatgttcaatttcgagctccaatccctgtaaggatggcatgtgaaggaggacatattttcattcctatgctcaataataaatgttaagcataagatggaacaatagttacagcaaagtcctacttggtaagctgtaattttattaatagcctctccagcaagccagtacaccccaagtgaatgctcaaatcgagaatgtacagcaccaggatacaccatgtgtgtcagacctggataaaagtgaaaaaaaatgataaagtcaaagatgaacaaagtatttcaattggacggaaacaatgccacattgagttgcctctgaaaccagtttaatataggaataccagattgcctcacatattagctatgggttaagaattttattacagctatcataaatggattccgacatcttaatttattgaagggcaaccaatcagggttcctccagctagctaaaggaaaacaaaaccaaaactcgcctcactcttccaattactgtagtacaaactacaaatacggcattcccttggaatagattccatcaaattttgaatgttgctttttttgtgaaacacaattcaaaacttcattacaatcataattagtcagccttgaaagtaatttaacttaattttggattatcaaacattacttattcacaaaatgccattttgtaattgttaaatgtctctttataatttttattttgctgacaccagtgaaagaaagacacatgtttttaataatggtcaactcaccaagctgcttcaaatcccgcagcctgcagtttgtagttgtgtcatcagaaagaagtggcaatggctaaataagaaaaatgttctcaaaagaaaatgttgttgttgctggaaattcaatcaaacttacctctgaaactgtggtgtatcaatgaacttcatgaacagctagaaagtacagaaacaaaaattagaatatatataatcttcaaatatatacatacataatataactataactcaacaaaaatactaattagttccaagtttgcctaatttagtgcttctccctccataatctatattttgtttgtcaaaatttattaattatgaagattcttccagttattcttcgatattttgtttataaattgaaaactaatattctcttctaagaaaggaacagttcataaacaaattttcatcgcaaggctttcgtgattagcattttcaaatattaaagctcaaaggatattcaagcacagagttaaaataatttttttatatcttttgagttctaatcttccgtagaaactggcgaatggttacttcatcatcatataaactcttatcgcaattcagattatagccagaaaacggagccattaaaaaagaagtaattaattatttttaggaaaaatatttattacagagaaaaaacgacgattagagcggaaaaatagtcaataattacttctgtaattaaatattataaataaatataagtgaatcaaattcaaattcaacgaaattattcacacaccggaaatagtaaatgcataaaatgtaagaaataaatataaatattgtaaacagttatcttaacaaacagtatcgaataaatacagcatctatttagtatataagaacatcaatcgattatacaatccttaaaatcaaaatatacatcaaaaagacttccaagcgtcgtattataaataactaattgaaagaaattgttaaacaacagaataaaccagtgaggaaagaaaaattaacaaaaaaaatctaataaatactattttcaatattattactcacggaagaaaaatcgaaacacacttcagcagatataccagaggcacttaaagctttttcaaaccaaaagcgatttaagtaaattatttaaatgataatacgaaagaacaaaatcaaaaacgaaaactaagattcgaagctatggaaacgaaagttgatagtaccggttcgagatagatgtttccatgcacgttgtcatgaacatgcttcagagagcggcgatccttagagatgagctcccacacatcggagcaaggaggagtttccatttgtactgaatagagcaaaatgcacaagcgaagaatggagaagtagagaaccgaagaacaaggaatttggaaatattggctagagagagaaagagaagtatggataaaagagtagtagagaggtggttactgagtggggactaaaaaataagagggaataaaacgtgagagaaacgatatatagcgtcacaaacgacgagaccaaaggagagaagagaatattgttattaatcaacaaattaaattagcagtttcttttagggaatttaactgttaaacagtaaaaaacactgaaggaagttatgttaattaatttttgtaataactaacggtgtttgtaaacgactgacggttgaaatttataaccgtgattctgagacaaatatctgtccaaaatattttagacgtgttgcccacggaaaagagctaagtgattacgtggctctcatttaggtgctgtgctataagttgtcaaataaaacttgcagtgacagtcatggtgagaataaacctgtgttaagtttctttctgggtttggattgacattgagagagagatggattggagttttgagtatctactgtcaataatattagccaattgtctttgtgaatagttgatatattattataaaaatacttgaaagaacccattttatgtagacaatatggatttttgcgtttatacattgtaaggtgcacatggaataattttctacatttgacatgtttacagtgacataactaatagtaataaaagcatttcaaaaagaaaaaaactaataataataaaagaaataacgtgtgtaatcacgaaacgtagtagcaataatgtaagaggcctcataatgtaatgggttgtatttacattgtgttggttgacctcatttctgttagggggtttctttttttttttttttt

SEQ ID NO: 15128 - DNA, 3465 bp, Cannabis sativa
caaaaaagttcagggagcacggattgaggtatatgtcaaagttcggaaaaaaaaattactaattagtctctttctaatattaaatttgatatataatttgctagaaatgtgaaataaattgataaatccaataaagcatgttatattttatgtacaaaataaacaaaaaaaaatggtaaaataaaactaaaactgtttagttactgacaggataataaggttaattgttgaactcaatagtgaacaattgaacactattgtttgataattgataattcaaaatttaaaaagtttggttactgacaggataataaaataaatcttaaatgtgaccaaacctattaatacaagttttataacttgcaagtaattacagagatcacaggactggaagattccctcattcaaattgcacctaccaatagaactaaaccaataaattttatttattttaattaaaaatagtaataataaataaattcccaaaccaagttaagaggtgacaaaagtcaaaatcaatatacaaatggatgatgtatggttgcttactttgagtttagggaagtgggttccttgtggaataaattgcacaatgcaactaggaattgaaaaaactccaatttattttaaagtgatttattttattttcataatttttgcccttattggcactaggcagcaactttcagaaagaggactaaaaaaccaagttcctccactttgagcaactttccctttaacaaaagcaaacaaagaaaacaaaaactttcattgccatttttccagcaattttttttaataatctatatttaaccaattagaatatagattaaaagtattaattgccagttgttatataaatgtaatataagataaccacacatgtagacaaactttttaaaagggttgcttgatcacagggcaaaagcatagaaaagagaagaacaaaaaattaatttggaagactggttcagaagaagaagaagaccaaatgaccaaaaataatcacttttttaatgttgcaggctggagcaaaacaacaaaaaagaccaccccccacaaaacaatgatgtcctgcttcttactcttgaaaatttattcaaaagaaaatttcagcaataaatgaaaccccaaaaataagaaaaaggaaaagaataaaggaaaaaacaaaggcatgttatgtcattgatggaaaaccaacaccatgcccacatttccaatatagatataaggattatcccaccttgctggtggtcctaccaggggaagggaaaacaacatgaacaagttaatttgtagcagcatagctttcattagattagctggtaacttggtccataccaagaaaccatccaaagtttgaagttggctttgatgttgatgcccatcaaaagtggctggtataattgggtccaccatccataattccaactggcaatgattgtgacagaaagtaggaagcttatgaatgacgagttaagaatgtatcgaaatttaagaatatgataagagagatatggctcttataacgtggatatttggaaagaatgtatataggaagtaagtaacactaaccatatttatgttttacaagcagaagaaaaaaaaaaaaagatatcaacgacctatggtacctataacaataatgaaaaaaatattttgtcccaaatgtacagatgcatcacaatttgatgcagggcacatctgaaaaggtataggagaaagctaagcatacaacaaatacagattttgttgtttttcttatggaagcgaaggtgcagcaataaatcttgttgggaaaagaaattgagcttcaaaaaacgagaggatcttatctgttagtcacctaatcttccagcacagttatctccaccttgttggctggtgatgaatgctgccactatcaccttcacttgctgttgtatcagaagtctctccacccaattgtttatcgcctattttagcaccagcacgactttcttgttgttgaggatgatcacgatttggttgtggaacatctctagcagtacggcggtcctgcatattgagaacaaaaattgataaaggagctcgcttcgcaaataataaaaatgaatgaattggaaatcactgggatataaaacgtacatctcgaaatagcaagtcatctgcctcaagcatgtgaataacatgccccatctttggcctttttgttgcatcaggatcaacacatttaagggcaactaggagaacacgcttgagtgctttggaagttggcatctcaggcagcttgggatcaattacttgctcagatttccgattcccaaccaaagtttttaaccattcaaccatattcacctgcaaatatagattcactttcagcctataattggcagcaggaaagcaaactacaaggtttaacaaatgataatcaagactaacctctccttgttgtcgactataatcaacggggtttcttccagaaattagctccatgatgagaattccaaagctatagatatcacttttttcattcagcattccagtgcaagcatattctggtgcaacataactgaaaaaaaatgccaatgtgagctttcttcatgatcttaataacaatgcaagcattaaattcttacataaataacccccataaacagtttaccaagggagagaaaacaaatgatatcaagaaaatgtaactaacccgaatgttcccattacacgagtagtgacatagcttgtatcagaacacaagagctttgcaagcccgaaatcggacaccttagcattccattgtctatcaattagtatgttgctagacttcacatcacggtgaacaaccttcggctcaagaccctcatgaagataggccaaactacacaatagaaaaatgcaatttcagacagacttttacatagacataaacaaaggtgaaaatcatacagaaaataatttatggcagtacccttttgctgttcccagtaagatgttcattcggatctcccatgttaatgggcttacttcaccaacatccccatggagccattgatccagattaccattgtcaacatactcatacacaagcatcctaataaacaaaacaatgtcaatgaatgaaatctcttgactgaacaaaaccttagttcagatatgaagatatacaataagttacctataggcaccctcaacacagtatccaagtaacctcactaggtttttgtgtctcacacgcccaattacttcaacctccaccttaaattccttctcagcttgacccctaacagttgaaaagtctcgttagaaagcccgttagccaatatgcatacacggaaataatgattaaaaaaacaaaaattggttataaactcgcgaagagccttgataaacagtggaagacatgaaaaaggaggacacaaaggtgtgtagaagaagtgaacaagtgcttaatttcgaatataaggaaaaagatgttctttctcagag

SEQ ID NO: 15129 - DNA, 7714 bp, Cannabis sativa
caagtatatggcgcttgctgggaacgatggtgttgttgaaaaccaaaagaataattaattggggtcaatattttgatgtttaaggttagtgtcaagaccctcctacaaattttattgcttttattattaaatgaagtatgtactactgttttcgttttcatgcattgatgatgtaataaatacataatgtgggaaaataatttacacaattgcccacaaaatttcaaataaaaaagtgattttcctatttctcaaaaaatataagtaaaataagtagattctaagacaacatttcctatttctcaaagtaaattatttacaaacttataccgtaatataaaaaagtaaaattgattgagtaatataaaaagttaaggtaaagtaaagaaattgataagagtgctctatgtcatcgaccataatttatctagttgatagagcaagtgctttatgtcattttttgtttcatttttttgtttggttgtagattaaagtattagaatattgttctaataaaatgtctaatctacttttttggtagaatgattattctattttaaaatgaaaggaatgactattccaatgtaagatgaaaaaaaattaatattttttttattaattttaaatttgattccatttaccgagatttgcagaaactaaatatttgagaactaaaaaaataataaaatacagaaaataaagagatgaagattttttacgtgattagagtgttaattaaccttagtccacgagtcattctattagcctctaaagacatatatgatgtgtttacaatgttttgcaagaaactttactttgtactcttagtttctcttgaagaagaagattaagagtgatattggcagagcttcgactacttaggttgtaatcctcccttcttatggaaatagaacggtatttatagagtaggagcgggtatggacatgcccatgactcgccttggatttctgctcaaaggtgatcactaatagggtaaattacatacaaaatgagagctaactattgtatcccttagaaataattgtgcctatgcgtgctgcagctggataattgggggccatttgtatgttgtggacacgtgtctctataagtttaacctttaaaagtagagggcatgtgtcgctcaaagatttctcctttaaaagtagaggtctgatataaccgtcttgtaaaaaggtggacaaggtgcgcgcactacctgcctggacacgggggacaagatctgatcctatgtttgaaaaagcataaccgtcacttggtgatctggattgcacaaaaagtaaatgtctacgatactctcaggcggtatgtatccgcataggcccttcgagtactcatctgggtatcaattgggtaggcttccacatttggaccactccaagtccaagagacaacataacttttgtgttcgggaagctaattcatcgtacctcttcactactactcaggcagggactcttatcctaagttaaaaaaaagtaatatgaatacttttatataaataattcaatatataatttgcggtataaatatttaaatttaacttttagttacaaataaatacttaagtttaatttttggcaataataatacctaagttatatttttaaaactccgtaagtacttagtcattaaatgccaagtcattatctacgcgtcattgtttattgatatatttaaataattttttttataaaaataaaaatttaaagactcagactaattagagattggcacatgataatttacttaacacttaaccttagagttttatgccacaaattattctaatgttaatagtaatactaataataataaagaatgaaaagaaaaaaattagcacttgtaataaataaaaaaggtcaaatatcattttaaatttaatatattacaaaagttattaattaatatatgacaatttagatttattttgaatggtccttacactcaattttaagtaatttattttcttaatataaccaattggagtgtccaacatcaacaaatataaaaaatataaccagtttactaataatatttataggtaaaattattattaaattttcatttaataaaaataaatccataatttattttatactattttaaagaatatatgatgttaattatcattttaacaaaaaaaaattccagttgcaatacaaacctaaactaaaaatatttttaaaaaaacatatatatatatattattatataatttagcctcagattgaacctcaggtttatccctgaccagtttggtattgaaaaccctagaacctgtccttccacagaaactggtaattttttttttttttggattgagtttgttttttgtttagtggtactgtgaaccaagcttttggggctagccgtatctatatttattttgcgtttcttgaaatttcttctgtttttttctatggtggttttcactaattcataatgcgggtttttgtaacacaaggaaatttagagtgagcggaagtgttaataatggctgcgaaggaggattacagaatattcgtgggaggtttatcgtggaatgttacagagcgtcagcttgagaatgccttcgatcgttttggcaaagttctggaagctcaggtactttcttcttcttcttctcttgatgatttgaaggaaaatgtgaagtggaacgattactgctttcctttacaaaagaaagaaccaatttttgtataatgtaagtcgttgttcatagtaaatgggagattttagtagtttacatagctattatggtgtattattgatcgtttctctgctaaaacttgtgtgcaatatcggtataaagtactggctttttaatttttttttcttaaaatgaattttagttcactgcttaaggttatgaggtattgtgttccagtctgaaatctatgcataagttcatgcaattgtgctgtgttgggtgaaaataatgccccgtctgtcctctcatttcgaatacttgtgcttttgctttagtttcccttgcagggttctattatcttggctgcactttttttgtctacactgctctgtcttcttcttcctattgttgtttctcttttgaaaacatcaggtcttaaaagtcagttcccttctcaaacctgttattgcagaaataaggggtgtatgattttttttttttttgaataagggtgtaattgattttaaatattggtgtggttgtaattatttggagctcatttatctctaacaaaattttgataagaaaaaaaacttttatttaattaaacaaatgaacatataagatataagggtgaggtctccaccctgaggaaaaacatataatttatcaaactaaaacactagttttaaagaatttgaacatatgtaaacacctctaagcaaagtttgtatcctgctaagagtgttcaaagaaatgagcttttttttttctttcctttttatcattagtccctttcttgtcaaattttaagtttcctatcctttttgttttttccatatatttctgatattaatacttcttatttgtttcttgattttctggaatcttggttatgatcttctgagatgctgtagatggccttttttattaagataaacttgtatggaaatggctgcagcaagttgttgaagcataaatggttaggaatatagcagatgattttcttaagttgtgaaggcaagagttattgacatacagttatggtatttggaatcgtggaataagattctgggaaggcaataaaagttaatcaccttaatctgttattctgtttcatattgatttggcagaattagtacttaattcacgataggagctgtggtgtgaagattcagtagcttgaggctgtttgttcattaatggtctatttggtgtcattttgttatgctttttggagcatcctcactattgatatagtgccttgtcatcattagttattgtaatttagagcctgctacagtttgaagcttagttgattttgcacattatcttcggacgtgtcaaatacttgatgcttggcaatttagggataggggcttgggttcaaattggtcacattgtatgcattctcatagtttctggatcaagttggatgtggttttgcttatgaagcttgaggaaggtgcatgtataattgtcagtcagttctttatcaaggtagatatgtttttcatgactcagttagcctaagaggattgttcttatctgctaccagaaagcaatgaactgcttctcatttgcttttgtggaggctcgatgttatttgaattttgcttgacctactttttagaaaagaagttattcttggagtgctggaacaaacttaatgatctcttataacaaacaaagacccagccctgcttgtttagtggctaatttgttcggattcagtgtagataggattttgtcgatgacttgtgtgcctcaatttttgagctggttacagttatcttatgtaatgtcaggggactagagtcatttccttcgtttccctcaaattacatttttactcttgggaacttagtaattgagctatagtatactgctccttcagatcacatgcctctcgtcaggagttagcattatgttcttttagaaagattcattcccgagttgttatttctcatgggagagtgcaactttattgcaatactaaataatatggtatgctttctatcatagatgtgcatgtgccattcgtgatagatatttgacattctgtagtcaagcaagcattggccaacacaagtggttatgcagtatgttcaattgatggaaagacttagatgtataattgcttgagtctcaaacagctaaaaggggtcagggttattaacaacagcgtattggtgtttgggctgccttacaagattagtattttgaagcaaattcagcttgatattagtgtttggtttcactctcttgattttatattctctggaaaatatttccgttcacttgcttcctaaatcctctctgctttgctttgtatttgagcatgaacttaccaaatgaaccagaagcatgccttaccttcgtgctccactgaattgaattggtcgtttgcttcaagtgctaaaatatctgctcttgggttggtttgggtcagtcagttttaccacgcctcttttcagttgtttgacagtttactgactggcacagcgtaaagagtgattttaaaaagggctaacagtttcagagttgtagactcttcagttctgtgagcttaggatatgccctcgagaggttagagttgtacagaggcagagttttgaagaactcacaagttatagtcatttcttgactgttctttatgaaaatattcagtcactttgcttgcttgttctatcagtcctcctgggaaagcggcagaatcaacataaaacttttacccataatttttcgagctagagaagttttaagtaatgcattgggttcatgtacagtctttgtaatttagcaattacttcatatgaatgtctttattgtactggtccatagaaatttagcattaattgctgttttgaaaattgtacaaggttaaaagccgccatagatatcagtttctgtggggatcaaagttgcagctgggatgtaatactctagcaaaattgcttcttttagtaatctttccctgttatcatgatctgtcttaacttagaagttagaacaaataaaatgtaatttattggattgttacaataaataagctattcatattggttttgtgtgactttttggttttatcatacgatggaaagagatcagaattgatctcattggttttatccttttctaagtttcgagttggatgatgctacctatgtcatgtgcacacaggaacatattacataacatggtcttttctacactgttgtttagtctattgaagttgttttgtgttgttagtaattgagtatgaatatagaagcatgatttagttcttatgttttttttttcttttaaatcttcacctgcgagtgccaacacaactaaatttatgttatttaattatttttttttaaagaaaaactttattttgctgctccttgaaagcttttataaatttcatttagttagacgatttgtgtctagttttttttaatgttgatcagtttgttagaacattgttttctattacagctttaaacataagtttgcatgaagtttcttttaatatcgaaatcatgtttccattcttcctgtaaggtttattttgaatttgtttctgtcttatccattttcttttgcttgttatctctttccgtgtatattggtcgtagtaagttggtagcttctatattattgctggcatgagttgcagtactgtggaatttatgtagatcatgctggaaagagatactggccgtccacgtggatttgggtttataacattctcagaccgccggggaatggaagatgcaattagggagatgcatggaagggagcttggtgatcgagtcatctctgtgaacaaggcccaaccaaaaatgggtggcgatgatgatttggacagtggttttcggggaggctactcagctggtggcaggagaagctatggtggaggggataggtctgtaggacaagatgattgctttaaatgtgggcgcccaggacattgggcccgagattgcccttctgcaggtggtggtcgaggtggaggttcattctcatcgcattctaggtttggaggcggtggtgggcgtggggatcgttttggaggagaccgtgatcgatatgtagatgaccgttatggtgcaggccgctatggagagagggatcgctttgacagcagggacaacaaatatggaagccgtgatcgacatactagtgataggtatgaataatagtgattatttctatcttcagggcggagttgtcatctgctacggtctcttattctgacttgggttttcatttactgcaggtaccaaccagctgaccggttcccaaatgacaggtacaccggtggtgataggtacccacaaaatggttacgataaagataggaacttcgacggagatggtggtccacgaggtagtgacaaatatggaagtggtggagcagcacgtaatgagggaagaagttatcgaagtagggcgggtccttatgaccgcacaagtagggggggaagaccatcgcttttagattagtatgttatttcaaaattgtaactacatgcattatgaagttaggatctttgttttaattttctttaggatgataaagttgaaattccaatgtagttgaggattgatggatgatcttgaagcaatggttttagcctttccttttgcccttattaatggttagttttttcatgccaaaagttctaattgaaatgatgcctttgcttgctgaatgtataccgtataggtcatataatattttttatttagttaatttttttattcttctataattttatttaattttaaaatgatttatgaaaaaaatattaggtctacaaatataaacatatcacgtgtacaagtgtgtatacataagcatagtgaccattaatcggatcacatcaaatttgaacttagaaggttaagtgcaagtaaaataataattaggaggtaaataataacataagtatttaaagttttgaatttataagcgcataatcccaatgtttatttttaacgacataagttgtaaaactataatatataaggtctaaattcttaatca

SEQ ID NO: 15130 - DNA, 8259 bp, Cannabis sativa
ggattggatccaaaaaatgaaatccgcacttagtgcggatcagatgcactatgaacaaaatagtgcggattggattggataaacacccctatttagtgcacaatttgatatatactttggaatgaaattgtgtgcaaatttcacactaattttgaaaaaaaaaaagtgtactattacagattagagatgctgtaagataaaaatttcaccaacttttactttatttcacatctctcatcaggaaagaatttgttctttaaaaagaaatatattctgtaacaagctcccagttaccattacatctttatatattatcaacttaaaaaataaaacaaaactttaaaaacctttatcttatgatgattataacacttaaatttgtctatatataaatatataaatatatactttatttctcgtttgtttctgtagagatgtacaacaataaagaacattttttgttatgattttattagagctaaaaatagacctataatttgttttttagtacttgagttgagccgccttcatttacttattgactattctcaaaagtcaaatcctaaatgcaatttggatgtacttcatcaccaacttgaacccatatatcattgtcttgtacttgatctccatcactattctcatatctcaaaagtatcccaaacaagatctttccctgcaataatattgtaacacacacatatatatatatacatatatatactaatgagaaacaaaaacaaaaattacaacactagaactattattagtctatcatatcatgactactaaccttgtccctcctatatgatgctaaagtagccaaaggttcatttgatttttgtacttgtccatctctatgaacaatgttgatcatttgacaacgattgcatccacctaaagactgaaaacaaaaagctctttatttctaaaaaatgtttggcaatgttggtattagttgttatgcaaatataatatttaagcaatttatctggtaacttacactgaaatatttgttccggattctgagatttctccacccatcttcagcatatggttcccctcccgatatgactaggttaggccgaaatctcattggattgactttgaatgaaactccttcagtacccttttgcacatctcctgtaatcaattaacaagaggcaaaagttttagatttagtagtcaaataaaccaggaccatgtctgaaattttgatgtttcggtatcatgagaatgcatcgaaaggtgtgtgcatggtaggtataatggccaatggctagaaaacaagttcaaatttatagaaccacagaagtacttcctttgagagccctgcaatgtggttcatttccgagttgggagagttgatcttgaaccaaaattcagttagcaaggagggggagaaagaaaaagaaacaactactaataatatcaccagataactccagatatccctatacatcaagtcatatagacaaatcaatgcacattggaaaatgtatttattgactatcatgtgagagagaaagagtatagtaatacatacttgtacttattctgttgttgagatcaaatatgctttcttctgatattaataagaactgagcttcatttgcaaaatttgatatactttgctcagctatgcacatgccaatgtttttgttcttattcatacaaaaattgtaattggaactagaacagcgggataaagtgcatggtcggtcaagggcagtgctgaaccaactattgacttcattgtcgtaaccttgaacttcacatctaatgagaaaaaatataagttcagctatgaaaggggacttgtaatataaattgagatgaggactgattttaaacatgaaatatattgcattcaacactctttccagtcatcatgtcaaagagaaaattgggaattcattctcaaacagcatgaacttaaagcacaccaatcgttaatgaattttcgatgatattacataaatccaaacggttcagctcaacaagtttcatgaagatacagtaatcacctaaaaacacagttctttagcatattagagtcaatcatatagtttgtcaggatactcttaattactagatatctgaatgttttaaactctgcaactcatttcttatgaaaatcatgtataaggatcatatgctttacaagataaagcaacaatcacttgttatataacacattgtaccttacctctgcccgtggacattaatttcgtttctcacaccattatctgaatctgaaataagtttgatagccagcctcactttacagcgtggggactctacatacaatattccaagattgaggtcgacaaaagtacttacaaagcacatttcagggacctagaaattaatttcaatgaataaaaacacggatatcaaccatgaggtaaattggacttataaacaaaataaagtgaccctagctatatattaaataagtttccaagtacacaatatgattaatagatccgaaactgtgtgtgcacagaagaacgtaaactttaccttcttttgtgtaagaacttcaccagtaaggcttgtaagaagccattcacggtcgtaccgtagacctgcacacaatcacagtaggctataataaaagtatatttgaatcactggtagttgaaaaccaatggttgtaagatgcataatgcttcaacaaaagacaaagtaggtgtagaaatgtcctcgataaagaatataccacttgtgtttcttgaaatttattgacacaggaagtggagtaaacggttatgtatgtatgtatttgtttccctcacattttaagaagttgaatacaaataaaacgatcaacctctgtcacttagcaagaaaatcatttttgactaaattctcaagtgtgcgtacatctttctttgttttccatatttctaatcttttattcttactacttccaaaagtacatctttctaatctttccatatttcatactttatcacatttgattcaagtcacaatggcaggcaagatatgcaccatggttaaaagaaagtagagaaggactacctaccattattgcttagaggccaactttctgcgctaaatcctgcacatgatttgattgggtagataataatagatctgaggccaattttagcaattgggagactggcttcatcatctatgagagaattagatgtcaaatacaattatatatcacaaaacacagcaagcatttaagcattcatgtttatcacttcacttagattatataattcatactgctaagttaaaaaataaaacaatagaacaaaaagcagctccatggcctctatgtgctacacttgcacacttccaacttatattaccaacattcatcaatagaagataatgaggtagagcatataatgaaccttgcttgtacaatcttgcagtttgatttggtaatgctacaaaggaatctttaatgaaatcaacaaatttctgcaaatacaaagagaacaaaaggtccattagacggaaagaatactaacggctaagatgaacttcttttgatatgtattcattgcatcctacaaaagcataattagcaagtgtcctactagatgaaatcacagtttctaatatgtttatatattgacctcaattcacaactaaagtttaaatatatgaaactgaagtgtagtactttaccttggcatcttcgtatgttgacatatagccaaaggacactctcactgctccagttggcttcccatgaactatgtcataatcatcccagcaaacatggccagcctaagaaaaccaaatacaactatcaacaatgtatgccattcggatactaatataagcattagaaacatacacaaaatacagcaatgatgaaagttactgatgaagactctgaattacctcaatatttgagagaagatccgtgtgagataatccaagatattttgcacatgcaccagggttgcaaaaacaacctgtctatagaagagtggggttagcgcaccgccactgtcattcaaatagagtcatactgcttacttttagagtaacaataacaaaggtgattgcatacagaatcttctgttaaaaaagtgagattaaaatagtattaaacaaaagggtaataatttgcatcgttaataaaacaatgcaaaatatatctagagacccaaacctcaaaatcttagagaacgacaaacaacaaaagcacttcaatagtaataagtactgcaagggaattatgtaacatatattgactcataatggcagccatatcagttatgcaatatcagagtaccatgcctataaattgttgttcgcaaaggcgttttccactagactaaataaagcaatacttggaatcaattttgtatgcaaaggcaagaggggaaaacaaataaatatgtatctaatatatgaatttaagaattgataactatggaagaaagcaagttagaatttctgactcgtacccgtaattggattcctgacaaagatgctagtttttcaacttcacggtatccataccaagaaccatctggccttttcaaattgaatgagattattgggccaagttcatgatgtaaaacctaacaaaataaggttcatatgtaagattggtttccattgcaaaccagaaaaactgaccccaaaagaaaaaaggcatgaggaaataaaataaaagcacttaaaattaaaaaatggccagataaaaatatactaaatagaattacctagcccaaaataataatccatattctgaagtttttacacaatcctaacatgacaaatgataagcgagacattcaattagatttagtacttcaaacaattatatctttcccatcactccactcattaaagagttgatctttagtctatatcctaccatgttacttcagcaagatagtacttgatttacagtgtgtgtgagcatgtgtgacatttaattacttccaaccaacctttgatgctgaagttccataaagtttgcaaacgctgattccattttcatgttgtaaggacagtagtacctttcgcacatacctagcgagtgaggttgtatgccttcaaagagaaaaatgttcaataaactttagagcatgcttattttactattagaccatatacagtataaataaatacatacaaatgtccatatatgtaaaaggagcattgagtttttagtgcatttgctgatacattgatctttggcaagaaaactatggtgcagactgttggaagaagacatttgttctttgtgttatagtattaaattatgagtggctttatggtttgatgatactaaagaattttaaaatctactgttttcagatttggggagagggtggagttctgtccttcaatttttattttctatatatgggggcatcatacccctgaattttgttcatactgatttatgattataagcagttcctgtttcttaaaacaaaatgcacaaatacatacattaagtgtatatccaatagtctgtgagcatatacttacatatggatatcagtgactgcatgtacatacatttgttgagttaagaggaaagcatcaagaagaatcacagtaactaacagaagaggaaagaaggtgcatgcatgtacacaaaagaagagttcatttttgtcattagagacttaatggaagaatgaagtaaaactttattacttactggtttatggcagaaatggtaagggaattgagaattttaaacccatggctaagagatgcaatgcttagaaaagaaacggtcccatcctcaaacagctcctcaatgccttttcttcttataacaaagtcaatatcagcaatagacgcagcaactgtgcctgtaatatcttattacagttagcataggtattaattaaagaattattaatctctttttataagtaaataaaataaagcattgattaagagcaagatatgcagaaaccaacctccactaaagtaggtcttcttcaataattttgcagcatctgtcattagatgatgaaaacgcgacttataaataagcataaggctattatacatagatattatatccagccaaatcgaggataaaaaagagagaacaaagacctaaagccaataggttagaaaaaaaactaaaaactaaattttcataagagaagctcactgcttaccatttcgaacaatgagagctccaattccagttggatacccaaatagctttatccaaaaacatgtgcatacaaacaaaaacagaagcttaagcatcaaattaaaagaaaacagtttcttagagtgaattcaaaaagatacatagagaaataccttatacatagataaaacaacaaaatctgctgaatactgggataaatctggtggttccgtagcacctccttttgcagcatcaatcaaaaccatccaatgcccactaattgtgacacaaaaagaaaacaaagacactaaattaaaaagtattacacagttattatgctcacttatctatcagcaaatctattgaatgcaagaaaaacactctcagcttaagaatatggtatgatttatatacttgcagaacggcgagccttccaaaattctagcagaatcttctttcatcctcttcaccaaattaaggttgaacctcgagcctgagaaattgcattctgatggaaaggcaaataagttatacgcattacctgcacaagttaaaagtacatgatgaaattaattgccggatcataatatggtttgtaagaagccccagagcattatttaccaacttccaaaacagtccatatgtaaatctgaaataacagaccaaaaatgagtctgtcaatatgcaaatttgataacaactaggtcattctagaagtaattattctgtcatcttcagctataatcagctataaatcataagtgccaaaaattgagtgaaagaaacctatgcagcttttcacctacctatagaatatttctgtgttgattatgaatttcttaaaggtttatagtcacccaaaaagccagaacacattgattccatcaaatatagtcagaatctatcatctacaatcgcataactattaacctatagcttaactacaacaactcactgctaggtataataggcatcaaaatttcacaattcaaatcccttctatggtaacttacctgttcgttcctcctgaagaaatttagcctcatttctccgttgtacctggtgctgtaatattctcatagatgtgctatcatgtgcatcctcttcaatgtctattgcaaaagctgcagctccttgttttaaagcatatctaaagcttattaagggctacaaaccaagaaatcccaaattcatagtaaaatgaaaagggaaaggatacaacaagatcaaaggattcatgattggggaaaataatagaggtaagatcataccctacactgcacaccaaaaagtttgacactctatctttgttaggagatttaaaataaaaacaagttagtataggaatcataggatactctctaatcccaaggacactattgtgattctcaattgtgtacatataacaactttcatgactccatggaaaagcctctcctaccaacttcaaagccgcagtcgccccagatgtgaatatgcagctgtactctttaggagaagctttgcaaaagtccagtacctgtatgagagaaaaacaaaaggtctaacaataaccacagctcatacaatacaaattgtcattcacacagtttccctactctggcacagagaatcttcacaatcattatttttatacactcacagactacaattgtaaagctgaattcttggagtatcataaggacttggaattaacacaaaaaagtaaaagagaacgaaacacaaaagaatagtacctgttgacgggcttccctaactatatcagaagtggcagagctagaatcactttggctatctatatttcacttaaggatctcaacagaataggaacatgaacaatctgaaagaataggagtacagcccttaatgaaaaacattagcaccacaagaatgaaggtgaaaaccatcacaatggaattaattagtaattataaaaaacaatgagtggatacaaacgcaaaaaacataaacaactcctaaaaccttcatataatcaagaactataagaattaagaatgaatgagagtaatgaattttgacttaaattgacatgaatgaccctaaaaatgtgaaagtacccagctccagacccagaaccaatttgaaagaaaattcaaatgctatca

SEQ ID NO: 15131 - DNA, 6136 bp, Cannabis sativa
tgattcatcactaactgagtattacgaggtaattcttcaatgctgtgcattacgaggttattcatcactggttgtgcattacgatgtgatactgctgtgtattacgagatgattcatcagtagctgtgtattacaaggtgattcatcattggtcatgtattacgagatgatacatcactgtaaaaaaattaggtttgaatccctaattcttgtttagtttgaataaatattaaaaacttctaactaaatctcatttaattagtaaatctaaatgatagaatttttaattcaattaatattttgtgtagaaatattttataagtcatttgtattaacttataaatattatttattaagaataaataattaaacatttaatcttttgattttaaaagtatactttaagcattgaagtccttatttagtaaagttaactttgcacatattaattgaaataactatttatttaaaaaaaaatgtatgataaacgaaagagaaaataagaattatatactgagataataaattaaaatgtaatgtctttaaacaaaaattcttaaactaagactaaattagactccttcaatgcacttctaaaatctcctccaactggaactttgaagaagtctcacttctttaaatcatcttcgtagattctgaaatttaaaagtaagagaaaatattgttagcggcaaagaataatccattccactgatataatagggatattgtgtaaatcaaatttacctcatcctattatgttgcgattctgtcaaaatattcaacttgttttgaagaacatttcaatcttgaactaattatttatgagcgacaccgtactagttgtgacgtgccttccagatatcacaggcgtagacaaaagtctcatatttttctctgagctcttcatttaatgaagtcatcaagatatactttacacactatttctttctttccattgtgcaaaggcattcctggctacacgacctgattgttcacgtacttctagccatgggtcttgttcggatactagttcatataagttgtctttgagaattagaagttctatatctactctccagtcgtatgttataattttttagggataattttcaatgctatattgttggtgtgccattttattattattattaaactaaaataaactaaataaagaaaaattggagcaataggatataaacacaatataagtattataaataaaataaataaatatcaagttcgaaatctagatatgatgcatgagcacatttagaaaacacataaaataatttagaaatttgacgataagattatcaaaagattaaagttccacattagggtcggtcaaattaatattgaataaactataagataagttctataactagaatagctattattttttctaaaaaaatatgtatctcttgtttggccaagtgatgtcccttagcatcaaagacaaggacattactttgtgagtgtaacccattattttagattccatgacataacttagtagcgccgctttaggaacaagatcgcactaaaatacatcacattgtcctatcctaaagaggaagccaaccttgatgatgtataattcaacaccttccttagggggggcaaaaacaaagtcatctcgaggccctccccatacgcgtaatattggactaatagtggagaccatagatttcataacagatgacaaccctctcccactcactatttgattatatgtttgtcgttattaaaattgtttcaaaaagattttaatttctaaaatttatccacttgtaatacattaattaaattaatatattataagcttgaaaatagtttaattaaaatcatattacataaataatttttgaaaaactatttaacaaaataaagtgggttaacattgtgactaactaaaggaggtgtgaattaccaggttatttaaactatttaaaatgaaacctaatattttatgtttatccattttactaaattcaatacacaaaaattatataggacaatcctaaataatcatgtttctataaataacatccatgataatcataaagccaagctgtgtggaattttaagtatggaaaatatatatattcatgcactaatcaactattaaccaaataattaaaaaaaattaaataatatataaactaattaaattttgagtatttctaaaattacaacacttgaagtaaaagaaataaactactaattgaatttgttgccgctttaggaactcttcttgtctctttctctctcttttgtccaatccttgtagccttaagaattctcaccataacctcgtaccaccatcatagattggaaatcaattttctaatttttacgtgattttgtagttaaaatctacataattcacgagtcagcattatttttgattattcttttatagtatttctgaatacaagataatatatctagacatttccaatacttaatctgttagagtcttctttttcccaaaaagattattctttccatctttgtaggttttgttcctatttataggattcttagaaatgacagttattccttttctatcttatctagataattatttatgaaatgtggaccattctcacattttatatttacaacatatgggataaataaattaactattgataaccttatttttgtctttatcaaaaagaagtttcagagataatatacaaaaaatattcctcacattcttcaataatatttcaaaataactgggtgtattccgtgagatgatagttgaggtattttccttgctttttctatctgtgacaagtcttgtgatagcctttaagattgtatcttttgtatcccttagggtcaatcctttcgcgtcatgtatgaacattctaagatggatcgtatttttctcatatctcttagtctttcaacatactcatgagtatgtggatcaatgatctgcaagctcctaaagaactcattatctaccatttctagtgtttcatccctttgtactctattcacttcctgtttatctcggtcaagtttgagatggccttatgatgttgtgttcttgctaattgttgtatttataactttatcacttttattggataaccatattataatacaatgcgagacaaatgcatcattaatttcaacacatccaaatgtgagaaacttatttcattcctcacgtttatatttttcctcaatctttgagactcatatccacgtgttgtgtcaatatttaatgctcgaaatatgggtgtaacaattgcccctaaaaagttttttttttcattttttaaaaataattttcaatcatgattaccatttgttattttgtgtattgaggaagtttcttgaattttttcttttggcgatttttatcttcctaataaagagctaatcatgaattttgcaataaattcttgtcttttcaactaacttgtaagttgaattacccttaattaaattttcatttaataaaatggtgcttacaatattgttaaaagacggacattttcatccctcatcaccatttccatcactattttctaagaaaagaagaagaacagaaatcagagtttcctcttttcacttttctatatgtatgccctcttggtctcttcactattttttttttttactttctacaaccattttttcaaaacccaagaaacacttcatttcttacccttggatacgtcgagctttagggaaaacttcgtcaaatgcatcatcaatctctgatcacggtaggtttttcttatccccttgatgtaaattttatgatatgtttcgtttcttaaacttatgattttaatagggtttttaatctgatttgagttagctggggattttagttatttttaggatctttgtaactctagatttctttatttcaaattatgtggagttttttcaaggtagttttctcttttttaaaagaagaaaaataaatctctctgaccttgactttgaaaacctagaatttttagatcttgaaattcacttttcttttgccttaccctttaagccaaatcttgaaatccctaaaacaaaactcaaggaaaatgatgtgaaaattcgtgaacacactgagaggttaaaaagctagatgtttctactcaatttagttgattcataaatgaaattattgaaggtaaatggtcttgtttgcgagaagccccctagcccgagcctctttattttattaaataacctttggccaaatctttgtttttacccctcgttaatgttacttttttgctaggtactttagatattcaacttatggccccttcaaaatcttcctaacctaaactaccctaaaatctcactgtgcaattcaaagctgaattttttgaatcaaaagtaacttctatggccccgcatgtcggtctttctttacaatcatgtggcattaaataaggcgacagttttctatgttggtcagttgagaaatacaagaagagttgatttctacctagtcaacttgctagtaactcagagtgtagtatgagcgactctgtaagaattggggcttggagtgttgaacacgtaagtgttggggctatccttcctttaaagatctattttaaagattactgcaattatgttaggatttccctattctagttgattcctaatggttataggattttagattctcataggtccttatacatatattgggatgggaaggtcttgaaccatacaagatcactttaatgtacaccctcaaagcaactcctacaaggaagaattgttccagaggctttttctacctcaaaatttacataggtgatcgcaaagttattgtcaatcaccctaacaagaaagaattgaaggactgattcttttggactactgaactacatccttgtccccatacattttttcaaaaaccttgcaagtttaacaaatcactttatctgtttctcttaagataattttcttgcatttatttcaatctcacagcctcctttttactttgacagtgatgatgctaaaacctattccatctaaaattatgtcacaacatcatcaaattctagtgaattttacatttagaatgagggcatcaattttccttcttcaggagccaaacctagtatcatgtgggttgcttggaagggatcagtctaccatggacacaaaagaataaaaactatcttcttggtcatcagtgagggtccccctcaaggaagaagatcaagactgagctgcttgcactgctcttatcaaagccaccatccctcaggaagccacccatactcctgaaggggctccccgaggtacgattaacaatttttatggggggtcttgaactgttctcaaagttaattgaacttgtctagttaaattttctgatagccaataaaactttttcacgttcacgttaatttaacttgtctagttaaattatgctgactttatcacccataggtttgataattggtatcctaaattccacattcaagttaatagcaacaactcatattatggtaactcagaccaatatagcagtaatgtgtactgggcaaaaacttgggatcttaacccaattaacattttatatatttgtgagaaaattggctctagagagtaaatagatactcgagtttatccaccttcaactaacttttcagatagtattttagatgagacttatcggttttccctttatgtgccttaccaattttatctctagtttttcttatctctcacatattgattttttgtacaaatggtcaatttttcttaacttttttggagcccaaccaatcttccaatgaaaaagggtaagaaacaaagcaaaaacgagagtgatggagccttgaagcataaaacagctctgaagaaacataaatttgaccctcatgctgcaaatttttccaaggatcaaaactactcgttgtccaaagaccttctaacttctagcttgttgacctcaaaaagtggtcaattaatagcggggttgtatgaatctaatgtttgtaacgtgttacagaattagaatgatattgtaataccctggaattaagaaaacagattagcaaaactctaactagttaattgagtattattgtggaattatattattatataatttattatatgtaaattaata

SEQ ID NO: 15132 - DNA, 10890 bp, Cannabis sativa
tacgtgggactgcaaattgtgaaaattatgtcttttttttttttgttttgggtattgagtctaaaatttgaatatagatgattcagatgatattttaatattaacttatttttatacaaaattagtatttagctgaaaacgcaacctttttttagcgatattacacataatacatgccaagtcattatttctaaataaagaaggtattatattttatttcaatgttaattaatcgcacatcaattatttttctgaaattcacaaaatttagccgaaatcaggaaaaaccaaatacgatgataaattattaaggttaagattcagatgttctgagatggaaggtgatgtttccatttctctattcaatcctgaaccctaacatctcaaaccaattcatcttcttcctaattcatattattattattacttattattattttctattcgtctcttttctgtccctttcatccaatctctcgagccgtaatttgtgttgaaattttctgtacgagaccatgaatatggggttgtttttctggctctttctcttgagtggcttcaccgtgagtcttgccaatgtagtcctccttgggaagaatgtcacactttctttcggggacattgaagccaatttcgctcctgcaataaagggttctggggaatgtggaattatgtatttggctgagcctctaaatgcctgctcacccttgagtaatcaacttcaatccattaacaatagctcttctccatttgtgctgatcattagaggaggttgcagttttgagaataaagttcgaacagctcaaaaagcaggattcaaagctgcaatcatctatgacaatgaagatggtggagtcttagttgctatggctggaaattcagctggtataaaagtccatgctgtctttatttcgaaagcttctggtgagaaactagagagatatgctggcaatacagatatagagttgtgtctaatcccaagttttgagaattcagcatggtcagttatggcaatatccttcatttctttgctagcaatgtctgctgtcctggctacatgtttctttgttcgcaagcatcgaatacgaagagaacgacctcgagcttctcgtgtcagagaatttcatgggatgagtagtcgtttggtgaaagcaatgccaagtttgatatttactgttgtttcagaagataattgtacttcagcaacatgtgccatttgtcttgaagactacagtgttggagagaagctgaggattctgccatgtcgtcacaaatttcatgcgttttgtgtggattcctggcttacaacatggaggactttttgcccagtttgcaaacgtgatgcaagaactagcacaagcaatccaccagcttcggaatctacgccgctgctttcatccagccatgtttctttagcttcctcatctgtactgtcgtcaatgagatcatcttttgcatcctcctcagccatacaaattggctcctccatatcgcgttccccttctctttctcgtcctcactctcttgcaagcacttcctattcttctcagcaccctcttaggccctaccaccaatccccctccttaagcagaggctcaatggatctccagaatgcatcttcccaaagatctcatgcttatttgatttcaagccactccttgggttttccatcgttatcatcccttaactcaagatacctgtcttcacacattccaagccccagcaatgcctccccagcgtcaccgccttttgtgagatcatctacttatcaacagaatttgttgcactgcagcgattctgctgcaagtttctcctcattcacttctgcacaatccctacctgattgttgaattaaaccttcttcttgataagtaatgcaggtcgagttcataaaaataagtgtgcaaacgtttgcaaatttccagggaaaggtacttgacaaaaaggtgagaaggcagctaccaagtcacttgtgctccatagtccgtaccacattaccagcccttatttgcatatggttgagttacatctaattcactggctggttaacggtgcgtatgttaaaactctagtgtcacattcggtaattaattctggtttaaaagacagttctggttcttatatcagaaacataacaaagaaaatctctgaatgtaacgcaatccattggttttgttaatatttatgtttcgatcgtgtattttcttttctttctttttaaatggcacatagaacattaatcacagtatagtaagtaattcaatacaacgtaataagaagaatatattaagctaaatcaccatagcgaatttacaataattatataacttgattattggtgcagtgcattatgctatatggaaacattgtgcaacttgacagagtgctacatcactaataatctaacaattacatcaaaaacaaaaaataaaagctctaccaaagatttacaattgaacccgtgaaacaccactcacttgttctgcttcgctgaaacagcagtcctttgaacagtagacacaccgtccacaaattttgtccgaaagagaacattagcattattgaacatgccttctttcaatgaaactacgatgaactgcattttttgtttttgaaaaaagaaaattagtaaaacgtacgagtcattctattattattaggcatggcatcttacacttcagttctgtttagcctaagagtttttaatgcaacagattgaataatatgaatgatgtttaggcttaagacttgcaaatttcaaataagaattttaacagattgaggtcaatttaatcttgtgactgaatcacacaactaaattgaacattaaattgatactgagtaactaaggaaactcagggaaaatgacaacagcgcaaaaccaggtgagagactctgcaaacctgagagtgtgggaaatgagctttgatcattctccctatgttctgtgtgtggcttagatcaagagcagcatcaacctgtcaaaaacagaaaactagtataatacgtacccaaaacaattttttgagataaacctgtgtagaaactagagtagtgttcttatggacattctctactctgctaataacttttttttttgaaactaggctccccgcctaatcctataatatttggggaccaaaaaactatagtaattgccatgtaggtacccaaaagggactcagacctcagactttgtgggagcaaaccacatgcctgaccatttgagctacccctcttaggttacactgctagtaactttgtcacaacagataataacttttgaagaaaaagctaaccatacctcatcgagaatataaagtggagctggtttgaaaagaagcaatgccaatattagagagagtgcaagtagagatcgttgacctccactcagttctgataaggactgtttccagactccaccaaatgcaacacgtacctcaaggccatcaagaaatgtgcccccctcaggaggctctagctttgccatggtgccaggcaaaagggtagagaaaattgatccaaagtcactgaattgaatgttaaatggagtgagtgataaacaaggcaaatagaagtgcaaaacaactaatataaagtttcagatcaaattattattgaaaatactaacgtgttaactttgacccaggtaactttcagtgtttccttctttttctcatctagttcttcaatcaccttctttattttagatttgtcattctaggcaagaaagcttagataagtaacgtgaaatcagtataacagctattgaaaactcgaaagataaaaccaccaacctcaataatgtttttctttgacattaagtcattgtactcatcttctgctttctcaaacattgccattacttttttgttgatccttttctcaagcctacacaagaaagaaagtcacctcttgccgtcattaagacattattaacagtatccatgtaaagttgagtatgagatctcaatctaaacatcaggttcacaggagggaaagaacgaaaaaagagagacaaaccctgattgctcagcctgaagtttctcaagttcttcccttgctttataaggatcacgagatgcaaaatcataatcagtcccattttttccaaataactgcttctcagaagcaatccatgcatgcttctcaatcaatctgtccacctttgtagagcaatctttttgttccatctccattcgctttacctaagacaagtttcaaaataaatttaatcagcaattacatagaataatgaaagcaatgacaacttaagaggttgtttggcgccataatttaaaaaatattttttgaacacaagtagaggtgttcggcactgttctcaaaagaaccatttttaaaaacaaagttacaaaaaaaggaaattttgagaacaaaatgttgttttctagacttttcatcacttttctttcaaattattttgtcttattattagaaacttttaaaatatttatctgtctataaatatataattaattttttatttgaaaaaaaaaaagaactacaaaaacggttttaggttctcatttcttaaaacacattttcaaaacaaaaaacagaagacaatgtaaaacaagctcttacaaatcacctcattttccattttcttcttttcaagacttgtctcactaagtttatgttggagtttttgctgtgccttaataatactactgatttgtgaatcacattccttcatctttttacgagccaaatcaagctcatcttgtgccttggcaagaatgttcctcgtggaattgacctgcaaaacataaggcatgcattatgaattcatcacacaaaagaactggtaaaccaaagtctataccttctctttctgttcttctgcttctgatctgagattgtcaatttgtgttctcaaagaagacagttgagactccaaagttgcacattcttccacaactgcttccatttccataataagtttttccttttcattctcatgtccctggccatgtgcaatcacaccataacatatcaaagagctaggacgaacacttgtccatgaaatgctactaataaagcacataactcatgtcataaaataaaaaagaataatgccaagctgtcatttcatagcatttagattcaggaagtcagaataatattgacctcccagaaactcagactatgtgatcattcaaagcatttttatgttcagctcaattaaaagaaacactaaacgcataccataatttgtgataaaacgagggaatgagctcaacaataattccgtgaaattgaaaagcatatgacctcaacagaatctcatctctaatactattttataacatggaaaaactaacacctaccttaagatcctttgcagctgactgcatttgggattttgtagttttgatccttttctccaaatctttgagtctaccctcacgattgttatcatggtctttgattgatttctcaagtactgagactttatttacacaattttcatacaagagttgcttttctgtggcagaagattttgcctcttcaagctcctgctccaacttctttactaattcaccaagctaggtggcacatgccaaaaccacagagcaaacaaaatgagataatgtccaaataatgtctttcggtaaataaatacaaggtggtgaaaaaccttatgatgctcattttgctcagccctgccttggaataatgaaaggtcatacaatttaagctctaactgtgatttaaggtccatgaacttcttctgaagaggcagaagctcagtgatctgcaatttaaaaaagtaaatgtataagtgggcgtgcataagcaattaagaataatattgatcacattaaaaataataataataacaaaaaaacataaattgaccaatattatcatcaaacacgccatatgagaagacctaaagtgctttaatgagtatgtgagtagtctgagtcaaagtcccaataaatggatttcttgaaattaaaaacaataagaatatgcacccatccccaaaaatagtgaataatttcaccaagaaagcgcatgtaacgccaaaatacaatgagggaaaaaataatcaaaagcagaaataaaattaataaaaaaggcaatctcaaaccccaaatcaggaatacagaatgttgaaaaagaaaatatcatgtacttaaggacgcacaaagcaatagtcgatgatcatttcgaaaacatggtacgcaaatgatataatttttcacaattcacgagaagccaagacaagcaaaatgtcaccacctagttgaattaaacaagaaaacatatcttgagtatcctatttaccactatcatctaaaaaatgaggtactaaatagttacccttgcttcaatttcagccagccttttctgatgtacagagagatttatctcagcttcagcaagattgtgaagttgccgtaacaaatcgccaccacccctgtaatgctagatgtattaaaagggactatattctgcaaactgaattagaatggcatgtgtaacttacctgcggcttcccccagtcaaaaggccactagggttgaatatatcaccttcaagagtgacacttggggtgcgaatttccctgctaaaagcaacctgcaaaaatttattaggtaggtaaaatcagaactaagaatatgattttgctagttggactttgtaccatagtattatccaataattgcacatttgaagtaagcctggaatgctaatacactgatcaagagcactagatcattcaaaccaatccacttatgacaatgtaaaataaatgactactacaattcaaatagcactgttccagaaatgacatgtgaacatggtatcaaagataaatatacctccttggcagcatcagtagttttgcaaacaaatgttgaaccaaaaacatattccattgcaacctgtataagaaaaaatagattaaaaaaaatctttaggaaatataattttcaaaaatattgcattagaataatgtatttctaacaattctacagaaagcacaagacgctgcataaaatataccatcaaagaatactatctgatgtcatttaacagtagcaaatgaacttttaccttcaactcttcatcatacccaaccaaagaaagtgccaattctgcattctcctttccaacctaaaaaagtataacagaacttgtcaagcaaaagacaaataaacaccatcatagcatataaaaaagctaagagagaacaatgagtttgatgcaaaactaaccagtctgacagcagcttttcgaactctgtctggaacagtgtgtgcttgtattttgttcaaaggtataatagttactcttcttcgaagttcaccattctgaagaagttgttttccagtattttctgtgtccacgacaacattaaacaactttccagcagccgctacctgtatatttaatcaacattagagtcaaagatccagaatatgtgaccattttttaacattacataagatcaaataaatgactgacctctaaggcagtcatcgcagagctatccttcactttaataagtttagcaacaacacctttcacctttgatctatcaaaattccttacaggatcacgatatgtgaattgaacattagctaattgggctgaaagatttcgtatctcatccttcaacttctgcacccactctagctcagatgcacggtcctgtagcaaaataaatgtttaaaaacaaatcaaactggatacatgcaaacatgtataaaataccaaatataaaatatacttgatagccaaactagttaaatattcaagtgtcttgaattacataggcaaaatgctatggtttgataaaatgcttactttttgtaaaacttccatctgaccctccttatatggaagagactctaatgtttttttgacattctccacatctttctttctattactaagttccttttctactgaaacagcttcatcgcgctttgacattagctgatgtgttttttctttcaactccttttcacaatggcttattttggttttgagctgcttcatttctgtttcagcactcccaacagctaccttagcatcagacagctgatctcccagacttttctcctcatctccactactcttgccagcaacgacaccctagccattatcattgaaacaataatcattagcacaaaaagatgatgcccttgttatttagtgcaaaaaacaccactaaagcgctatctacctggtattccttttcatactcttctaaaccctgagaaagttctgccaccttcttcttcaaatcagctgctccttcatcagctcttcttacagctgaagccctttcttctactgattgcttcaaatcctcaatattgctaacaatctgaaaacatcaagatgaaacatcaaacaatagattgacccaacaggagaaaatctaagaaagcaaaaaaaatatctacaaaatacattattagaatcagcaggtctataagtactgaagatgtatttagaactcaagtcaattgttgataaaggctaataaccttttgagcatttttattttcagtcttgaaattatcttctttactgttcagcacggaagtttctctcacaagatcttgagaaagtgcatctactttgtcagacaatgtttttacttcaccacccatactggcttccttttgggttgttaactctgccactttagtttccatctcttgtatttctgcctgcatcattcctgtattgtcatcaatctcagcaatatgggccttcacttgctcaacctcatgaaccgcagtgtctcttatcttctcagcttgaacatagtcataagcaatacaaaaccttttaagtcgatctaactcggcattaccattagcccattgcatgtattgtgtcctctctctcctcagcttttcaagagcaggcagtatttcctgatcaagaaggttattaatctcatcaaccttactttgcttcttctcaagagttttcaaagctgcatctttctttgtttcatacattcttgtcccagcagcctcttcaagcatagacaaaatctcagggggtttcatgtttaaaacctttgtaattcggccttgcataatgagaaaatgtgggttgttcacattaagctgcactgaatgaaaaagattctgaacctgactaggctgggcaagtttcccatttattaaatacttgtttcttccaccgaccacaatctgtataaatattcaaatagttaactgaatttaattaaagtagtgctcatttccagcctcatcaaagacgtacaccaaaaactcaattattgataaaagcacatccttaactccatatgatacgttgaaaaacaagaataaacacaaacagacaacatcacttttgacatttaagaaaactacggtacttctattaagttagaaagggtagaaataaagaaaatcaaatcaaattccaaatgactatagatatatagatatagaaataaaaataagagaaacatgtagctataaaatccccaacttccaatgctctccccattaaagctttcggaaagaaaaaaaagcaccatgtatacaaaccctaaaagttagctacaacggtcgcagcgtacctgacgagtgactgttatctctgaatggtcctcgtacccgagagggcttcggttccgatccgaattgtcgaaaacaatagagacagtggccttcgtaatacccgcttgtccttgcttgtaaacaagttcttggagattggaagcccggacctgctgcaaattggtaatccccaatacgaagcagatggaatcgaggatgttggactttccagagccattgagaccagtgatagcgttgaagaatgggtcgaagcccggaaccactgtcctcgtcgcgtaagacttgaaaccctccaagcatacctcctttatgtacatttctttgacccaattagagtgccgagaaatccagaaattgaccggagtcggaggaagaagacgaagaatcgaagtataaacctatggggcggagagtggagtgggatgagccagtgattttgcgagatcgtagagctctcttttgctctctctttctctgtccgagggttcgaaattgaactggaagcgccaaaaagtgactgaaatgttatggatctgctgaggcgggaaagttggagagtgatgctgttcgaaatagccgacacgtcgttttgccttacaagtttcattgtcgtttaccactaaaacgacagaacagctgatctaagaaaatgattttttttttacaatattatttgttatggtgctacaaatacaatgcacaataacagcatattgccaattatgacaaaaagtgaaatattattgataattactaataaattaaatttttttaaaataattaataataacatcttacctaatatataaaatatctatctaaccttattttattggtacttaacagattatttatttaacagaatattccaaaaaaaagaaatgattaacgttaacaaacacctattctatttacaaagattattcacagaccaagagaaccattcacaaacacccattcgcatcctattctcttgcacaagtatcaggaacactttttgtatatacatataaaggtgtcaaaaaaactaataataataaaaaaaaaaaaaaaattgcacaactaggaaaagttagtagaaagcaaaaaagaatgaagaaaaatggtggaaatagaacttgcagccatgaaaatagaaaggaattttaactgctacaaaacttttctgattttttttttaagaaggtgatttaagaatatatataatttatatgtctctatataatgtatctctcttctttgttttgttctttttacagagtaaataccaaagattttg

SEQ ID NO: 15133 - DNA, 10564 bp, Cannabis sativa
actgtgtcatcttctctaagttgccatactcgaaaaacacatactggagatgagtttgcaagaaaatctgagaagggtctgaactgaattaatcataatttaaagtcatgacttaaagggattataaataaagttagttctagaattcaagcatagcaaattttgtaaaacaaactgtacagttcatccagaaaatgtacaagggtgaaaccgagagcaggtagggaaaacaatgcaatggaagtaaaattcatggagaaaccattatcattcttcttcctcatcttcatcgtcatcatcttctgcaagaccagcatcatcgccgataccttctagcagttggtccacgtcctctcccaactccaatagccttgcacttagtttttccactctgctctgttcttgtccaaggcacaccagtaaatcgctgagctctgcttcgctctctttctgagcttcttcctttgcttcggcctttattgcctcgatatctggaattgctgaagaccctcctcctcctcctccatttcttagtgctttcacctctttttccaattggaaattggcctgctcaagactgttgtaagcatccgataggctcttcaaatcagattccatcttggcagctaaattctggtacatcgatgcctctgattcagtattggctttttccgattttagcatctccaatctttgggatgcttcatgaagatcccgtctaagtttctctacttgggccctgtctaaggctccactcgctctaggctcagattgggattgacttccccctccagactttgccaggtcctccgccaaaacagaattccggctaagaagatcctacaagaaaagacagactaacatcaatacagtgtcatacatgactaatttcaggagaattattaagcccaaaatcttacaaaaaaaacacacctgtatctcactgcattgcttctccacaaatgctttcagccgtttaatgtactcagcatcgctttcgccactcttctgttccagttcagcaggcactacagccaccttgctcttaggattactgaaaacatctattattgcttccctaatatctgcctccaacctctttgccagggttacgaaaatggcgtcaaagactgatgacagaatgggatgagcttcctttttctcatcagccaagtagctctcatcagcatcttcaatatctgccatactagcagcagtagatctactcagtgttctacggggctgggtggagctcgcggtagcaaaatggtagcttttttgcatttcttcgaacttcagaaagtacgatgtaagtccaactttctggcttactgtgtcaactagtgagaaagcatctttaccactctcaattgatttattgtaaatcacacattctcctaaaataacagcagccaacccccttgtggacacgggttcagattcatttgccaacaactcaagcaaatatgtaaggtgggctcgtgaatctagaaaacagtttactgcactagggcaatcaacaagccagatgactagcaatttcaaaataataggttgaacatatgcatttctggccacattagactttccatctctgtttttcatggaagaggcaagagccaagtactttaccatgcggtgcattagaggctcagaagaacctagagactgcatgggtgcctcgagttcaatttttaaaacctggaaaacatctcaaaatatcatataatattacatgtggggggtcgtcatcttcttgcaactttttataaaataagatttttcagagcaaatactggggcaaaagaaaaaaggaatttctcttgggttctttgcatcaaattacaggtaatatttaaagcgcaaacaaatgctagttatgtatcagctctaatttaatagacaattcggagaggcgtttaatattaaatccaattaaagtaaagctaaaactccattcgtcttgaatttcttaagctcacaataggaaggtgaataccagattgctaagttatttgatactttactggctattcaagtaagcccaaatgagttgtcaaaaaaaaataagcccaattgaagaaaaagttggaagaatatgttagtacagaggtgaatgcaataacgtaccctttccttgcatgggatattgtccttgagtacatgagaaagaacactagcagctctgcagcaagtctgtacttcaatatatcagagttaaatgcacagatgtttcagtcttacaaaatttgtgatgccagtaaaatatttggtttacctcaagatctccatcactttcgctcaaagtaaaaccccgtaatagcatgctgcagtggaatttacacttaaatgagattcaccatcaaaacttgtttatatatttatatatgttgtgaaggggcaatgacttgagaatttcaatgcctgaaacaaaacaataatgaaactaataaagcaagtcccaataagactactttcattaaacaaaccttccaaatgacatgtttacatcctcctcaataggagcatgagccacggggtatggttgagggattaatgtggacgccaacattgcttgtccttctgtattttcctgatttaaataaattcagtgtaaacacacccaaatttagaaagatattcagtgatatacaactagcgacaagtgcaacaaacacttgtaaagcaaaatgaaatgcattatcaacctcgcaaaagcttttaaaaacataatcagctgcaacaaactcttgtgtactggaagtcctcaagattatccgaagaatcgaattaatagcaggctcttgcagtccttcaccaagagttttgcttgcaagagcatcaagatttttgggatgtccgcgtataagatcaccaatgcattttaatgcctgaaagtgaatacagctttaaatattatagatacaaatattatacactttgagctttagtcaggcagtggatgcaggttatacatggcatttcagcataagtaccaaaataattatcttaccgaacatctaacagcaacaggtgcccactggctttcaacacccaacattagaagatagtccagcacctttttctgcatcaaccaaacaatttatagcattgaatatgatcatattgagagtttttgtggcactagtgataacaaataaaagcttcataacaaacctgaacaagggtcgtcttatttgtcaacctgttcgcttctttcccgggatcagcctctgaacctcccataattaataaattaatggtttctaacacgctgagtagattaattgtctactggcatggtgtttgtttcatgacaacaaaacaattccagtaagatttgtgcaacagatgtacaatcaccaaaaattacatatccttgagaacctaaccttttgttgggtgaaactgtaactaattcctcgtagcttcaaaattgacaataaggaatcaaagcccaatgtctccctcaacagaatctgaacatatatagtaatgtatcacaaaatcgaaagaaaaaaatccaatgcatatcaatggaacagatgaaggctacaaacctgattggatgtattgctacgaagaagattgtttaataactcaagacaatcctgtgcaaagaataagaagttaaatccatagctatttttgctcaaaaaaatcattaatcagtacaaatttagacaggcaatttttctagcacaaaacttatgaattagtagttgcttatactgtaggcataacagcataaccacagatgagtttcactaaaaaaaattataggatagaaaatgccctttaacaaatctaaggccagagcaaaaaatgcttctatctctatgttctaccatgacgaacaagtatgttcagtgcttcagcacaatttgataatatgaaacaaaaaacataaaagaaaagaactgtaacttaaaccatctaccaatctaaagcacatgagtaccaattatatcatcaaacttcaaacatgcaagtagtagtatgatgatttatcaaaataaacaaatcagcaatagttctacacatcacgattaatttaagtaaagcaatagtaaaaagaaactcaatgaattacctgcacaacaacacccccgtctgaacccccttcctctttaataatactaaaaagtttctcaaatgcaccttcaaagacaacaattttttgaatttcctggagatgtaataagttcaccaattagcataaaatccttcaatcagtggaacagccaaaaccaacagataaagaaagaaataacaatgaacatgagacggaaagcttacctcagcttcccgagtcaagtaagtaagaagtagtaaagcctcatttcgtataacctagaaggaaaatcacagaaattaagtagtattaaaagaaagcaatggattgacagtacaaatagaaggctctttcaatgtaaggccacagggttccaagagtaaattttttaagacactattaaattttcttatgtaaaggtcgcaagtagtacataaaatattaccatgtgaaggctaatttgtaaaagctagagaagcatatccagtataaactttttaagtcaatacatatttaaaattatgagagctaagaaaataaaattagagaactataagaaaggatttatttcattcattgagcatatattacctcacgatccataagcatatccatcaaccgtgttataccacgaggaattgtgagaatggcttcctgtaatctgaagatgatctcagcaaattgtctttccagaaatttagagagaatttttgaaaggtgaacactctatgattggctctaaagtctaatacctgtttggagagttcgtgagaagagctgtcaagatttgaagagtataatatcgaatataaaaatcatcctctgcctgccaaaaactccaaggaaaaccagcaggaaagttaaaagtgtgaccaaatcaaatacaaagtaaggtgaaaatggactagttgtttcacattccagcaaagaaggctcaccaacaaactcagaagaagtgaaatgccgtctgcctctctagaaagcaaatcagcattcattaactcaggttgaacctcattcttttgtgctttcacatggccaataggagtcaaggcacttacaagagtttctagagcacctcggatctacatgaatcaaagtgatgaacaactaactttcccacataagatacaacataagcgataaattcacattcaaatcagaagacttcagcaaagagaggtaaacatcatagttgaatgaagcatataacagcaataaagtaagattccataaatcataatatacaacaaaagcctagtgatttgctattaagatgactggaaaacggtttcaaatgtctgatagaaatcaaagaaaccatacagtacagaaagagagaaggattagcaaccatttctacatcatcacgttcttcctttaacacacccatcagaacagggaagcctgcaaagtgagctaaaaatatcagaaacagcacccacataatgatttttttaaaaaaaaaccattaaagcaagtactcacccattgcaccaaatgccaattgtgcagcacgattttctgccacaacagactgaagctcaatcaaagcgttcctcctatcctctgccagcttaccattgcttatacgatcaagcaatcgttcaacatagcttttgatgcaaacataaaaatgtaagtccaatattgacatacataagtataagttttcattttttcaagacatacaaacactattttttccagtttaagataataaacacgctctgtcttcactttctgatccccataaactccattaactcaaaatggtgaaaaccttgtagtgcacccatatatatatacataaaaaagatataacaaaaccaaatgatttacctatcttcacttgaaccagagttctcattaccgaaaaccagaccaacaacaccctgcaagaaaatgaatagcttaataaaaaaaccccaagtagctaaaaacagcacaatgaccctttaagattaaccattatccaatctaaattcagctgctgaatttaattaattaattaatttatattaaaatgtcgatcaccttatatccagataccaaatccatgtcaggattgaatcaccaacactccagaaagaaactccagaattctggaaatcaatcgcaagagaaacactagatgatcgaatcaccccaatcgaaagccctaacctggaaagcgaattagtttttccacgaaacttaagaacgtgtcagaataggaagaaatcgatctgagagtaggtttcgaaagctcagcaatggtggacttttttcttcaacaattcacaactgaaattttatttattttcctctgttgagattttaggcaaaataacttcttcttctttcttccatttcctttccttttcaaaaaataaataaatattttttttgagaagaaaataaataaaaaattattaggtgtatttggcttttttgatagttttcgacctatctgttttaaataaattcgtacgtggatcccactaattaattaaatatattaacaataatttacggcctacaaaaataagtttaattattagttacaaataacacttaaatcgaaaaatacatttgatacatatattttcaataatatttatttgttactttatattttaaaattgtatttagtatcttaaactaaaatataatcaatataattttattaatttgacaaaacagtttacaattatatgtaattaaataattaaatttaaatttaaaatttataaaattgaagacagtttaattgtattgataaaatttcatcaaaatatttttagtttaaggtactaaatatgtatgattttagaacacaaaataccaaataaatatcattgaaaagacaaaataccaaacttgtatttagataaaatataaggtaccaaatgtgtatacactcatacttaaatttaatttttgaaggtaataatttaaaatgtacatttcctctatggagatggagctgcatggacatgctactaatgaagtgggaattttccatctaaatgaggaacggggcgaggacgaaattaatttttatccctaaatattaaacgggatgaggacgaggacgaggacggagataacacttctagcataaaatattatactttgttcacgagaggaaactttttattaattattaagagagtttttctttctagattgtccaaaaaatttctctcataaattaatctttgttgaaatgacataagagttccaactttgtgtttagattctatagctctagagtaattaagtgtgtatacttctctgtaacatcaatcatgatttacataaccatgtgaagaaagctttttccttgggactaatcacaagccaattccctctcttattatgcgttttctaggttttgcctctctttgtgataatgatagagacaaagaggagggttgttctaacttttgagctcaatttgtaagactgcaggtgttttttgcttgttcgatggacttgatgcgttttaggaacaagtaaaatgaactaaattaagtgaaaggtatagtggagttacagagaggaaggacatagagaatggctatggctatggctatgaaagctagtctaaagcttctaggacaataccccattctcagttgcagtaaacactggaggggttcatcattgcgagtgtcgtttcggggcttgtgtacgcattctacagaggagctacagctcaaggacttcatggagtacctggattctcttaagaactatgagaaattaggggtccccaaaggtgcagggactgattctgaagatgggttcgatttgagtcggatgagaacgttaatgaagctacttgataatcctcattccgacttcaaggttccaacattttctactttttttttttatcaattttatttatttttgtattattcttaaatatctatgctctgtttggttgagtaattgaaaaattttgtattatagtataatttgggaaatacttgtttggctttggcagcttgaaaatatttgaaatttggttatgcatgtagctgaatctattagaattattaagctaacatccttcctttttttttgttattttccaactaagccgataatttatgtttgttgtagcttcacagagatcattgccaaaaatgtatcttgttagagacgaagtaagctacaatatgatatggttcactttatactctttcttgtgtgaaaattctgctatagatagctcttttgttatttttcttcatatttgtggaacttgagcaatatgggattgacgagcattacaacacttttaggccattcatattgccgggaccaaaggaaaaggttctactgcagcctttatctccaatattttgagggcacaaggctattcagttggtagttatacaaggtagtgtttattggcttcattatcgtcttcacattttcatttatgttcaactctttccctaattgctattgtcttcctccataattatttgagacaggcttctttttccaatgcagcccacatatccacactattagagaacgaatatcgttaggaaaatttggtgagcctgtgtcaactaaagctttaaactctctttttcttcggatgaaggagattattaaccaggcgaggaaacttgaaaatgggcatataagtcattttgaggtatcacttgcacaacattgcctctgtttgatgtaatatagtgttattgctttgaaattcatattgtttgaactttgatgttcctatgtcctgaaagttcaggctgaagcttgaagttgatcaagatttaaagttgttgcttttcctgttaacttgactttagcaactttgattcacaatttttaccataagtagaaggacaaaaggctcatggctgttccacttgatttattcaaaatgttgaattaagaaaattggcaaccactaaattcttttagctgagttttttaaaagcatgtgctctacaatgatctaataatggtttaaataatgtatgatgttttgctgcttttagttctgacggtttattagttcattgtaggttctgacagctatggcattcaaactatttgcagaagagaatgttgatgttgcagttattgaggttatttgttctccctcggtcatttgtatctttgcattgttttagttttggaatcaacttcacttttggttttgtgtcaccagaaagaaattcctaagaaaaatgatgttgctaagtttgtttataatcgtatgtaataggctgggttggggggtgcacgagatgcgaccaatgttatctgtagcactggacttgctgtatcagttattactacaataggtgaggaacatttggctgcacttgggggctctttggaaagcattgcagttgcaaagtctggaatcattaagcacggttgcccagttagttgattctatctctgaaattgttacagattttaattgatatacttaaattttcttataagattttctaccattgaattttttgtataatttttggtagaaatgagaatatagaagtatcctttcgaggttagatttttacagtattattttgatatagtttagttttttgcaggcttcattcttttgttttattgtgcaattgttcactgagttttagttcttttttatgtgcatttgtattattgtttaagctggttatttattgtattgattatgtttaatggtttaaactttcaggtggttttgggtgggccgtttctcccgcatattgaaaaaattcttcgagacaaagcttctttgatgtcatcacctgtagcatctgcttctgatagtggtaattgcagtaaaattaacgacattagcttgattgatggtagaccctaccaatcctgtgatatagtgatacaagctgacagggatttaagcctggtacgcccttgtatttatatatatgtttgacttgctcgtggtaactcatgcaatatatctgtattttgaatattgattatttacaaagagctccgatcatgcagcccttcgagttacttgatgtgaagttgtacatgcttggaagtcaccagcttcaaaatgcagtcactgccacttgcacagcactctgcctgcgcgaccaaggttgaaacacctaattctccttttcttatgttgtttctgctgattcatacataattgcttgtatcaattctagtgtttctatgaaaactagactactacattttcaaatgacttcccaagtttatgaaaacattctagtctctaacatgcttattacaccattgcacttgcagagactaaatctactgaataacataataatgttttcgatatttcaggatggaatatttctgatgaatctattagagctggtttagagaatacatgcttgctcggaaggagtcaattcctaacatctgaggaagctgaggcattgggactgtcgaatgcaatactaatgttggatggaggtacttcttcctttagttcccgtattaatt

SEQ ID NO: 15134 - DNA, 3483 bp, Cannabis sativa
ttaaattgggcagtttgcatgcagaattttataacccgattttcatgttgggttggaaaatatatagtataaaccgactaaaccgaccgatgtacagccctatctagtaccatgatgaagtatcgtcttataattagttagtgaatttctataatatttattaaagtaaaataagtggaaccccgatattgagttgcacaaataaatattgcatttaattacaaaaatatgttataactaactaaaatacatatatttttccttttattattagaggttgttgtcttttattgtcttaattgaataatgtatctctttttctttggttaaatgatatgcgaatgaagttgctcatattttgacacgctattctattcatattggtgattgtgtttatagtgagagaattattcctactagtttaatgtctttgattttagacaatattttaataaagtttgtatttcactaaaaaaataaaagtgtctcccttacctttatatgatccgcctattcacgtcatataatttttctaaatactcaaaatcttaaaattgaaaagtgagacattaaagtttcatttaaggtaaaacaaattgtaaactttgcaagaaatgtgaatcatcattaaggtttcactttttcttcctttgatatgaattatatttttttctttggaaatgaaaaattaaacattacaccaacatatcttttttcaaagtcaaaagtaaaaatatttttatttaacttctttattactccgagattaagttgaactttatagtgaaactacttaaaattagttcaagtaaccatataaaagatattagaatgtgcgtgtgtccaataacttaaaaatgtaatataaaaacaattctcttatccttaaataatgttgagttgtgttttattaaaagatctgtaaacaagttaattcatgttttagctatgaatttttgtttctctacaggtcgtgtgcttcagttggaggattgtttcaacgaagtgcgttctattgctattaacgattgctagttaataaagttgctaagttttattaaaaaaaaatgtaatataaaaactattctatcaaaagaaaataataataaactttagtgaaagagttttcttttgctttttgtccattctttctatttagaagattcctttgattttgatcctacattttttttcaatttttcacaccataagtcgttggatttgtttcttttttgctagtttcttccattttaatttatagtctaaacaatatacctaataatacaatgaaatctctttaggaataatgttggtactaaacaccaaataaagccatcaatttagggattgattttttttggtggccaaacatatttgtcaaatcttctttaatgaaaaccactagttatttatgactcatgagtcatgactttgtatggtgttaagaaaaataaagaagtgattagctttactagaaggtaccatctcatgaattattgactagaagtagatgcagaagatattagtccaattccttggttggtaaatttaacaaatgtgggtagacaatagacatatttttttttaaaaaaaaaaataagtgtgagtagatattttatgaaaataagggaaaaattgattattttccaaccaaataattaaaaaaaaaaagagcattgctattaagatatgttcggtaagtagggtagaaaagtgagtgaataaaaagaagagactatagaaaaataggaggagacaacaaatccacttatttaacaaatagaaattgcagaaggaatggatagttagatggaaagtaaatctttttaaattccaaatataaaatcatgaatggaaggatttacactctccttttttaattatttgaaattacaaatatacccttataatattatattaaaaaaataatatctaagaactatataataatttcataaatactctctatcattccttctaccaaaactcaaaaaaattgctactctcatctccctccctcctattctaatcctctgacttttcatcctccatattttttatccttcctaacgaacatagcataaagtaccaacaccacttagagataatattaaataatgttagcgatattctataaatattattatattaattttatgagccataatatcataaattttatatattagatttgtagtcaatggaccactttctctttgtctccttgcagcaccacccaaacttaattcaccttccataatcacatcaatatttatacatcactcccaaccatacaacaaaagggtcaatgattcaataaatgtaatcaccactaaaaaatagttcaatttcaatgagccctatagttcttagtattaacttctcttagtgggtctcacactctcaaagattgacctatatgttagtctttcaataaggggcttatcttaattatatatataacagcatcgataatgttaccatcaatattattgtttgtccgtaaatgtcattaaattacgagaattgttaatatcaaacttcttattacaatctcttaattaatttttatgcccaaaatcacatattgaaatattttttgtcaatttttttttcataataatatttgttatgttacactattatgattctttgtaaatttttgcaaaattttttatagtttacaatattgaaaataaagtttctaatattctagtctattacgcgtgttcaaaaaactttaagcataattttcagcactataaactatttaaaaatttataagaataatgttgtaactacgtacactactataaaaaaaattgaaaataaatatcgatatttattgttggacaaaaaaattgattaaaatattatattatgagattgatggtaacactaattttataatatataaaagagaaaaagtgggtcataaaagttgtagattgcctaagacataaatttatagcacacttaatatttaataaaaatagtgttggagataaaaataaacttataatttaacttgaaagaggaccaccaatactaaccataaggtacaacctctatatctagctaagaaattatagagtgggataaacatctttttcaaacaattatatcatctttttttttttttttctttaatagttggcactagtttgagcatataattaattaacttaattagtagtgtggtaaatattatgaatgattattgggacctataaacaaaaaaagtacaatgaaacaaattaaatatataataaatggttctaataacattaattaagtagacattgtgtgaaatgatatgtattttgtaggttattatatcaaaatcattattagtgagtaattattcctttgcaatataatcatagctaattaggataaacgtgtatgtaactgaaaactgaaactgaacatgaatattaattgagtgtattcataggtttttgatggtacatattatttcat

SEQ ID NO: 15135 - DNA, 8821 bp, Cannabis sativa
  modified_base (2269)..(2274): a, c, t, g, unknown or other
  modified_base (2404)..(2412): a, c, t, g, unknown or other
  modified_base (8473)..(8475): a, c, t, g, unknown or other
  modified_base (8632)..(8637): a, c, t, g, unknown or other
  modified_base (8767)..(8772): a, c, t, g, unknown or other
agatgggatctaaattatacttccactagtgaattaatggtactaaaggataaagaagtaattacaagggtaaatagtaatttgaccaaactaattacgagccaatacatggagggcttaaaactggaattaattatatcaatgaacactgtagtaaaattcaataactataattctataattactaagagtttaatttcatatttatagtagagtaatcatggaattaataaacaaatattatttggttgatgagattcaataaataatctagtttattagagtttaaaattataggtccatggtccctgaattgccacattgaaacaatgtcaatggaagggataaagagttgtataatgttgtttggaaaagtctattttgaattggaaaaatagtaattgtttattttgtaataaataaatagttttttaaaattaattaaataggggaaagacaaaagttattaagataaaatttgttgagacaaaagttgtcaggacaaaagacaccatctttgtcctaaatcaaacaaggtaggcgcctaccctatagtagggtgtccctattagttttgtcttaattaattaatttaattagataaatatttgaatttgaaaagtggttaaagatatttcaaagtagttgagagattccgtcataaatatcagtaactgaattcggtgataaaaatatttatttaaatatttaaatatgatttaattaatagatatttaactactataaataaaagcctgatttgataaatcagaagagcttttcacaacataatttttgaaattaacaaaggattttcataagctatttttgaaataccagaagattttcacaacactcagttatagtcgaggtgcaattcaaccctaccaacactagtgcgggacgagtacttagtgtatgtggtacagaggtcgtacttctgttaagaacgtttttgattcatctaaagccttgtaaatgcgtgtatgggcgcctagatacaagtcggtaatatatttatatgttttatatttttcttactgagtctgtatcgactagtaaatatctttacatgtgtaggtaaaagaaaggcgaaggttgagcatcggtgagtccagagcttgagatgattgtacatatgcttccaacactagtacaattgaggtatgaagtgcattggaacaatatatattgttaaggggtatgacacagcgttaccaacagtagtacgggatgagtacggagtacatgtggtacaacactcagttctactcgaggtgtgattcagccctaccaatactagtacgggacaagtacttagtgcatgtggtatagagatcgtacttccgttaaaattgttcttgattcatctgaagccttttaaatggggtatggatgccaagatacaagtcagtaatatgtttatatattttatgcttttcttactaagtctgtcgactcacaaatatattgcatgtgtaggtaaaggaaagacaaaagctgagcatcaatgagtctagagttcgaggatgattgtagatatcaggatggttagacttagaatgttcggtctcaggacgatatgatcttttattttgtagtcgttgggttgcacttttatgaaaaatatattttatattcagttataaacttttaacgggatcctagaaattatataaatttatgtatatgttaaagttaaagtttgatttcaaagtttaatttgtcacatttttcaagaaactctttgattagtaaatgtgtacacaacaattaaaaagttactgtagcgtgcctaagcaagtaaggtgttacagcctcttatgattcgttattgcttacctatttgttaataaataatcatgaatctaaattcatatacttaatttttttagctaacatatttgaaaattgacacaaatcatgtgtttgatagtaaattgcgaaaatcgtgtggcattttatttgtattctttcttagttggttttcaatttagttaaagattgctttgcattgatgttgtttcacagctagtttcaaagggatctcttaagaagcgcattaatttttggatgtggtatgatttacattatatattttttaaaattataattgatttttaagttttgtgtattatttattaggaaactcacaaaaatgttggaatttgaattaatttttataaaaatactgtcacacggaaaagttttcaaaaatactgtatttttataaaacaccagtacaacacaaaacagaacaactcaaaannnnnntagaacaactaaaaaaaccagtagaacaccagtaaaaacttaacacagtatactgcagtataaaacttataaaaaaacacagtaaaaaagtaaaaaataccggctcgcagtatttttgtaaaaaaatagnnnnnnnnngtataccatgtaaatttctctatttatttgtacttattatgttgtggaactatttttgttttaatatatgtattagtattttcagaattgattccttcttattttttttaattataactgatttatgagttattgtgtgttatttattttttagtcatattgttgtggaactagttctatttaatttatgtttcacttagttttttatttagtcattttagaaaatagttcttgaaatatttattttagaaattagattttaatgtaatttattcaagcaagcaggttattatttagttatttcgtgaagagacttttgtcgttaattcaaggaaccagttatttatttatttattttatttagacgatttttgtgtgtaaagttttattttggctactttacggaactagattttttgtcttagatttttaacatgttgataaatataatcagtttctttatcttatattttgagttagtgtgtgttatttatttttacttattttgttatagaaccgaatctatttatatttatacctcagtatttttggaactgattccatcttattttttaaaattataactattttctgagctattgtgtgttatttatttttagtcattttgttgtggaaccggttctattttaatttatgtctcatctgatttgttatttagttatttcaaaaaaacatctcttgaattatttgtatcaaaaattggttttgatttaattaattcaaggaactaatttttttatttatttacattatttaactgatttttgtgtgtaagtttttattttggttgctttacggaagtagtttctttgtctcagatttttaactagttgataatataactggtttctttatcttatatttaagttattttgtgttatttatttttatttattttgttatgtaaccagttcagtttaaatttatgccttattatttttagaattggttcctacttttttttttgtttaattataactggtttatgatgtattatgtgttattcatttttactcaaggttttgtttttaattatatttcagtgttttaagaattaattttctctttattttttaattataaccggtttaagttaatcgtgttattatttgtattcattatgttataagaaccaattctattttaattatagtcagtactatcagttattttgtattatttgtttttatttattatgttatataatttattttattttaattataatcaatttgaattattacgttttatttatttttatttattatattatagaacatgttctattttaatttatatatatgagacattcaattacgatgacttttataactctattgtcttttttataatttttttaaagacttttttgatgccagaatcttgtttgatgacttctaataatatttgttattaaaaattttattaattttatttatttttttatattttaattttcgattattttatattcttatatatatatatgtttttttttttggcagtatttattatgtgatataaaagtagtttaatttactatcattaatgaacgtttttttttttaaaaaaaaaaatgtcatataaattaataaatttttcattaaaaaaaaatacaaaatacaagtcatttcattcatttatgatacacgtgaaccccaaacccaaactttctttttccttttcctgacgtgtatgactatcagtgcaggccactttataataataataataataacaacaacaacaattatagatgttttcatatacagataaaataaaatacaaaaatgggtgtgatgaagaaaataatggaggatgaggagaaatggaagaagaataagttgatatgctgcaggctgttcatctcagaatcacgcaaccgtaaggttcttgaggctattgagagagctggtggtggcctgctgagcaagagcaacagtagagacgaagaagaagaagctgtaattgtgaacaagttagaggacgaagcttacaatcgtgtaagatacacaatcgtttcgtattattattacgacgtcgttaagggtcgcatttgtagtccgcttcggcagacagtgatggccatggtggaggctgctttggaggccataaacttggagactcatttgggagcttaccctcgtttgggcgtcgtcgatgaaattcttttccatcctttgcccaacgcccaacttcatcacgctgctatgcttgccaaggctgtggctctcgacgtcgccactaaatttcaaggtgatttgtagtccatcatcatcatcatcatagatccatccagatccagtaatatttcaaaatatttcgtctctacttaaattctaaattttttataggcttaattttatactttttacaaaataaagagtgtataagttaattttagaggcaaattctatttgcattctcacaaaatcacctaatattttttaaaaaaaaaaaattaagttaaaaataattttacaaattcacttttaagaattttttaagaattaattttaatatttattttcataattttttttttaaattatgtatttttttttaataaaatttcatataattttttattttagtttatttttattttgtaagtatatttatttttaagaatataaataaaaaaattaatataattaaatatatataatttgtgttgagatcagttattagaaaagagaaatgctcttaaaggtactcaatctttaatatttttattgatgtaatttaatattgagctttataaaaagctactaactagtatttataaaacgcctaataatgaaccttctagcaatacttattagtaaagtatgcaaattggaagtatacggatcttgcccttttcaataattagctgaattattggtgtttcaattattgctctttaatatgtatttataatattcaattataatggtggcaaagtagaagataattttgattaagtattgaatatttatgaaattattaatataattttttttaagtttaatatatataaatttttcatgaaaattactagcacatattttaaaatataaagtatgtcaaagttacactactaaaaatttaaaattgcattggaagttggaaccctctttctgtttccgacacataagtagttttaatttaatttttttttttattttgtttaatatatataaatttcaaaagtttcaacactggtctgtgactgtgtgtgttgggtaaattgtagtgccagtatatttatacggtgcagcacacccaacggggaaggccattgacatcatcagacgagagttgggttactacacgcccaactccccgggcaaccaatgggctgggtggactatacccgaagttctaccgctcaagcccaatgaaggcccaatgtccatatccaaagaaagagggatctcaatgattggggcacggccatggattgggttgtacaatatacccattatgaccacagatatctctgtggctcaaaagatagcaaaaatggtgagtgagaaaggaggtgggcttcctactgtacaaactctgggcctaattcatggtgaagattacgctgaaatagcttgtatgctcttagagcccaataggattggagcagatcaggtccaaaaccgagtagaaatattgggggcccaagaaggattgcatgtgaagaagggatactacactgatttttcagctgaagagattgttaaaaagtatatcaatataatctcgaccaaaaaagattcgacacaacataaccgtgttgtaaaacaaaggtccagattataggacctctttatcagcttcaatgttttttattcaataaagaaaagtgaagctggattatggattatgtcttcattgtggtttaataactttgggatcaaaatcgtacattgagggataattaggtatttaagaaatctacaatttgtttatcaaaatcatatcatatgttaattctttattttttttttaattattcagaaatcaaggtagcttatactttgtttgagattttccggtgaatattgatatttttttcttgagtatgatatgtgaatatataaattacacataacaaatcactcacaaatgagacttaccgtatagttagtggaaattttttactccataaatgtgtaagttattttgtaaggtaaaaaaaatataagagaatgtttacacgaaaagtagctttggtaaggtagatatagcagtcgatctcttgagggatcttgtgtttagatttactccatgtgtaagtatttttataaggtaaaattaaaatttaagagaatttaaaaggtgtatttgaatatagaacatatttaaagcatatattttttattattatttatttatttatttacagaagaagataaaatttcattagttaatcaaattattcatccatacagaaatgaactatgggagagcatcgcacactcgtataacacgatcaaaaataaaacaagtagatcttgctaggaagtgagttacattgttagtagattgtttaatagattttaaagaaatttgtactttttaattcagtcaaacgtctcttgcagtcatcaacaattctcctaaaataggataacatggcactggaacttctcatagcttgaacaactacaagacaatttgttaaaacttcaactttgctccattgtcggttcttaatctagcttagtgcttctcgtatcctaatggcctcgacgacttctagttaaacattacttttagtacagattgctctagcctcctctaaatcaccaacatggttttgggcaacaagagagtagctaaaacagtttgaatgtacaaagagatcaatgtcagtatttaccttaattatattttcatttggagttttccaatgcttagtaccatcctctggattcatcaaacctaaggatgtatcttataatttttcttaagcacattgccaattaaagactatccttactagcaccaaaaccttaataacatctctatttttttgtgattccatactagatcatttctacgcatccataatgcccaactaactattgcaaccatttttctttcctttccattgtaacgatcaaaaatagaaagcaatccatcgaaaaatgtccttacaacatctgttatgatagcaaatctcactctgacccaacatgctaaaagagtaagagcaggaccaacacatgagaaattgattctctttcaagattacacaaaggggagagagaattcacatcgacatgcttggttcttagttgagatttagtaggtagacaacatgtggaagcttgccacaaaaaagttcttaaccttgggagtaactttcagattccaaagtttcctccacaaacctgaattgtcactagtatgcctaacctctttgccatcttgcaatacacaatacgcatttttcacagaatattggcccattctatcttgtttgcaataccaagaatcattcgcaccttccataagaggaatacttatgattaggttcgcatcttgttcagtaaaagtgtcattgatgaacttgatatcccactgagaatgccctagaatcattaaatttgaaaccattgtgccaatcaaagagtcactaactgtatggacgaaatggtctttaatattatgcatccaggggtcttaaagcacactcacagagtctccccttccaatccatagagatacaccttttttaactagatcttgagcctcaaatatgcttcttttaaatagaacttgggacgtatttgatgtgtttataatatttttgcaggaaaccttagctctatatctttgtttgtcttgaagaagaagatgaagagtaatatttatagagttttagctatgtaaggttttgaacccaccttcgtatgaaaatagaagggtgtatataggctaagtggaaaatatggacatgtccatgacctgcctagggtactaaaagcccactaatggggtaaattacatgcaaatgagagctaactattgtgatgggctttgtgccctaaataannntctatttcaatgtaatcttttctattcagttatcaataaaaaaaaacaaatttattttcattacttgtttaaattgttatttggttcatgtgatcatttatttatttatttgatttataaattcatccaattcgttatcacattgatattcttgttnnnnnngttgtcagcacagtggaaagtaataaagattatatgattaaatgtattcttatgatttatcagcacacaagatttaactcaaaggataatctacaatgtagtttacttgcacattggataagtgttatgnnnnnnccaaggcattggttaaagtaagcttgggttggatgcctggagtatgcat

SEQ ID NO: 15136 - DNA, 6927 bp, Cannabis sativa
  modified_base (6864)..(6867): a, c, t, g, unknown or other
ctcgtgagtagtgtttatttattaattaatttaatagtataaatggttgcaaatttgggttagtaacgccaaaagcatcaaaccaaagatttcacatttcagaattttgtcagacgaaaaaaaggagccctttttaagatgtctccgttgagctgtcgttttcctacttttctcactcacttttttactcacagcactggctactagtactactctttatagcctcatcacagtggtgggaatagtttagcttgggaatcacaattccgatcattctcgccggaatcttatattcattttcaggtctttcccctactgtattttcattttttatttggtcaatattgttttcaacacagccgatgattctatatagaagcaaaaatgcgttttcaattgggtttcactctgtctgtcagaccagtgttcattttttttcttttcttttcttttgatttttggaaattggtgactggttttttcaaaataaaatatacccttttttaggtaaaatcttcctttttcttcaaatgttttcttttctcctgaaaatagattgatgaagcaatagattctttccattattgttttatttgttattgatgtttttggctataaatgaaaaaggtgggttatgcgtttctttcaagacaaaataatggagataaacacagagaaaaaatggatggttatcagaaagaaaagcttcaagtcaaaactttctggtagatttttgttcaaaaggttttgactttaggaaggaaaaaattgtgaatgtggattatctgatgaactttaatgttgcttttggtgtattttcagtatgaaatgtcatttggatcacaaggttgagttattagcctatgtgaatagccagcacaagacattggagatgaggtttgagtaaaccttcaagttcaaacatttttccaattcatggtaaatcatacatactttcttttccttttttttttttggtaatatatgttaaaaaattatatgcagaataatgggtttcatctccgaacaaatgagttagcctttttggagtgagcagtgtaaaaacaaagaaataaagaaaaataactatgcagggatagaaggagattctactgctttttggaagaatatcaataaaagcttttgctaatcaaaaatggtgtcaaaaaaacatttatatggatcgcaccatccatataatgatcaacgtaagtcctgtaattatgtttttcttgtagctttttaacattcttgtcttataatgttgctccagaaaataacagtggagatttctggtacttcatttacatctataagagtgtttggtttactaatttatatattttttcaactctggtagcatttgaggctctctgttgtggctcatggaaaactctgaagagtatacgcattagcaatgggactatgcgtttgaattttatggatcatggatgtactcttcaggagaagggaccctttacgaaccttcgaataaagtcgaggcaagctacattatctgattgcacttgctttctaagacctggtgttgatatatgtgtgctttcaaccttgcattcccaacatacacagaatttggatgatgaaggacaagatcctgtgagtgatccttataataaaccgtacatttatactttggactacagagctttcttcattcaaatttgattttctgttcctcattctgtttgctgtcttatacgtttcttaccattatcatgatttattctgtagttttgtacatgagtgatgagttagtaactattgtgctgagttcctatcctggctgttgcctacctttgcaaattgtctttaatgtttattggcttctttagtctgagttaagtaatttgaccaatctggcattataatcttgttctgccataggtttggattgatgctagaataagctccatagagagaaagcctcacgaatctggatgctcgtgcaaattttacatcaacttctatactaaccaaggttctctgggttcgatgacagaaacacttaataaagagattaatttagtagaaattgataaaatatttatccttcaaaagcttggtcaaaacttttgtgaggatcagtactacagatgggatttctcagaggattgctctactcggcagaagaccaaaatgcttttagggaaaatcttatttgatctttcatggttacttgttacctcttctgtaaagaatctatcatttgatgtaagatcagtgcaaaacaaaattgtatatcaaattttgggagctgttgaggagagtagttcttcaagttctcatagtactctacatgctgcaaactttaaagtagataatggtatttcagtcccaattgttgttcaatttgctgaacatgattctatcagagaagagcctactccaatacttgacaaagttgaagctgaaccatcaccattttctgattctatgggcttacgccgttccaaacgtcgcaatgttcaacctgagcgtttccttggctgtgacagtgggtcagagatagatattggctatgttcggacaaggccatacaaggttgatagaggggaagatattgaattgtcaatgccattgtcgctccttttcggtgtaaatggccttcgttcaaaagtacgtacaaaagataaatatataagtcatccttgtaaacgagatttctatggtaatccaattgaatgtgaaagtaagacctcttcaaggaaggtaaaacaaagtgtgactaatcataaagaacatcaacacaaaccagatatttctttcaccgaaaaagaaattgcttcactgtcctttgactatcaattccaagtcaagaatcctcaaacccgtgcaaagatgcttgatgagattcctccccagcgttactacaataacaattactccaaagtacagaaaaagaatatttctgatctagaagagttggagcttgaaagtacatttgaaagaagaccagttgctagaagcgttcagcgaaaaagatttcggcattatacgcgatacactggtgccaatggagaaagaacctatcaaaagagatctctccatgctggagcatatacagaactaataaactcattcttgagaaacattgactgtacaggcaaggaagagccaccgatcactgaccaatggaaagaacataaaacaaccaactttgagaatgaaatgccgccagatgaggatgaggaagaaatgtcagagactgaactgttgtggaaagaaatggaactagccttggcatcgacttatgttcttgatgatgatgaggtaagacttctagtctctaccttatctataattttgtctttgtttctcattactagtttaaaataatctaaatacactcttttgtatttagagaatagttaactgtgcaattttctatgtcatctgttttctggaaggtttattaaatcttttatgaacttatttcaggatccaaatgtccgctggacaaatgcaagggacaagttttcaaacttagaatgtgaacacgattacaaagtggatgaagaagttggtattttgtgcagtttatgcggttatgttttcacagagattagagatattttgccaccctttgtaagtcatttcgtaaactcagaaacatgcagattttaacttagttttttttacctttattttatatgaaccgggaaatgtctttcgatatgatagggtgagggggaagtagaggcatatgttaataacattttcaaattggatgagggataatttcttttcttagttgttcattgtaggaatgtggtatctagtctaacaatgagttttaaacaactgtcttgtgaattttccatttttctagatgcaaaacactggttggagtgcagctgataagaagttcagtgaagatgatttagagcatggtgcagctgaagaatctgagatggaatttctatgtcctcagggttgtcctgacaaacctctatcggaagaaaaggagaatgtgtgggccttaattcctgaaattcaaaggaagttacacgatcatcagaaaaaggcttttgagtttctatggaaaaatattgcaggatctttaacgccggatttgatgaaacaaaaatccagtaagttgggtggttgtgtcatctctcattctcctggcgctgggaaaacttttcttatgatagcattccttgttagctacctaaagttattcccgggtaaaaggcctttgatccttgctccaaagacaacactctatacctggtacaaagaatttattaagtggaaaattcctataccggtttatctaatccatggtcggagaacctatagagtgttcaagtcaaaaactgtgaactttcctggcgctccaaggccaactgatgatgtcagacatattttggattgcttagaaaagatccagaagtggcatgcacaaccaagtgttcttgtaatgggttatacttcatttcttgcattgatgcgtgaagactctaaatttgcacataggaaatttatggctaaagttttgagagaaagcccaggaatcttggttctagatgaaggacataaccccagaagtaccaaatcaaggttgaggaaggccttaatgaaagttgaaacggacctaagaatattgctttcaggtacattgttccagaacaacttctgcgaatatttcaacactttatgtttggcaagaccaaagtttgtcaatgaagtgttgaaggtattagacccaaaatacaaaaggaaaaagaagaaactagtggaaaaggcacggaatttgcaggaagcacgagcaaggaagtacttcttggataatattgcaaagaaaatcgattcaagtgaagaaaaagagaggatgcaggggcttaaaatgttgagaaaaattaccactaaattcatagatgtgtatgaaggtggaggatctgctgacacacttcctggcctacaaatctacaccttgctgatgaactcaactgataagcagcatgagattttggtgagactgcatcagattatgtcaacataccatggctaccccctagaactggagcttatgattactcttggatctatacatccttggttaatcaaaactgcagtctgtgctaataaatttttcagtgaggaagaactggaggatcttgagaagtacaagtttgacttaaagaaaggatcaaaagtgaaatttgttctgaaccttgtttatcgtgttgtgaagaaggagaaaattctgctcttctgtcacaacattgcaccagtgaaactgtttttagagttgtttgaacgagtatttggttggcaaaggggcaaggaagtcttagtcttaactggagaccttgaattgttcgagcggggaagagtgatggataaatttgaggagccagcaggggagtcaaaggtcctgcttgcttcgattacagcctgtgctgaaggaatcagtttgacagcagcttctcgggttatcatgcttgactcagagtggaatccatccaagacaaagcaggctatagcaagagcttttcggcctggacagcaaaaggtggtctatgtgtaccaactcctggccacaggtacattggaagaagacaagtacagaagaacaacatggaaagaatgggtttcgagtatgattttcagtgaggctcttgtggaggacccttcaaagtggcaagctgaaaagcttgaagacgacatactgagagagatggtggaggaagacaggacgaaatcgttccacatgataatgaaaaacgagaaggcttccaccgttatcagaggtaaagaagactaaaccttcaatgactttgcttgtggaacagcagattgtcttccatcggactgtttctttccctttcgtttcgttatatcctaaaggcattttgctagtcctcacctcatttgttacattgactaataacaaagatggttttctgtccatttccctagtgtttttctggctatttcataagcttcgtgttactacttgttgatacctgcgttcgggttcaacttcatcacagtgaccagctttagtcattttatccaaagttcattattcaaaatatacatgttttgtctaaccattgcagattgttctgaaatatggtttatgtttatttactccataatgaactttaatgacaatgagaataaaggaagcgttgccatttctttgtgctgtgactgtactgctttcagccatgtttactccattcctatttcttttgacacgagttttactaatcttttcattcctcttcaaacgttttctttgattctttgcattacaacttttagaacacaaactttgatgaatactttacttcatgaaattggaaaaagacatttcagctttttacataatttcctttccaaacattttcccattacaaatagcatacgcgggaaattgtttttgatgatatatactcgtgccaataatacactgttcaggtcacgttggaaagttattttagggactccgttctcaatttaagcaagcaagacgagatgaatatgtaacataagattagatttttttggcaactgatgtaggaacttctttctttttttttttttgtttttgtttttttttttaactttaattagagataaaataaacaatctatattttttttttttgaaaacaataaactatctatatattaatataaaggattgcacaaaataggtgaggtgtcatcctacaattctttttatttattttattagaattagttttttcttttaagtaaaagccacatggtttacaaatgaaatgggtgttttactcctaagctataaatatactcttatattcattttagggggaattacctcatatactatattttaatttttttnnnnaaatttacggtttgggttgctctgctggttgctccagtaatttttatgtaggttgttatg

SEQ ID NO: 15137 - DNA, 3100 bp, Cannabis sativa
ttataatatgtataaaattttaattgtgtacgagcagtcctatcgtaagagtatacaccttacatcataataaccacacgatctaaaataaatggtcaaaaaaagttttttagcggtagagaactttgctaagtactataatagtcttaccctatatatataaatgagaatagcaaaataatgttgaaaacttataatatggcaaaataaagaaaagtatgctcttatcagcaaggcaaaagacacgaaagctggtgccaatcatcacatagttggtttgaacaagatcaatccaaatcatattcttgacttaatcttacagattaaattagacacataagttaattttccaactctattatatatatgggaatcattccattcaagtggtatgatgtagctcaagacaaaataaacactaatagctaggttacaggtaacccaatgaaagatcctttaagacggcaaattaactagtgtgtttcccgtataaaaacaatcacaggcttagtgccgactcttatataataatatgtatttgtaatttgaaatgaaacccattatttttttccacttggcaagctggcattggaatttgcgagtgaaaagaacaaaacagtagataaagaactaagatgatcaagaaaataatctatatataactattaattatattggattcaaataatgaatgttggagattccataattaactttaaggaatttggacagctcttctagctaggagcaatattggaaatgggaatgaaggatggtatgtttaggtatgcagattgggtggacaagtggttgatgttctttgggattttgggtagcttgggtgatgggttacagaaccctctcatgatgtacattcttagcgatgttatcaattcatatggatcttctaatagctctctatccaatgatgatgtaaacaaggtaagcatatgaagtgcatgaaaaaattctaaggttaaaatgcaagtgtaattgtccgcttaaaaaagatgaatattgattaggactgctacactattttgtgtgtgtttctttgaaatgaatatttaattgttgaatggatgcatttggtgtcttgtggtttttcatttgcagtttgcacttaaacttttgtatgctgcaattggagttggagctgctgcatttgttggtaagttagtataatgcactttttaatttcactgatgaagaagaactgaaggccaaatgaaaaccatgtctgagattatctattcttgatgtttgcttccacagaaggagtttgttggtcaagaactgctgagaggcagacttctaagatgagaagaaagtatctgaaatctgttctcagacaagaagtcggtttctttgacacgcagatagctggttcttccatgacttctcaagtggtgtccgttatctcctctgatgctaatgcagtccaagctgcgttgtgcgaaaaggtttgttttttttttgttgagcacctttcattattcaaatcaaatttagtaaaaattgttaaacaagagtttatgaacatttcttatgatcagagagtggtgagatgccaaattgagtagtatctcagctaaaaagcaaaactaaaaacaactcctatcagttataacattctcacttatgttttaatattctaatgaattcttatttttacctgctgtagattcctaactgtttggcttacatgtcaacctttcttttctgccacatatttgcctttgtattgtcatggagactcacattagcagcaatacctctttcgattatgttcatagctccaggtctcttttttgggagtgtcatgatggggtatgtcatgaaatcaattgaagcttatggagttgctggtggtatagctgaacaatcactttcctctataagaacggtatattcttatgtaggagagatcaaaacactaagtagattcagcattgcacttcagaaggttcaggaacttggaataaaacttggtctcacaaaggggctgatgttggggaccatgggagtcatttacataggctggggtttccaagcctgggttggaacatatttgattactcaaaaaggagaagagggtggccatgttttcgtagctggattcaatgttcttatgggaggcctgtgagttatttttctttttaaaacatttcattttttatggaatataatattgacaagattcacttacttcaatttggaactcacaacttcattttgttactttaggagtatattgagtgcactcccaaatttaactgccatcacagaagcattagccgcaactactcgtattcatgaaatgatcaatcgagttccagctatagactctgaagatagaaaagggaaggctttatcacatgtgaaaggagaaatagaatttaaagaaatttactttagttacccatcaagaccagatacaccggtcttacaaggtttaactctgcatgttccagcaggtaagagggtaggtcttgttggaggcagtggttctggcaagtctaccatcattgcgttgcttgaaaggttttatgatcccacaaatggagaaatactcttggacggatacagaataagtagacttcagctgaaatggctgaggtcacaaattggtttagttaaccaggaaccagttctttttgcaacatctatacaagagaatataagtttgggcaaagaaggtgccactatggaacaagtaattattgctgctaaagttgcaaatgcacacgatttcatcgtcaagttgtcagatggatatgagactcaagtaagcaaatgtctagatcttcccttttcatttttcaataccttcttttctccatgtttgctaggtgtataaaataaagaagctgtaaagtatgcactcaaattaggattgacaagaaagaaagttcttctttaatgcaacaccaatcaatattattaatggcctctagttaaaagttagttttaaaatcttctatttatttttgttctgtgtttttcctctaggttggtcaatttggattccaaatgtcaggtgggcaaaagcaacgcattgccatcgcaagagccctattgagggatccaaagattctgc

SEQ ID NO: 15138 - DNA, 10957 bp, Cannabis sativa
aaatgaaatgaacgttgttattcaatcgaagctcaaatgtgaaaatggaattggagtctgtacttgtctagaattagaatagaatagaatagaagagaaagagaacgagaaagagaggttgcctctttcttatgtaagactaacaaacaacactttgtttttgatttctctttctttctttctttttttagtccaaaatgtcctttttttttttctttttctttcctttttgcattatatataaataaatattttcccttaaactatcacatttaataaattataaggctcttaacattttgcttaaattattgacgatttaaaatttttttccaattttaataaagaaattctaacataaatcaaaatttagatatatgatttaatacatgttaaaggtatataatttagtagatatgaagcataatttaatacataaataatcaccaaaattaataaaattgaataaaattggacaacaatctttaaatctaacaatgtcaataatttagacgagatttttaacagattaaaaaattcaaacaacataatttagtacatgtcaaaattcaagaaaaaaaatcataattaacctatattatatttatcatttatttttattttaactactaaattaagtattatcatatcaaccaaccacgatgacttgagaataatgatatgattattaaataaatgattaaatgggagatgtgaaacatgaggttagttatagttagatagaagtagtagtgattattaaattaataaaaatttgataagaaatcatatcatatcatatcatatcataaagatttaaagaagaggtggaggtggtgaggtgagcattgaattgagtaatgaaaatgataagattgagggaggtgctatatttattattaataacaaacaataaataaagggaaagaagatggtgggtgaacatcataacttaactactaagtagaactgagtatttgaacatctttcatttcatcatctccttcatctccttctttttaaaagatcatgatcaacataacatcaaagtctagtagtagtagtagtattagaatccctttgaaaatggaaaccactttctcaatcccaagtgtctattgtaatcttgtattcttcttcttttgctcttcttcttcttatctgtctcatttatctcagtagtagtactgttgctgttatttccttgctccatctcattcactttaatctccacttccacccacaactaaaacaaaataacaacttcaactacttaattaagtatatataataatagcatgcatcaaatgaatgaacgtatctaaacctttaatagtcgtttctcaagcataaggagtcgatccattacactgcctttgtgaacaacttcatccagtgcacaccacagagtagtcttcttaatatggttttgtgtttgatcactaatattaatgttgcagcatcctcctcctcttattactctactcttctcatccagtaatttcacctattaattatatcatatgttacacaaaaacaaacaataagtagtagttgaagaagaagaagatatggttaattgatcaaattcatagtagagtaataaagaggagtcagctttaccagacgatctaaccgatccaaacgtgggagaatagcaagtgctgaacatgaactcctactccaactctcttcattttgctccatcaaattcaattatcaatttagctataagaacaacaacaactacacttgcctattaattctttcttcttcccaatcctaatcccaacataaaataatagaatggagtttgttattattgctatgatttttctcatagtgtcatacacattcattcattaaatgacattaatctaccttatcctcattctttcttgtcattatctccatactctgtgggaactcttaactctccacacgctcttctttttattattcaaacatattattattgtatctactcaatagcccaataggggtggggtctcacatttatgaattttatgtaatataaacgagtaattgcacctacaaattacatctaaatattacacattaaaaagagtagtctgtgttttaacatatcattagttttaacatagtataaataaatgtaattagttttaacatatcattatgtagtctgtgtttgttttaacataattgcatactcatccaattttcatttcaccaatcatttatttatttgttgcaaacaagataagcaacaacatttcacatttcagatagtggtaagataatcaagtaagtaaacacttgattgctttttttgttttcaaacaaaataacatcatgttagccccatcccaagttgtacagaatatcttcagaacaaacatcatttgtgtatgcaccaattctagttgaaagttgaaacggtagagtgaagctttatatatacacgcaattcaaattcagctatacattacatcctaagaatatgcatgaaggagaacaatcaaacaaacaaacaatagtcaactattctattatgaaatgctagccgagctatccttcattgccatataattcacctatatctaataaccctgctctcttcatccaaaaacactgccattgccaagcaaccgattgctaggctaaacctacaatgtttgtgccattactttaatacaaacaaaaaaaaaaaaaaagagaaaagattacatagaatgccggccatccgctttgtctttggttggtctttcgtcttgaatttcttccaactcttcatcgtcaccccttttacctgcttgttctttccaatatgcaaccaactttttcaaccgggctacctcttttgatgaaacatttttgcttgggtcgtttactattgacctcactctggaagcatacctgatttaatgtccccaaccatcaagcaagcaaatatcaatatcaaaatagcaaaatgatattatagttatggaagagaaagcagagatagggtaaaacatacatgagcgaattgtatgtctcgtccaaatttgattcagctggagatacattaacgaacataagcgttttggcatttccaccgagtgagtcactcattagcattgttaatttgtggtttcggtatggtatgtgctgaccaccagttgataaagcactaatgacatctcccaaggctgaaagtgacttgttgatgctttgagcttctttaagttgactacctgatgatcctgactttttcaccctttctgacccagcaagatccacaaagctcaactaaacaagaaaacattaatttaaatactactgatacaattccatgagataactaaaacgcatgaaagaacacagattcttcattcgctatgattcgggaaacacattcatacctttcctcttgccatagactgagtttgaaggttagtactttcaataacaattgaaagtatgaggtgagatcttgaactttcctcgttcatttgagtcccagacgtgtgtcttcgttcagagccttcatgaatgatggtacttaattcatcatagttagaaattgatacaactgtcacattttcaaccgacaccattccctaatatcatcatgaatcaattaagcattgagttaaactgtcacatactgcatttgtattttgtacaacatagcaacagaatatgaaaaaaagaaaacctttgaatctttcttgatttccaattttgagcgtttcacatttttaggcaataatagatctacaagtgtatcttgatacaactcaaccatataagcctgcatagaaattaggaatgatattaaattaaaacatattttaaattaaaatttgctaacaaatttagttttaaaataaccttcaatgaaaaagagaatttgttgccatctcgctttaagattttaaacaattctgctatggctcgtggggtgagtccagaatttgtctcagatccatatattgtaaatgtttttcctgacccagtttgaccatatgcaaatatgcacacattgtatccatccacagcagattgcaccaaatactgtaacagtaaaacaaaataaaaacatgttaaaaatacaaatacattagaagcgaacttgaaagagtaagatcttcttttgtaagcaatttaattttatgaatcaaacttgcccttgtatcttcaaacacatcttcttgtgtagcattgccatcaaaaatacgatcatatgtatgttgcttcagtttatcatccttccatggatgttcaacagtaaactcatctaaggccataatcacgtttctttctttttcaactatctccttctcactaagaggtcttaatctacaaaaaactctaatcttgcctttcatatctgaaatgtaccacgagaagaagaagaaaaaatcaatttttcaaatgaaaacacaattttttactttaaaaagtaaatatttgaagaaaaaacaacccaaccttcaatagtattaaaataacgcttccttaaaagttgttcttccttgtataaaacttccatttcagcgagttgaaccccttgcattctcaatattgaagcagtttgctcattctttctatcaatgtcctaaatgtgattaagaagaacaaaccaaataatattaggaaaatacatatgtttatgcatgcaccaaaactcatgtaaagaataccaactactaaagattaccgattcagtgcaagtactcacctctttcatttctctcaattcctcgagctcttttaaattattttgtattgtagccaaatcagagttcctagctgcaagagttgatttggaaatagctaactcttgtgtgactccatcaagctttttttcaaggtcaaatacttgagattctaacaatttgcgctgttgttcaaatcttttctcaagcaactgcatctgtaattaacaactattatcaaccttatatgcaaatatacttacttaatgcctatgagatggtatgttgttggtttaactatgttttactattataatatatttgaacaatattattttataatatatgttcaaatatagtttcctaactaaaatattatatttaacaagcgtatcaaaagaagctccactttagtggaaagttacctcttcaactttctttttctcaagtgcaaatatcctttgctccagcaatttcttttcatctttcaacctctttatagtttcttccgcaacatgcaactcctcacttcgaagttttaactcatcttgaatcttgtatagtgcctgcaaaaatataaaagtattaactagaggtactttttccaactgaataataataaaaatatatccaccaaattttacctggttattagcaccaactgcatccttttttgtactgttctccaacactgcatcactcaactttgctaaccttgcttccatgtttcttttctctaacaccatagcctaatgagttccacaataattatcaaaatcttgttagaagagtttggtaagccaaggtattataggaagattttagacttcaatgcttgcgattataaatatcattttagagtaatatcatgcaatcttagttttacttacttggagagccatgtctttttcctcacacatcgatgatagcctattgcgttcagatgtaacttctcccaaggtttgcttctcagatctcaaggacacttctaaatcccccaactcttctcgtaatttagctgcctcactttccttttcaagtaattcttgttgcagctgtataaatatgataatttatttaaattataattggcattgcaaatccttcatatagatgttgaaacagttaagatagcaaacagaacaaggtttactcaacacaagaaatttttttttaatcaacatgaattagctttagggaatgagagaagttgcctagaaactttataaggtatacataccatcacacaagaaatcatgaactataatgtctatggcgtgttatcttagtaaaacttaagatcaagtaaaagaaaaaagccaatagagggcattttcagtgtattcttgacaatgtcactgattgtagcctaatccaataacaatttaagtagccaccatttgagcttctttgaaagatacctgatcaacattcctttgggattcttcaacagattttgataaatcctgaacccgtttctcgtacacttccgcactagaactagacggtttaaaattgttagaaagatcgccatttgttgaaccactagcagcagaccttgctttagaatagcgacgcaacatgacatcatttatatgtgtttgaagagcaacacaaatttcttctccctacatggagcaagaaaaatgaaaactgacataaaataatgaaaaaaaaaatgtttaaaaactacaaccaataaataattggagatgtgtttagacctgctttgtctcaaactgaaatatgtgaagaacgcctgcaactctcattttaaagaaaacagcagtattgctacttccaaattgcattatgtctcttaactctgctgaatgtaaatattctttgggaactggacggaaaaaatgaacctgtgaaaggatacaaaatgatgctatgtattgtagtaatcttatggtttcatacaagttcaaaatgcaatacttacacccctcttattgatgcccaaaataatccgacccggcaaaagtccgataggatcatcaatcttccgaacactgaagaaaactgaatttccatagggaagtgttttcaatattcgcaaaaattgttgtcttgcatcatctttcgtcaagtgttcctataaaatatgaaataacatgaatgagatgcatacttatacattcatgacataagttgcaatgttgacatcagaatatactctagcttagagatcagaagtaaacaaagattgacttataagtacaactagttatccattcacaaagaatattagagttgtcttaccattgaacggtaacgagaaagaatatccaattcccactctcgttttgctcgtgttattgcaatttgtctcggtagaaatctttctaaaagcgaattccaatcactgggaaaggtaaaagcaagtccttatttcttctcatggaagagttaattaaacgaaaaagaaaagcaattacaaattaaacaagagataaacacaacaaatactgacgtgcatgactcaggagtgccaataaatccaatttcaaccaagatctgcaatgcagacaactgtgctgcatcgtctcttcctacgggatagttgcctgatatatagtcatgttgcaactgtaaaaaagaaaaacaagtataattttagaggtcaaagctaatatcattatcaacaaatgaaatattgcattcacatatttcacacttaaaggttctttattgcaccttgaatttcattaacagtgatcctttctttcatttgtttactatacatagagcacacacctgagttttatggttcaagcaggaaaatagtaagtttgcttaaacaacatacttgtacatatgacagctgtataaacattggatctgctacagcttcatccgattctctaaacagttttttcttaaatgtcagcttgcaatgcagtatttctcctttacttcgatcctttgcaactttgaattctgccaataggtccccaatatatttgttgtcatctaaccctatatattcctctgcatggatgggatcaaattctatataagatgaatgattgtatgaatatgaattgttgaaaagaatcgagtcaagtggatatagaaataccatttccagaatcaggtgatttcgagcccgttacaactttacgacattcaaatagactaaagctggagaatgctgacaatttgattatcccggcaagttcctaattatatatgaatttagttagtcattactaagagcaactgagtaaaaaaattaaaagaaatgaagaaaaaaggaatatttaattcatgaaatttaaattgcaccatcatcaggcagcttgcgaaaattccatacatataatacttgatgcaatgcaacttaagttgcaaagaaagctaaaccacctatacatccatagtgtatgccataactactagtaatttgatcacgaatgttgttgatgcggcaaatgaactatacaccaaaacatgtgacaatttcgcaattacaaggttctgaggaatttattgaactatcttttaccttttcatgtatttatccaattgacctaaacatctagtgttcatcctattggtaggacaaatgttctagcatatgcctaatactctatttctatacactaatctgattgttttctgtctaatttttcaaagcaacatactaggtgcaaatgcaagtaaaagtattacctcaacagcatcaactactgttgttgccatgtcataagtgatttcttcaaaagtttcatccaaaaagaacactatagttgtaagctttcgaccagttaatagagcttcaatctcctcacgtcctggtatagtttgcctaggaccagccttaacagaacgcttcaaagcattcaaagtgtttaaagctagaactcgaacttcggagtcagtatttacaccatgtgctacattatgaacatactctgataaataagcaccaatgtccttgctagggggcattgaggaggcacacaaatacatcagctcccatgctttaatcaagtattgcctggtaaccaaaatcaattagaacaaaaatgaagaatggaaatattaatctacagctactaaaacctaagaaacatataaataagccgaaatatgcatttttagatatatagataggcatacctctcaggattgttcctagtttgttttgatagctgaacaaataactcatctcgaagctctattcgcttcaatgtttgcttgtatagttttccgacaagctctatccgttcatctaggcttgttggagtaagtcggtcagatggatcagctcccatgtacttcaagataatttggaacatcttagttgctttgctgatcaggtcagtatttattttaagcatagacgttggtatagaatcctgtataaaagtaaaaaaaaaaagtgggaatttttttacatctttatgatgtttaaaaaacttaaataaatgtaaaatatttgcatcgaacatctaatctaatcaccttttggaaacataacatatcctcaaatgtaaacttgtcccgggtttgagggccaacagattttttggagaagaagccacgttttccagcagaatgaatttgtttctgcattaaccttaagaaaccttctacctgaaaaagcacaggaggcattagacaaagattacccaaattccagtgctaaaggaactactaatcctaatgcattgcatacagttgaaaatatcgaagtaaatttggtaaatttatgttagttgtgacctgaaatttatcgattaagggtatggcaccagcgagttctggcggaatggccattgatagagaagtaggcgtactgcaagtgtccacaaacaatatttgaaatttgtaacaaaagtcaatgaatgaaaaagaagactacgaagaagaagaaagacttacggaggtgccaaattggaaccatcactatcgtattcatctccatttgaatgagaatgagcagggggagtatcctcgttggcattgttagagctaaaggaggacctagtactggttcttacactttgcgccatagatgtttggtgtagatcaattgtcatttcaatcaaggggtttgtgtttggcttagttcacaaaattctttccttttacagaagaaaacacacacccatccctcaatcaatacacatataaaaaggataatctaggtagactcagctgattcattcattgactgttaaatctgtttatatgtatgtagagattattagagaaaatagtaaagaaaaacaaaaaagaaaggttcaggcgaagcatagatcgaacaaactcaaaagcattttttttttttattaaaattcgaatttaaaaatattcggagaaaaagaaaaagagaagaagaaagaatataataccttttgaatatcgaaatgaaaatgagagatctgagagctattcatcaaaaacaaaccagaagaagaagaagaagaaccagaagaagaagaagaagaggttggttcttctgcaacaacagcgggagtcacgagagtgttgtaaatgcaattcaatttttcttttcttttcttttttattattaaaattaaaattaaaactattgtttggtgctgttattattatttaaaattatggttaaaactactcaaaaatcataatctcatctcatgaattcacccaccctcaatctcaatcctcctatctttttctttctttatttttaagcataacattctttcctttttctttaaataaaatttatatcattatattattctttctttttactttttacttcttctgtctcttttattttattaaagagaaaaaagaaatcttcaatataaatagtccgagtccagatgttgtgtggtcgtggtgatcatgttttatttattatatatatatatatagaatatagtgtatattgtagtatgtataactatcattagagcataataataaaaacacaaaagaaaagagcagagcagaaaacgccaaatgtgtaatcctcccattccaacttgttcatataatactaataattatacaataatacatctttagctgggtcaattatttattatttattagaccagatgggccgatcgtgcttaaggtccagcccagcccagcccaaatcctcacttgccggcctttctttcttttttatcatgtttggctgagtcaattattattaatttatcatcactgaaactcggaacacacccacgagacagagatgtgaaaagagatatattgaagggttaatttcacaaatggacaaaaataacaaaaaa

SEQ ID NO: 15139 - DNA, 13360 bp, Cannabis sativa
atatatatattgaattcttattcattgttttgataaggattagttgttaaagagtaatgatatgtggaatacataaaccacatataaatatgacaacttagtaagtgtgactagtaattagttgaagtgacttattacaataaacatgtgtcacatttatgtttaactaattatgtgtgcacatattaattatttctcattctaaatttaattaatgattaatgggattgtaattatataatattttaattatataatagtgatatatcattgtcaatgaccagatatactcgatcaatttgtctaattctttgtttgagataaggtcagatactaatgtaataatctctttattgaaaactaatttaatccgcatgggatagttaaaatagtcctaacaaacccatgaagacttttatgatcacaaaactattttacgtctacatcatatatagatgtaataattaaatagagtgatgagatgttaaataattaaaaaaaacaatcaaaaacatgtactaaacaattcgccgaattacgtgataatctttttttggtggtatacgtgataattctgttaaaataattagattgagactattattttaaaaatacagttacgtaactgtatcagtatgtaatagtatattttaaatacacgtattaattactctattagataattatatatagatatttttttggaagaatattttattaatagtaatctgcaatttaatagaaacatctgtcggttcaaatacaactagaattataataataataaaaaaaactaatcaactactcaatcatactcttgattcccataccatttaaaaaaaaaaaattacaaaaattaagggtattataattaatcttaaaaacatttatatttagtttacttcacattttatacaaatttataatgaatcattaaaaaataaaacacaaaccaataaccaaataagacaaaataaaactatgttaaagaaacaaaagtaattacaataacttaaataaaagcaacttaaaatcatatcataaaaataagactaattacatagtagcaaaaccacatactttcaccaagccgcgtctaaattcaaaaaaggctgacacgcgcctagccaaaaaaaaaaaaaaaagctcaagcggctaaaatttttaaaaaaaattaacaaacaatataaaatatttagagaactcataattataagtcttaaatttaatatatatataggcaaacacttataatacttaatatcacgataaaatatcgttctataataattaattaatgattttttttttaaaataaaacaaataaaatacaatattgaattatactaccctttaatatttttatttatatttatagatagatatttaatggaagggtcaaaagtgaaaagagcttggtcgtggtcggtacagtgtgagcacgtgtataattaggttgcaacggaccatatagagtagagttagagaggcccgtggccggtatttgctaagctaagcccacgccatgcccatctacatcgccattaggtaatggctttagtcagcaatctttgaaattccctaatttctttttctttttctttgaaaattcaaattgcacattttccatatttctaaaattatttttggttcctgaccacacaaaacaatatatataaatatatatatacaaataataataaaaaaagtaaagtattactctgcctctgaagtttgtttagtttagtttttttttttttaatttcttttttatgttttcctttttttttttactaacatagttataaagctagtgcccattttattttgagtatataaacatattacattagtttcttcgtcactacttactaatatcctattttatcagtgtgtgtagctgacagtacttttacaccgatcagtttcaaccccaagatggagttgttcaactgggtctctttgattttagtcatttctcttctaggacctgctcctatagttgtagcatcttccattaactcagatggaaagccacaaattgcgtctagatttctcaatttggcgaagaaacatgacctgtttgattggatggtcggaatcaggaggaagttacacgaaaatccggaactgggttacgaagaattcgagaccagtaagctgatacgagctgaattagataatctgggcattacttataagcacccagtagtggttaccggtatcatcggctttattgggaccggaaaaccaccttttgttgcgattagagcagatatggatgctctgcctatgcaggtacgtgtgaattgtgggatcgtacttttttgtctttccttactttaagcgaaaactctgtgtagagattagttattttaaaagtcgattgatttgtgtattatttagttttgacggtaatttttaaaactggtttttaatgtccagagttagattttgccatgttgatgattgggaaatcgagaattgtgatagagaaaaagagtgacttttcctctttaacacactttatgtgaagatatgagttctttgtcaattttgagtcaacggatctcaattttgcaggaaatggtggagtggaagcacaagagcaaagtccccgggaagatgcatgcttgtggtcatgatgcccatgtggcaatgcttcttggagctgccaagatactcaaagagcttgagaaagagttgcaagtttgttctcttatttttgttctactgttgtttgattaaattcctgaccgaaacttagagaaaaaagaaaaaaaagagctagtgctggcctggcctgcccctatttattccaatgcctaataatactgttgcaaacttgttgtgtttatagggaacagttgttcttgtattccaaccagctgaggaaggaggtggtggggctcatagacttgtagaagctggagctttagaaaatgttaatgcgatattcgggttacatgtggattccaaattacctataggtgaagtagcctccagaagtggtcctctgttggctgggagtggattttttgaggcagtaattagtggaaaagggggtcatgcagcccttcctcaacactccattgatccaatactggctgcttcaaatgtcattgttagcttacaacatcttgtttcccgtgaagctgatccacttgactcccaggtacatttcttcttctttcctctggcaatgttccctgataaaaattacttcttttagcttctttcatttttggtggctgaagcatataaaaatttgatattgatttagtgtgaaactatgtccaaatatctttgagggaatgacacgtttccttaatcattttaagtttcctttatatttactactaaggcagcttgctcttctaactaattttgcaaaagcttggctgctataactttctgtaattcacattatgaattttgtgtttctggttgaggctatactaaaagggaaaaacattgatttgcaggtagtaacagttgcaaaatttcaaggaggtggcgcttttaatgtcattcctgattctgttacaattggtggcactttccgtgcctttacaaagaaaagtttctatcaacttaaacagcgtatagaagaggtaaacattgaacattttgcagatgaattaacattttgttcaatgattaatttacttccctctgtcttctacaacaactagtatgtttgatgaggacccaaattttcaacaagcgtctgagttgtttttttcttttaatcttttggttttcttctttgcctctatttataagaagctcaactttgtttcttaataggttataaaaggacaggccagtgtgcagaggtgcaaggctagtgtaagtttcttcgaaaatgagaaacctttcttccctccgacagtaaaccatgaaagtttgcatgattacttcaaaagggtagctggtgaaacacttggaagccataaggttaaagaaatgcaaccattaatgggatcagaagatttttctttctaccaagaggtcatacctggatacttcttctttcttgggatgaaaaatacaagtgttggaaagcctgaatcagctcattcacctcacttttacatcaatgaagaagcacttagttatggtgctgcacttcacgcttccttagcttctacctatttatccgaattccatcccaaaaccactttaataggtggagaattacatgatgaattgtagttggtttaaagacaattacaaattagtatattggttcagctgccaagatgggttttcattttgcataaacttttactttaggaattgtttttatgatccgggtataattatacctaacatagtcttaatttccatttcagtttaagtatatactatcttttttttttttcgataaatcagacgagtaattttttttgttctgctaaaataagttaaataattatattttaattcattggaagaaatgaaaaccgtcactgaacttttttttttctttttttaaattagattttaaactaatcaactaaaacaagcactctgtatcttgatatcaattaagggacgagcattttaatttagcaatgaaacatgtattggaaataaacatcaacaagtcaatacagatttatctaaacaattatacagaaacaaagaagagtacgctaatatccacaggtcacaagaaattgagaaaaaaaatgttatataagagtgagagatcaaatatttataagatatatatatatagtgctatattatgacatcaaatcaactggaaccccattaagaatctaaaataatatttttataccaggaagtttcactagaatgttaactgtgggttccaattttgtatatgtaataagctttgacattaacataatctgggttagcttgtatcaaaattctgataatctctgatcagcacttgagaagaacaaaaataacacaaaaatcgatgaatttatgaaatccctaatacatcagaagctaattctaatagaggctccaaagcactgggagcaaactttctggcaaagaggtaacatagtgtagtaggttggttattgtaaaggcatgttttactttcacttatcttcttgaagaattccttcttgatatcatttttcccaaaagtagctgggtgagcaccacccctggaccagtccacataagtaagggtcctgttagccaagagatgtggagtttcgatgctcagcattgtttggaagtagtgttcatccacgtaacaagccggtgtgcagaactcattgaacttgggaaagtaggttgtatcttcaacaattcttacagcaagcatccgattaatctcaaaccattgagaccctttacgccaatcacttaagtttacctcaggtgccatgttctcgttataacgccctcttccataaggtccatcttcatcaaatgaacccatgaaactgtaacgggatcttgatatgtagcgatagacaatgctgaagttgtttagaggaatgcatgcctctgaaagaagaataaaccattcgtttgatatatcaagcaatgcattagcgaggagtctcctctcagccgtgcacatactcattcttccccactcagctacctgcatgaaggcatgcccaaaaatgtaatcagccatagtttccactacacaaaagtaatatatatttatgcaaatgcaactgaaagaaaccgaaatccaagacaggaatattttgctttcaacatctataatcacagcattataccgtaatcaattaggttcaaaccctattatatcatagggtgcccacaatactgacagctaaataaggtttaaatgaaaaaaaaaatagaataaatgaagagaatgagtgagttattgattgcaaaatatggaactaaattatgccttagtgtgggtgcttggtaattcagtgattggatttggatcaatctttcaaagatactctgtacaaataacaaatccaatcataaaaaattatccaatttaatcaatcatatcttacttttcaaacatgatctcacgatcttagtttaatatctcgatgtaaaaagatgctagggcggtataaaatgttaagcactaatgtgttatttaagaggaactataaaattatatttagaagagatgaaagctcaaaccataacaggaaccctctgtctctaaatttaagcatgatttccattccatgcactggtatgaagttctactcaataaaaaacaagataacctactgcataattaaggctaaataaaaataagatctaggcattgtaaaagaaaattagatgcacaaaatatcttaacacaaagactataatcatcacaattgaaataataacatgtgcatcagaaaataaaacgagatcttagcattcccactggccttccatgaaaaacacaaacaaatacatttctactgacaaatctgaagtaattaaacaagctattaagtcttcatactcacggaggagactggtattaagtctgatgaagctataatacagatcagattctatctcttgacaaacaagcataacaaatgaaaacaaaaggtaatagatacctggcttgggatttgcctctgatagaacactgatgaaggtggaaaatggggctcgtaagatggcatagaatggacgtaaatcgagtaaagcccttcatgacccttgaagaatcgctcccaaagaggtgccattggcaatggtccttttgtcaagaacatgaaagcaatcttgggaactcttttgaaaggataagtcttgattcgaggagcaagagaagccctccataatagctctgagtcattcatagtatgcatcagttttgagggtggtcggatccaactttccaaactatgtggctcttcataacaatgctttaccgggagctgttctaatatggtttgtgttactggaacaaaattctgaacttttaaataccgaactgtaaacatactaaaaactgaaagcccaagtcccaaggctaaaaacaccaagaaaaactgaagaagcctcagagggaacagcctagaggggttgattctcagtgtaacgcccaggtccttgccttcctctacagccatcttagtttcaatcctaaatgaaatccaacctatgaatcttattacatacggaacatagaacaaggaacaaaggtaaaagaaaaagaaaaaggaaaataaacccttttatgtcacgaaaatctctacaactgttcaaacgcagcatggaaaagcactcattgtgatttgaggtagaaaaaacgtgaagcaaaagttggattagcgatctgggttttcaaattacaatcatatcaagcccataatgccaaataaggaagaatatataaggaataattacaataaaaagaaattttcacttctttccaaacattggcccattgatgatggtccagtcaaagatgggaaaattcaaatcaaaatcagaaatttccagtttcaactcccaacatcgtggcgaaaacggaaaaaaaagaaaagaaggaaattacgtgttggaagccggttattattaataatatatataaacaataattaaaagtggtgagaattaattaccagtagaaagtagatggattaagggaggaaaatgaaaatgaaactggggtcacaaaacaaatttcttaaatttcatggatagcgccggttttccatacaagatggagtttttttgaaaggagaaaccattccaaggatttggttagtcggaaagagcgaatttatttcttcttctttataattaagtaaagcaagcgagaatgatgcatgtaatgttttttttggaatggtggtgaaaagacctaagacctaggactttgggttggtttggttggctttgtctcttgctttgctttccttgttttgttttttgtttggcttgggtttgggggtagggggaagccttgtgctttacatcacatcgcctccgcattactgtttctctttggaaattttattcaatgcttttttaagttttattactactttggtttagcggtttgttctttgtacaagtgtcctcccatcaactcctctattatgtcaaatagtcattttctagtttcttctctaaatataaagttaatacaacaattttcaaactaatattaattatttttagtaaatttgatactgtacttgcagcgttaattagttagttaagccaactacatattctcggtgagtagtttagtcattgtaggtatacttgtgaaattatgggatactaatgcataataatatcatgacatcaaggaatctttaagtaccttcgaaggaatcaagtcggcgtaatagttgaaaaatgaataatatgtgcacacaattgctaattgccatttggtatggtcttggtggtattttaaaaacttttattctgagctgaatgttacgagttagtttttgacaaatttcccacaaaattgacagaaaagctaagcgaattcacataacatttgggatcatcttcattgaaagaattttataaacagagtagtttaaacccatgtcgataaatgctaaccatttaaccccattagtacacagcctaacatcaaactaaaacctaccaaataaatacatagcccataaaatgagaggggacctcagctttatttacaatagtaccaaaaataatatcaaagtcatcaaacatgtgacataaatgctaaattgcatcttccacgcagtgtagatctgatacttgtttggcaatcttattgtcaccaaagttcaaaataatgcatctttgcagttgtcaaaaaatagaaaataaaaaaagaatgaatctttcgaagaaactacacacatattaatatgatatccattaaaagaagaaaaataaaattttagctgatgttaatatatgatatccattatccgaattcaatcacaaaaccaagagttctaaaataaaaaagcaagagacaaggaaatataacaaccactcaaccagtcccaaagtaagaaactagcttcaacatcactactaaataagctaatctactcgtactagacttgatgcctcaaaagtcatatttacttctctgaggagttgggtccccgcttctttccaaatccaacaactgcaaatacaaccaaccaaccataacaatccatccacagaatcaacatttgggtttaaaagttattcaaataataatcataataaatgataataatatttgggtttaaatgttatacatttgagaatgtgtcaacgttattattatgaaaataacaaaaagagtgaaagttaaacataccggcggtgacgaatctcctgttgtactgcatacgcttgtgagcgcggcctctgggcttcttcttcttatcttgcttagcaacctttggggtctgacccctgacctttccggcacgtgccaacgaaccgtgaaccttacctgtaacccgacacaatcacagatcaatcatataaccggattcaaataatgcagagaatatatagttgaaattatgaagaaattaaaaaaaaatacggaggaatgaatcgaattacccatggttgatttcaaaaactgctcgtacagacgccaaagactgagaaagacgaaaccttttgttgcctgcgagtttggacttctgatttagggttttcttctcagttggactatttaaataaatttatttctttcaatacggcgtcgttttgttcgtatttgttaaaaaacttttctatttaccaaaataccctccatccaaaaagttgaagcaaaccgggtttcgtttatttatctctgctttccctccgaggccatagtttttctggctctgaaaatggctaccatgccgagccacggcctcaggcatttgtacacaacgcgtccatggcagaaaacctatcggttttcaacctcattggcttctctttcttctttcaccgaagactcggaacaaaccaagtccaacgccgccgaaacatccactacaaaatccggcccgtattttccgaagcgaaaccagacactggaactggtttgcgagtcactggctttcaaagggaagggtctatgcaaggtggaggatactgggtttgttgtattgtgcgaccgtgcactccctggtgagcgcttcattgggcgtgttactcgcaagaaggggaactatgctgaggtaatggagtttctgattcctatggattcttataagtgggattctcttggttttggttggtcagaaaattaagaaaaagaaactttagaatttgatgttggcgtgttatctatatgctgcatttggtttcaaaatgaagcagttatattagcttgtcaattgtactgattgtgaatgatttgtgtgagtgtgtgagtgttgtttgagaataatggcgagcttagctgacgaatttgtgggattagctatcatatctcacttaaattactcaccctgatgaatggaaattcattaattaagtgaagcatatattaattgatcatctggaaaaattcataacataccgtgaagatgaacatggatgcttgtgttttcttttacaaaggttttatacatttgaaatattcaatttaagcttacacccaagcgtgagtacataacacactagtaacgttatatgcgcaccaaaattatttaaacaaaacattaaacacgagtaatgaaatgtgcaccaaaacgttacacaaagacacagtacacacaatgatatggcattggcacgcttatatatatatatttatataacagtgttcctatgtgacccaaattgcaggtaactaagttaaagacattatctcctccttgggaccttgtggatgctccttgtgaatacgcttcttactgtggaggctgcaaaatgcaaaatttgtcatatgaggcacaaatccgagccaaggagcaacaagtccatgatctggtgatacatgtggggaaattttctcagtctgaactggaatctttaaggatcatgaagcctattgttccttgtgatatccagtttcattacaggaataaggtttgttaatgatgtaaaccttgttaagtttggtttgtttcattgtccttatgaagtaactttttgcaaattttatcttattactggtatgaaattttcagagagaagcagatatcttgtcttaatttctttcttcttttacagatggagttttcatttggttctgcaaaatggctaccgaaagaagcacttgcagaaaaacaagagggagatagcaattatgcactgggactgcatgctcctggattttttgataaggtcttagacgtcaataagtgcttgctgcaaagtgagcctgccaatatggtattatccgctttccttttattaaccatgatactatatgtctaaatgtaagaaatgcacattagatctatgttacaacttttgcaagacaacgtgcctagcatatgctaaaacaaatgaagagcctttcctttggcttactttaatcatgtcattttcttgtagcatggtgcccagcatcatttgaagtacattatcacataaggtttatgagaaagaattatttgtgtggtaatgattcccattcatatgttaatcgaaaaaaagaattgtaagggtaaggactaattcattcaatatgatagtttgttagccaagggattcctgagtaattattccattaattgccattatagcaattactaccattttgtttgtaattgtagtggttcattattgtgttagtagcatcagaagaattaagttattttatccataacttttgtattgtatccattccataggttcttgctgctatccaagattgctggagagatgcggagttaggtctctctccttataatgctcgctctcatgttggttttcttaaacatctaatgctaagatccggaaggtattatagttctatgatgtcaatcataagctttttctcacagttatgtgaatatagatcttcatgcatctcaatataatagtaaaattatatttttatttcgtttaggcttaatagcaagctgtaattgcaattccaggaatttgaataatggtcttcccgaactcatggttaactttgtgacctcatcttacaagccagaactgctgaagcctttggttgaaagagttactgctgtccctgaagtggtttgttcagacttagttaaaaagtttattctccttatcttcttttttccagctcttaattgtattttacctttaattaatctatattgtggacttacttttcaatcacctactacattatcatcatgttatctacttcattttttcttattagtttctcttatggaatggattcgtgctttacatgtaggtgagtgtcatgaataatgttaacacttctgttggtaacacatcagtgggtgaggaagagtatactttacatgggaagccgtacatcacagaaaccttaagagggcttacttttcaaatatcagccaactcttttttccagacaaatactcgtcaggtgtgtaacacaacttagtcgttgcctttgttttataaagtttgctctaaaacaaatcacttgaatttggttggtttcttaagacacctattgcgttaaattgttaaactttcaggctgaagttttatatagacttatagaggagtgtgctggtctcagaggagatggctcggagatagttctggacctgttttgtgggactggcaccataggtctgactcttgcaagaaggtggttctattctctgcccatttgattgagctgtcatgtataaccccatttgataattttttcctatatgctattggatctcatattacagggtcaaacatgtttatgggtatgaagtagttcctcaagcaatctcagatgctcgtctgaacgctgagctaaatgacatccataacgccacttttgtgcaaggagatctaaataaaattgatgaaaattttgggagtaattttcccagacctgacattgttatttcaggttaagcaaagctctaacctcctttttcagtttctactaaaatagagagaaatgatcttgcatttcgaaacaaacagaacagatgtagtggattctctgttctccattgctaacatatcttcttcttcttcttcttttggaattatatgataaaattttagatccaaatcgacccggaatgcacatgaagttgattaaattcctcttaaagctcaaggcaccacaaataatttatgtatcatgcaatcctgcaacttgtgctcgtgatcttgattacctctgtcatggagtggtaagtttcacatatttaccagttctcacttctttaatgcgtagcgatatttattagatcaaaaaatttgtgcgcagatggagaaaaat

SEQ ID NO: 15140 - DNA, 4694 bp, Cannabis sativa
ggaaatacgatcaggacatgaaccagaagaacgagctaaccatttagccgcttggttcctagaccgtttaacaaactaaactgaaatatgaaaaatagtaaataaccgtataaaattaatacaatccgaaacaataagaccaggagaaagaatttggctcttgctttgctattgatagcattatgatcgtttacttagttatttaaatattattaaaaattttcaaaaatttataatagtttgttagttttggccagttgtatatactattacttagtcacattaactaacttaactcatgtatatattgagctaacagctccataatcaatacactacacagattcatatttcttacaccctcattctctctctgaatcacataaatgatccatgaaataaaataaaatggcaaaatgccattacatatttctcattccatttccacaaacgacattctgtatatatttatggcaggcacctcattttcattattcaaaagacactgaacttgtaatagaaaagaaagtacaatatcaaggcttgagaggaaaaatcacacaagaagaccctgaaacactcttaatcaagaggacgatgagcttgttgtatgcaaagctaccaaagaagcataaattccaccctttatagccatcaaagtttcatgctttcccttctcagcaatggctccatttttcaccacagcaattaaatctgcacccttgatacttgacagcctatgagccactacaactgtggtcctgctcaccgcaactcggtctagtgcatcttgaaccactcgttcggattcggcatcaagagcactggtggcttcatctagaagtagtatttttggtgccttcattatagctcttgcaattgccactctctgcttctgcccaccagacaattgtatgcctctatctcccactctggtgtcataaccctgcacacatttttccaaacttagcatctatcattctataataataataggttaattaggatttcccgaactttgacacgtactaaatcatgccctgtaaactttttcatgtcgttaaaaatattttctgaactattgagattgttggatataagaacttcggtttaattttactaacaagcatccaacatggacagaagttcgggaggcacaatttggtatatggacaatgaaagtaataaggcaaatgtcctggaatccaacaacctcaataatttaaggagaatttttaagtctgaaaagttcagagggcacaagttagtacagatcaaagttcaagtggaaaataatactaataataatatgatctcaatagaaatttgataatggtttttgttttgtacttgttgcagactactaatgaagttgtgggcattggctaatcctgctgcagctataatttcagcctcagttgaatttccttctttcccatatccaatgttggccctgattgtgtcattgaacaaaacaggttcttggctcactaaactcatctgttgcctaaaccatttgagttgtagtttttggatttcgacaccgtctactgtaatttgtcctgaatctggatcataaaatctttgcaataatgagatcactgttgatttcccactcccactttctccaaccaaagcaactgtctgatttaacacaaagtacatttcatgaaattggttaagttctcaacaaaaaatcaactttcattttcttatatagtaaaatatggtactaagtttaccttgccagagtgaatagccaagcaaagatctctgaatattatcacatcaggtctagttgggtacttaaaacttacatgaagaaactcaatctctcctttgacactctctagtacagttccagtttcatcactagaatcaattttcgatttcctgtctagaatggcgaatatcgaagcagcagcattctttgttttacttatatcaggagccatggaagcagtctgagaaatcccaatggcagccatagttagtgcaaaaaacacctgacaaaacaaagtgaatcccaacagttaatttgagaagacaaatggagtagtttccaacttgaagcagaatctgaaatttacccgaaaaacatcagagaatgttgtcttgccagctgcaacaagttgggatccagcatagaaactcgaggcatacacattgaaaagaaaaaatgatgagagaccaaaaccaattccactaactattccttgtctgattccagcttttataggcccttcacacttcttcttgtacaattccatcaccttctcctcggcgcaaaatgaagcaaccgttctaatactccctactgcgtcgttcgccactttactcgcctcctcatacattttctgtgaacaaattacaatttcagcattcatagcaaaacattttactgtcatttggataaattaagtgtcaaaaatatgaaaaacctttgcatcagcactgaaacctgccaagaacttggtttgaacatatccatttactcctattagaggtagcaaagcaaggactataagagccattatccaattcgcctcgaaagcaataactaaaccagcaactgtagttgcagtgttctgtactagcaaaccgagtgcatctccaacaatagttctaagtgaggctgcatcagcagaaagccttgctccaattgcaccactcgagtgctcggcttcatcaaaccaacttacttccatgtaaattactttctcgaaacactttgatcgaattcgtttgatcaacttacaccccgccactgcaaagaaataacctcttgatggatgagctaccaaacctgtcacaccaataccaacaaagagtaatgcccaaaactctgtatcttttcgaagtttatcagctggctcaaagaaagatttgattacgctggaaagcaataccccgaaaacaggtaacactacaccatttgcagctgaagctattgcaccaagaagtaaggctgggatctcgggtttgttaagaagagctaggcgacgaagtgagactttttgaggcacttgttgtgatggtcttaaagcaatgctattgttgtctgatggtgttgtttcaagggcattattgagtacagttggtacaccaaatgagaccgaaaatgagtgacggctgctgttcccagttccagatgactctcggcttattgaccgcactaaagaaattctttgacttgaatgcctccctgaattgctaactagttctggtttgtcttgatcaattgcagcaccttgatctgatgcttttttcatatcttgcaatagtataagttgactatatgtgccttctggatttttagttagctcagaatgtggacctgtacatttgaaaaacaaaaattgtgatcaaaagggaagacaagaaggaaaatagagcaagtacaaaccagagaaaaacagagaaaaatagaagaaaacagagaaaagcagagcaaaacagagaaaaatagaagaaaacagagaaaaacagaggaaaacagagaaaagcaatgtgtcaatgagttggaaatagcattttgttaacagaatcaacaaagaaattgtacccttttcaacaatttttcctctgtggataacagcaattgtatcagcatttcttactgtacttaggcgatgagctacgataagggtagttcggttgatcataattctatccaatgcctcctgcacaactctctcagattctgcatcaagggcactggtggcttcatctaaaagtagaattttcggatctttaagaatcgctctagctatagcaactctttgtttttgtcccccggacaattgagttccatgctcgcccaccatcgtgtcaagtccctacggttcacatattttagaattaagaaagctaaagccaaaatttcaatgtcaaaagtttttaagagtacactaacttgagggagtttatcaatgaatttagcagcattggcaagctcagcagcaactcttatttcctcaacagttgcagcatctttcccataagaaatattgtccctaatgctcgacgaaaacaacaccggttcttgactaacaaggccgattttctgtctgatccatttcaactgaaagtcttttagattaataccatcaatgagaacttcaccactttgaggatcataaaatctctcaatcaaactgatcacagttgatttaccactaccactttgtccaaccaatgcagcagttgttccacttggtattgagagagaaaagccattaaatatttgttcatctggtctagcaggataactgaagtaaacatctcttaaatctatgtcaccattaatgtcatctaatatcttcccattactgtcataagcatcgattcgcggcttcctgtttatcgcctcaaacatcttataggctgcagctcgcccggtagcaaatgcagacaagcatggtgatgcttgcccaagacacctgcaaaattggccattatgtgtccctaaaacttcaaattcttaataattatgaaaaaaaattcgaaaaaaataccataatcattgaaaaactgagtttttacaaatgccaataataattacagaaatatactaaatataaaactgtatacatctacagcagcacaatgaaattctgttactgcagaaaccagttttgcagagacaaaccagaacaaacagaatataaaaataattgcagaaaattaaatca

SEQ ID NO: 15141 - DNA, 9492 bp, Cannabis sativa
ctaattaattgatattaagtatatatttgtttaattagttacgtacagggtaagaaacagcatctcgggctgttaaggcaacaatatcagcgcatgaaatttgagcatcagggcattcagttgtaagcttttctttaatttcatcaattacttcatatcctttcaccgatcgattctgaatagcattcttctctgtcgtattgtcatcactgtttaatggatcaatcaagattgatgcatcacatccctgcacatatcatcaacatatagttatatagataccaatatgcattttaatatgggcattttatggtgccaaatacaaatattactttatacatatttctacgtacccggacaaaacaatcgtggtagtgtagccttagtagcttagcggccatggtttgatcagcactaaccttggcccacgtaatatcacgtactgttttctcaagtgttttacaactttttccataaaaattcatccgaagccctgctccatgattcttatatatatctttgtaatcgtcatcaccgtcattttcatgatcatcatcaccaacaacactagtaataacaactgccataagagaaaccagcacaagaatggtatgaatattattccttctcatcttcatcgaattaattaattattagtagttcttttgttggttttgaattttgatgatgaaatgaaagctagcatgggatggctttatatatatagagtgaaatggggaatgagtttccttatttattcaaatatattggataattttttatttaaataataaatatgcaatgtttacgtatggaaggaagccagccattgtttcctaatgcagcaacttaattagattatgatcatcaatattcaatgtctcctctccttattatatgattatatatgcatgtatgtatattatatatctatgatgtgaattcatattgaaggaactttttatcaatgtacatatgtatcatatttaaagtcaatgtgctttttaaatgacttcagcaaattaatgatcaatatataaatagtaatatttatacataaaaatgtatttgagattacttttgaacattattagtgtttaatgctttttttataaatgacattttataattagttagtaatattttttaaaaatttatttttttaaattggaatccaatacttaattacattaattataaggcataccaagaaaaatactataacccaacccagtatcttttaataattctcattaattttaaattatccttggtctttgatttgagcttgaccgtgcgtgaccatgtggaaaattgtaacacaaccataaatgtaggaattgaaactttgacttattaaacgtcactttctaatatgctaattaccattttttaaaaaaacttttaattcttgaacagaaaaatgacttgttgtatgtataattaaggtataactatatataaaatataatctttcaactaatcagtaaacaaaaatataaacaaaatggaatgagttaaaagtgtttttttaattccagtcaattgctttaattagcaaaaatataagagagagtcaatgacttcttttttatttcaaatgagaacaatgagtacgtaagaggaaattgactgatgagatatcaagtatgcatgcatgcatgtatccctattaatgagatatcgtgtatatgcatattgataaatattgtcattataaataattagtgatgtccaaaattacatcacgaaaatctcacatatttttatttaagaattaataggattaatgtttttttgtaattgcctttattttcttaatgttttttttttttttctctgaaaggaaaacttcataaaacaaaaagctcaaacaccagatgttattaatgttatttttttttttctggtagcaaatttaattaatgtttttagtagtatatatatatataaatatatatatatcaaatatatattaagtcatcaagtatccctattgtgtgaatgcaggctgtcaaaacataatctattccttgcttagactgaacttgaaagcaaatgcatcctataaaatattgtatttgactatatatataaataaatatatgtaaagtaataacaatatatctattatattctaattaagtttaatttatgaccaaagtaagtttcgtttatacgtacagtatactagatataataatatggttgacttataaaaactactcttcttttgtttttttaattgtacgggactcatcaaaactttaaataatgcaaagatgaacgagaattataatgttcaactagtgctttattatagcttagattttaagtgcaggcaaggcaacatatatacctataaatgtatatttatatatatttatattggtcaaggaaaatatgaacatatacgttccaaataaataaataaaaaaccatgatttagttatccttaaacattaacaatgtaattagttcattggttcccatgcacattactcataggatttatattacgtactcatttttactaagccttagtctcgtgataaaattttggcataattagatattggtgattgagatttatcaaagaaatgttaagtttaccaaatctttacttagggcattgttaatcttgttaaggactgtgttgtccaaattaagtcaaagttgtttgttctgttttaaacagaattttaaaacagtccgttactgattttattttgggtcatgtgagtagtatgttcaatctgttagtgagctattgaaaatttttgtatatatattattcagctcaataaagatcattcattagtttccaaaaatagaaagtattctactattttctcgctacttcttgtgtataatacttggttcttgaagagaaaagtaacaatataaatatgaagaattaggttgagagatttttcatggaggtttgttattgaaacaacaagggagcttgttgaaagagtcatttagagggagtctagataaattcgtgagaaagtttgttcaagcatattgagaattcaattgtgatattgagaatattgagaatattttctaaagtttttggacgtaaataacaacttaaaacgactggtagagggttagtgaaattaaatattaatgttatttaataattttgtaggtagttttagtccattggattgtttacatcagatgcctcttgaagtgatcagttttgtctaaattttcgagataatttggtcttagtcgctttgtttttagtgactcatattctgactttgtatatattttgactaaacagttaacttgttgactggaaatttgttgcgtcaacgattgtcatagtgtgattcataccactctctcaaaaaaaaaaaaatattaatgttattcgtttttctagataggtgacacatgtacttttaaggcccaaaattagcctagacgagcccattcacaggcccagtcaaactaacttggagttggaccatcgctccaaatttagctaaaaatctcatgcacagacagtgaaatcggaccttattagtcccagacaagcgactcgcctagaagatgaaatacccagcctagcgtatcaagatgccctcgtggggtagtctgagaggggcaagtgaagagacctcaaggagtagtcctatgtggcacatttctgacaccaattcccacaaaacaggggtttgtctcttgtgtcaggcctaagaaatgtgcacaacaccaaaagtgacataccttttgtccaacaccttcttctctgacaggtactgagcatgatcggcggcacatgccacttgtcactgtcaaatgttccccttccaaatggatagccattgtctcacaagttggggcctcacctaactaacacgaagtcaatataatgttatattttacctcattagtgggcttagttaacacatgcaaactcgtaaactgactttagcctatacatagagcatcatccattcatgttagggtttgtaactcatttcacaaattcaaggataaagtttaggattctaaaactttggtaagaatactcttgtgtaaaaaataacctatagcttttctagctcaataatattgactcatggactactaaggttctttaacgccacaactacgtaaaattatcttcttatttatctcttgaacatttttccttagcttaatttatgattcattcattttctaaaaatatcgataaatattttggtattttcattaagatctgataaaagtattatccattgttgtcatttataataatgttcgccactagattcacagtggtcgtcaagactgtgaaaatgatgtcgcacaatgagttaaactgccccctccaatgaatgttcaagcaagcgtcgtagggatggagaaatgtcaaatgtgggcagccatcctactcaaagaggtcaacaatgagagaaagatgttgatgaaactcctatcaatgaagatgaccaagaagatcacagtgaggatcaataagacgattgtggcaaagaatatgacaaaaactatgaagatgattattatgagaaagacaagtggtagcataccaacaaaggcaaatagcgtaacaacaagaagcaacccgctaaatacaagacacccttcttcagctacaaaatatggtagccaaggaaaactcaacaatgaaaacccacctgcgggaaagttcaaccacactagggtcaggccctctaatgctgcaaacgacaaatggaaagacaaaatgactaagccccaaaaaaagaattcgctgacgcctacccatatgttggaattttatgtcctaaataaaatttaattcattaaattcttatttactttcaataaagatcaaaaatcataccttgaccttgtcgtatgctttgttcacatattttatacatgattatatgtttaatatataatgtttattaaattcgaaacatatagttattcacaattacaatgatgtcatcacagtgaaaagtaattgtgattatatgcttcaaattattaagtcacataatttatcagtacactagatttacactggcgtgataatcatagataagatttttttacacttaagtgagtggaatatcttttccaaggtattagtaaagtaaaccaggatcagatgtatcggctatacatcagactggaccgatattaacaatagaaaaaatatcataaacttagttgatcataatcatttgatctcaatcttgagatggttaaactctagcttaaatgtattacatgagttctttgactttttctttacttgtttactgtggaaccagttaatacttatatcttggaaactcgatagtacaattgaataggagtgtcaatcatagatgcggacatctatagcttctatgtctattataagtgaaatgatagtttccttcaagcttggcttaacgcgataaatgattgaggcctcatttcgataattatattagtttactgaaatatcatttacaaatagctaagtattttaagaataaaatatattaaagggtgaaacgataattttatccctaatgtaaaccatctataaaggatcaattattgttgtgattgaaataatagataattcataccgtatctatatttggtatatagagtgttctatgtaataaagagtgcaattctaaatctaaagtggagtcgagaggaattaataagttaggaaatttatttggtgaatttcagatctacttatgaggagtttggttacataggtgcatggttctcgcactaactgaaataatattattttgtagtctcaattaattaatttaattaatcaattaagattctaaataatgactatgtcttatttatgaattctactaaggaatggcatatttgagaagaaaagagacatatgggtttatttgttaattagtatactttgtgggtctaattaatatatatatatttaaattgtattttatttgataattttttataattaataaaataaaattggtattaataattagaggatataagagcatctctaatggagatgcaaataagtgatataaagttaaaatatagctcacttaggaaaaaaaaaatgtgttccaatgttgtgtctaaagaaggtgatgcaagtttggcacataacaaatgttataccaaatttggcacaacatttgctatgatgcaaacttggcacttaggaaaaaaaatgtgctccaatgttgtgcccaaaggtgatgcaaatttagcacatagcaaatgttaccaaattccgcacaacatttgctatgatacaaatttgtatcaccataaatacacaattttattattgatttttatgctacttttattttttattattagtatatttaactataacattgatgataaactatttatatttttttttattgttttacataataaaaaaggaatttttacatgaaaaaatataaaatttaacttttattacatttttaccttcacaagggtaggataactttataccttttattttattttatttaccaaaataccacttacatgcataattctcttaatgatgatgtcattgttctcttctttcatttttagctatacatttaaactttcctgcataatttaaagaaaaaatatctccaaaaaaattgaaatctcacgatcaatcaactgctgctgaagaatcataagagttttaattgtttcctcaaattgattctcaacaagggctttaaactgtaggaaggcttctaaggcttcagatttggctctaagaggatataaccatgtgtatctactgaaatcatctacaaagtgtatgtaatacttgtagtttgtgttagatgacacatgtgatggtccccaaagatcagtgcggatcaattctagtaccttagaggctcggctagaagacattttgaatggtagagcatgagacttaccaaattgacaagcatcacaaaacttaacattttcatttcttgaaagtgatacatttttgagaagctaggacatgtttcaacactctaaaagaggggtgtccaagcctcttatgccatacatcattcttggaaataaaagactcaacactacatgactgagatacattatttctgtttaaaatagagacaccagtaaacagttggaattgtatctggttcgagcatttcgactgagatttggctgttgtggcaagctgataaaacccgtctctaagtgtcccttggagcagcaccttccttgttgttttgtccttcacaaagcaaaatgaggagtcaaattcaacaacaacattgttctcagcagttatcttagatacacttattagatttttagcaatctttggaacatgcaacagttcatttaacaccaaggtttttttagtatttgttggcaaattgcttgaaccaacatgaaaaatagcaatttgattcgcatctcccacaatcaacttttccttaccattatagtcgaatttctggtctagatttgacacagttgaagtgatgtggttgctagcaccactatcggcataccaagcatcactgtcaacaaaaactggagtatcaacataggctaaatgaccaccactattaccacttgggttttgagtggtttgagctcgaggatcttgtcccatgtatgattcatcataccgattatagcaataagctgccgaatgaccatacttaccacaaacttggcaagttagtttgggattgttgttggattgaccacgacctccacctctagaaccacccctgctactgtaatgagaggaaccacctctgttgcctcctgaatgtgggttgtagcctcctctacctcgatctgggttggagttgtgactagctttagtacccatgtttgttgtaggatttagccctaaaccagttgaggtactgtcagatttattattgtttatcccctgcaatctctcaagcttgctatcaaaactcaacaacatatcttgaagttcatgccaagagatgttaggttttgcctcaacttgtacaataatagacagatattcaataccaaggccagaagtaacattcaataccagaagagcctcaggataaggatctctgggaagagcaagcatgtcggaccacattttcgtttgtcttaaataatcagtcatgggagttgtaccttttcgtgtggtctgaatgagtgtctgatattcatccattttggctctggagtgtgctccaaatagattttccaatgctcgccaaagtgcagcagaggtagcacaacccatgacctctgtagcgattgtctcagtcatagaactgtagatccagcccatgagcagctggtcactgataatccagtgttcatattctggattgagcatgacttcagtcccttgatctccttctgtagtggctttagctggtaagaactcgggaggacacggcttggtgccattcacgaacccatcaagtctgtgaccacagattatggtggacatcattgtcttccatagggtgaagttgtttctgtcaagtttgagagagaagggttgatttagggtattcaagggctgcgtgcagttgctggttaggttttaggaggaattagcattcactgtgcctgtcgacatttgagcagtagggttacgattggcatgtggtggagtgggggagtttgagaatgtccagttgacattggtggagatctggttcagcggctctgataccaagataaaaaccaataaagaatgaaattcttagctcaattgatactgagtgcagcagctttattaaatagataaggtgaatacaaatacaaccaatacagaattgccacatggcatcacagaatacaatgcataacaaacttttaacaaaaggaatattctagaataaatgagaggacacctaatcattggcaatgattaggtgctactgcaataatcagtaggctcgtgtcctctgtttatacaccattcctgacatgagagagactcttattcaaaataataataacaataatgaaacacattcaagttatacatacttattattgaaaattatttgagaagaataactaataaaaaacaaagaggtgtagaaaaaaaataggattttattcacttgtaaagtcaaaagtgaagtaacacaattataagaaagtttatataagtaactaacataaaagactagaatgaccctaaataatttatttaatacatacactcaaacgcatgatgttattgcaagaagcatttagagttttcttaaaagaaaacgaaaacgagaaattttatgcgcgatttagtaaaaaagtcagctagttgtaacgaataaggcataaaaggcaaagtaattgcgcccaacttcagttggtgacgaaaaaatagcaatcaatctcaatatatacaacaataatagtttataccaacgccactattaccaacgccaaaaagtcctcattaaaaatggtactatcaataacgacacttacctgtcgttggga

SEQ ID NO: 15142 - DNA, 2931 bp, Cannabis sativa
  modified_base (1876)..(1881): a, c, t, g, unknown or other
tattgattcaacattttccacgggcagccatttatgaaattttgaacttttattctcagaaaatctagaatgattgaatgtagagaaattcttttaagaacaaacaattataaaacgtgattttgctgatttttgttttgtggtatggatccttaataccacatggctaaattacaaatcatgaatatatcaattaattaataatggatttttatcatttgtttaccaaaatatagtttgagtcatattttggtagttttacgttttaattttttatgttgtttgaatttaatttcattgacaaaatgttgaagataaaaagaagttaaaagcattttcatttcagattattactgagaaagtgcctcaaaatgagtggaccaaccaagaaagtcgttgatgttgcctttaaggcttcaaggaacattgactgggatggtatggccaaacttctcgtcaccgaagaggctcgcaaagagtttgccacgctccgccgtgccttcaatgaggtcaacacaactcttcaaacaaagtttagccaggttcttcttctatccttttctttgtcactatagcttgttttctgaaattcttttgttaagttattgtttggattctgcttattgaattgaatttttttgagtgaagattaatattgtttcatttgttgggggcttaggtcatttattgaggctaaaacttagtgtctttaatttcaaaatttatttttaggcatgtaaagattataattgtttcatgttttttggggggaaaatttaatataaaatttttgttgattttgattgtatttataatcagcagaaaatatgggacattgtcgattactgttcggttcaagataaagttaataaaagagtaaatagaaagtaaaaagtttcaaattttaccatgattggtacctgagcaaccacactttggagccgtttgaaattttaatctaagatagcatcaaatgtttactgtgcataatacaatgtaattatgtttgcttttgtggcattattgtttgctttattgatgtgaacgtttgtttttttatgtcatttttgtgcacatttcaggagcccgaacctattgactgggaatattacaggaaagggatcggatctcgcttggtggatttgtacaaggagtcttatgacagtatgtaaccatactaatcactttattatcttgcgtattatatgtttattcttaaaacttctcaaagctcgtataagcgaaagtgcgcgactatggagtttcattatgttacttgtttgcattctattttgagcttattactttcagcttttagtctaatattaatgcagttatttgaagtacattgaatttttcatatattctactctttaggactactttaaaaaagagattagaacttctctccggaggggccattttgatgtgaatctatccttttcttcgtgattttagtattcttcagcttctttattgtgtagtagcttatttaatttgcttactcttattctctttacaatatgtgaatattgaacacaatacatttaataatctaatctatgccgatgtctttcgatggatcatgtcatagcattgtttttgcttctattttctttggcctgaaatgggaaaatctgtaagagcgtggtttgtcccatagacatagtgaaaatactaaatagtgtttaaatgccaggactcagattcagatgagtttttttaactcgaacaagaacttactgttgttgtgtttgataagaatatgttaactctttgttcacgacattccaacgtgtttagtttagcttaacttgggctgccttttgtctgctcagtgaagttttttggttatataatatatatatatatgtannnnnntatatatatatatatagtgtcaacccatgttataggatcattgaagtttcataagttattcggagtagagtttgctttaccaatcaacaaactcagctgtttttctttattcatttctctgaatgattttcatttgcaggcatcgaaatcccaaagtatgtagatacagtcactcctctttacaagcccaaatttgattcattggtgagaattgaccaacaataatatattatataacttctttctttgaaaatttttcatgcttgctatctcctttttctaacaactactaccctttactactgcagttggtggaattgaaggaagcagaggagaaatcttttaaggaatcggagcgtttagagaaggagattgttgaagttcaagagttgaaggtaaggaaacagaacaaaactcataacccgagagggataagctcgaatgttacacatgtagtttgctcgggaaaaagtaaaagaagtcatctttttcttcttattgtgataatttaaaactctaacaataggttgtgtgatttttcttgacagaaaaagataagcaccatgactgcaaatgaatactttgagaaacatcccgagctgaagaagaaattcgatgatgaaatccgaaacgactactggggctactgaggaagaaacaaacatgcatttgctccatcttgcctatataatttggtgtccttgtctgtctgtcagtctcatcatcctttaataataatatacataaccaaattgttttctttgtaattttggtgactactgcatctccatcgaaaatttagggcaatcgatcctgtttcctctcgtaatcgttggacaaattgcttggatgtgcaaaaatattttggttgtgattggaattttttgtttcgcaaaataattcggtcgaattcatcaacagttttattgaattgagtagtttgattgatcatcctaatttgtgtggattgttcaatttgttgaaatatattgtatgcgaaaatacaactgttaatacatgacttgcaaagttttaaacttttaacaaaaa

SEQ ID NO: 15143 - DNA, 13084 bp, Cannabis sativa
  modified_base (12342)..(12343): a, c, t, g, unknown or other
ttagatttgatccaatggctaataatagaatatccattcatgggtaatacccattaagagcatgctcatatatatatataaatatatattgtcaatacttaataaagccacacacgactagggtttctcagtttcatcactcaataatctcagactctctcactttcacccagggataacaatataacaaatctttcatctgattatttaaattattctcttaattttatataacagttttgtgtacttttgagatcgaatatttgtttaattttttgagtctaaaatatatgttattaattttcagttcatatctccaataatgttgtcaattgttgcaccactatctaatgtcatcatcccatccttaccaaacgaattggcattgaacatcttagctcgaataccaaccaagtactatgcggttttgttagttgtatccaaatccattagatctgccatatgttcttcgcagttattcgcagaaagaatttgcctcaacctcaccaaacaactcctctacttcaaaatatcctccccatacctagactccaccaaatggttagccatctctgatcaaaacccaataggcaacaagaagaggcttctccaagccgttgagctacgatcaaaccaacctaaatgtaaggttgttgcccatgttgttgtagaccacaacatttatgtcatcggcggcattagttatgatgatcttggtaataaacattgttccaatgatgtgtggatactcaattgtctttctaacaaatggtatcagggcccaaacacacaaacgtcgtatgctgttgctgacacttttgtagcgaacaacaagatttatgtggttggaggttcgtatgaaaatcaatttaaacaaccacttatggaagtattggatccggtggttggacattggaaaaaaattcatttctttgatcacttggaattaataagaagaagtaagtttaccctagatgtatctaatgataaaagaagagagtgtgttgtcgatggggtgacttatcgccctattttagaaggtggcactacacaattaattgggaaaatcgaatggtatgataagagtgaaagtgagtggaaattgcttggagatgtgatgaaatgggagagaaggtatgccatgcgtattaaattggttaatttgaaagagagattggttgcgatatgggtagagaggtgtttttttgatgagtcaatttttgaggtatggtgtggagaaattgaagtgagtaaaaatgttgatgaaaatggtcatttattggggaaaatgctttataagttttgtttgcttgaaaaaggacattctccttcgaatctacatcgtatttcctttgacaattcgctattttttacagcacaaatatctgttacaatctaagtttttaggacattatatatttgtgaaactttgctcttttggtgtattatcttttttatattttgttgctctattatatcgatgagtacttttttttttaatttattattaaagtgttttatattatatttttgagttacatatttgatattcgatgaatactttttatatatccgagtactttttatttttatatggtcacttgagttagtttcaactaattgatgagaatgctaacttataaatagtgtattaatttctttacatatttgtttaacttgtgttcaagatcatatatatttttattctctttgcctttctttgattttccgaaaagaattaacatgttaccaattttaaacataatcaagtactaagacaacttcaagatgcaaataagttatatagaattatattagaatttgaagaatttggtatggtagggtgggctatttggaatttgaagatgcaaatcaaattatgatctctattttgttatttagtcaatttggtaccaaacatttcgttaattatactttgagctaaatatttctaatttcattaatatataacaaatcagactaattactagagacttgcattgagatgtgacattgttttagttccctccaaattagatatattactatatagtcatgtgtaacatctcttgtttattagcataatatgttcatttagcaaaattagtccatttcccatttttatttttatatatgcacacttataagaagtaattacactatacagtactatactacgtacaaagaacaagtatagattttgaatttgtactttttcttttttatttttgaaatgtagcaatttggtttaagagtgaggacaataaattagtaagaataaaatcttcactaatagtacaactaattttaaaataagagtttctaacaaagtaatgagatatcttattgaggaatggttaaaaaaacaatacacatttattaactcaaataacaataatttagaattattaactaaaatgtcatataatagttttcttgattgcgtgcaccacattaataaagtttgtttttaccaccacatttgaccattcaaaaagttttatctacttcaaagctttcttgatacttactgtctcagttatttctagtttaacaactcttcgcaaccttgaaacacttcaataagagagccacaaaattcatagccaaaacattttgcttgagtgaaaagagtctcattcacattaaatttcattatcattatattcggtttagttcattgtttaactctttcactatcaattgtattcagaaaatatcttaaataacttcactttacatcatcatattaagaaagaaaattacaaatattcttatataaaaaatacgaaaaatatgacaattagtgtgaattttaacatgagttaatagtatcaaagttaatgtagatgcaacatgctaacagtttttgacggaagcacttgtttttcgcatagttctatcaagcgcgagctaactgaggcaatgggtgtacaagaggctcttagttggataaatgagcatcattggcaacaagtaactcttgagacaaattctatgtgtcgtgcgacctttaagaagatttatttttaagatttctttatttgggcatgttattaaagattgtaaaactttgcttgctgaattgagaagtatttctgttttttttttttttttttattttttttattttgttaaacaattaactaatacagtggctcataactttgctagctacaacttcttatattttgtatcctaatcgttgttttaatttgaagtctattccaattgatttgtttcataatttgataattgggaataatagttgataatgcttgaatttccattaaaaaaagagtaattgacagtaaaatctcttatgttttaattttacacttaaatctctaattttttttttttgtggcaatttcctcgtaaatttacttttgtttacaaatttgaggtgtcaattaatttcaataggcattgccacactttgaacacatataaatgacatgttttcattagattcgtgtcacgtgtatacatatattacagtgataatcttaattaacatttaaggatgaaatttaattggtacctcaaatttgcaaacaaaaataaatttaagagggtattgcttcaaaaaaaaaaaaaagtgtataaaatttaaaacatgaaagttactcccctaattacttagaaaaatactattaagtattaatgataggcaccaaaaatacttacaagtaaaaaaacgacgtcgttttcttcttcttcttcttttgcttaatccataagccttgaattgggcgacagttattcctaaagtttcaatttttattttctttaatccaaatttgagctaagaaagaagtgagctttgagtgtttggaagccgagaaaatcatcatgcagaaaatggcacagggatggttttctcagtccgataatggcggcgacggattggagagaccttcctcttctctgttagctgattggaactcatacgccgcatcccaaactttggaagatgattcttctctgaatatgggtttcgatcttgaatctgctgttcgatctgctaacgacactgtttctggcactttctctgtgtaagctattcaattttacccaaatattttgtaattattctttgtaaagattgtaaagaagctgaatctttgacatgtattctgtttttagattttggatccagaagatagttgttttgttctgagtattatttgtggttctaacatttacttagtttgttaagagttggaatgaaatgaagaaaagttagctctcagtttagggatctcaagacatttcttttgtttgcttatgaatttgtggttgaatttgaacttgttggaacttcaatttctaatagtgaatgtgagtgtttatagaaaagattagattttgtgatagggagagattttgtaaatttgaggttctttagtaacttttgaaagcattgacttggtttgatttgattagttatggtttgcttataaatggagagtatgtagaagtttacttatgtgaatttgatcttggagacttcatgatcttaatgtgattgatcatttgtgtaaaagagagaattgtataggaattgacttatttctgctagcttataacactttcgtctaagcttttcccacacgaaaaggacaattacattgccaacatgtaaagatttaagcaccaaaatgtttccagttaaaaccaactcctattttcaactcaaataaactgtgcattgtgtttatcgaagcacttgggaaaattgtttgtagaaatgttagcaacgggacatgacacacacaagtgatactttgggaagggtgtttttgttctgtattatgttgaaaatacaattcaattcttatgatgatagtgccatttgtgtgtagaatataactctgttttacttgtaatgcaaacggttcggcaacttgcttatcgaaattcaattctgtatgatgatagtgcgtttgttattggaattgtataattctgctttacttgtaactcaagcggttagagaacttgcatatccaattttcatcatgtttgaatccaattacaaagaaatcattgaggataaaaacaacctgatttataaatggtgtagcaattgggttggtaatcttatgtagtggtgctttatgcagctgtttaatttgttaataacctgttcagggtttctaaaggtgtgagagaactacctgggagcttgcaatctgccacgagtagtgttccatcgggaaaagctctcatgtacttcggtctatttcttgcaactggggtattttttgttttcctcgcatttaccatgttccttcccgtcatggtgttgatgcctcagaaattcgctatatgctttacacttggctgtggctttattatcggttcattctttgcactcaagggcccgaaaaatcagttcgttcacatgacttcaaaagaggtacttctgttttctagataaggcctcctcttttttgatgcggttgttcatacctaacatgttgccactttttcgaattattttgccagagacttcctttcacattgatatttttaggcagtatggttggcaccatatatgtttccatggtgcttcacagctatgttctctctgtgctcttctctgtaatacaggtatccacacaaaatctcttttctctttttcgtttttgtatatatttttttaattattcttttaccatctggatgatgttcccattcgagtgctctttccatgattttcaggttcttgcactcgcatactacgcgttttcttatttccctggtggatcagccggtttaaaattcattacatcagctctaacctcgtctatactgaaatgttttgggaggtgacctcgacctcattcatgatatgtttgtttcctttgtatatttctcactcaacttgagattttttgtcgatgtagtagaaactaggggaggacctgaaaatacgtaatactgatttgatgctgtgttaattgagctattcccaatttctgtgttgctgatatagtttgtgttgaaaaagaagatgccacttttattcaccttaagtattttaggtgaatggaacaagaaatagttaatgactgtcagtaaatctggtaaacatgaaggattctttgccttactatctattgtagatgatatgaatagatgtcactgaaattgttttctctgcaaagttggagagaatttactggcaaacagtaccacgatttaggatgaaaacacaagaaaatggttggaaaataaagtaaaatatcatatacaaagaaagtttgtggaaacatttctgcttaatgtttagggggttaagttgaagaagagaataaaatactcaatatggccaatatatgatacccaagagggttaacttcaaatggtcaaaaatgtatgtttacaaggtctgaggttcaagactcatttgggtctatatagcaagatcaagtttcgagactctctcgggtctatatagcaagatcatgtttcacactctcgggtctatatggcaaaattagcaagatctgaatttcgagactttctcgggtctatatagcaagatcaagttttgagactttctcaggtctatatagcaagatcaagattcgagactctctcgggtctatatagcaagatctgaggttcgagactttcttgggtttcgggtctatttagaaattgctataatttcctagtccccaaatattagtgataggcagagagccacagcagggagcctgtggccaatatgaattctcttattgaaaaaacaaaggttcatgataagatttaatgttagtaattctttctagatatctgaataggattcagtccttttggaaatttatatccttgcatactataactagttttattcatgattgaagtaattattgttatactttagtaacaatgaaactacacaggtgattctgcatgttactttcagtgtaacttcagggctcgaaagagatcgagatacatcttgagctagcctcacatggcttgtgtaatatatttctctggtaagatttcagagttctttattatcaagttatggtaggacagatatagatgaaggggtcataatgggcacaccataacttcaacagaccaaacgttaggagatagagagtgggtgatagtttgcgtccattacaagatcagaaaagcttagttgtaaatggtccagggctggggtatagtcttagtctccttaacatatatgggccaagtgtctctcccacataagcataataataataataattcaaaaaggttagctattctttctatactgctggcaatagagattaacatattgggaatgaatgtgttaaacacaacacaacataacaactcatgatctgcccactttttcttattttttatacttgtacagttattgtttgtcttaattagatgtgattaagggttatttgtacagttaaacttgtggcgaaaaaactactaaaggttagtaaatttctgatacaactacttacaggtagaattcactcgcaaaagttaacctaagagaagaaggtgcccgagtagttatattctactaactaatcccatacttgatcaatgtgggattctcacaatgcaccccctttcagagccgatgtccacgacggcccactctacggtggccacgtaattatattctactaactaatgtcatacttgatcaatgtgggatcctcacagtgtaccccattttagaactgacgtgcacggtggcctactctggcctaatccacaggtcgccccttccataagaacccctttctgcgatattggtcccacttaagggtgcatgattttgataccacttgatacaactacttaggtagaactcacttccaaaaaatttcctaagggaagagagtgcccaagtagatatatacttactaaccaatcccatacttggtcagtgtagattctaacaattttccgcaaaatttccttccacatcagcgaaagttaaggatgcatagctacgaaaactgtgttttagtgatcttaagtagttttgctgttaaaatctgaggtagtttcgttgcaaagttttcatgctaattcggaaaaaggtcaccaattctttctatgctgctggcaatggaagttagcatattgggaactcatgacatggccactttttatttccaatggtacagattattgtttgtcttaatgagcttgtttgttgcactgaatgggctaaagggttactcataaagaccttatttaatgttattggacctgtcccttctgttgttgttgttgttgagttttgccatctctactctctgcatatgctttaaatatgttatgacttactgaaaggagctttgattagccacccaaaatgatcaaatgatagttagaaaacttgaactatattgaaactccattgctttaattgtgctaccattcattgcatttatgctgagtttatacttcactttttattttctgagatatttattgatatttaaaaagtagctattaggtttcatcaaatagttctagtcacttttgcggggtgtcattgttcttcacctcggttcttaggttcgggggatttccagatctttattggccttgtatttggtaaaataatctcttgtgttggaacagataaacataggtttattatttcgtaatttttttagaagattattgagttaaatttctcgttggacgattaatagctcatatttttaattgtaaatgtttggtaagcttatatcagttgatttacgagtgttatcctcgtgtatctgattcacctattaatgaatattttttttaacgtaaattctcaagtcttagatgggtaaaataggtatttccttgttttttttttgtttttttttttaacacacatcacaatgtattatttatagaatttagagatatttgattgccaaatgttctttattataaaaaacagaatcatatagtagtgaaaactcatgaatgtttatgttaaaatccctttaaatttgttaggactttctttcattttgatgatatttagcaacaaagtacagaattcagaaaaatgttgcagaagcatatattagtagtagtcttatgattttgaagagctttggaaattgaaatctcagcttttaattatatttagtcttgtgggacaatttattcacttcacatgattataccttaaacccaccaaaaattaaaaaaaaaaataaaagaaacaacaaattactatagcatttctaaaatatatcaatgatccccctcttttttaaaaaatttaataaatttgattgattttaaatatataatattaatatatacatatattcctataaaaaataattattaaaatttaaaataattaatatattatgtatagagtaatgaatagcattctataatatgaaagagtttgaaacatttgatgtaatatgtttttagtatgctttttaaaaaaaaatttaaagttcagaagttgatgtgagttctctaattctcatattagttcttcatattattttttttactattttttttaagaatattgttattgggtaccagtagtgttcaacacattctataggtgggtcttcacgattcgttagcaatattctttaaaaaagttatataggattcgatatttaattacacaaataacggcatggcaccgaaaagtgtgttatacaccagtattaccttttaacaattttttttttttttttaattttcaatacatattctttacacatcctatgtcactaaaaatgttaataaattgtaaagatgaagaagtatgaagcatcatgcagcacacaaaatttgactcattaattaaaataattagatcttaattttgtgctttaacaaaaggatgagttcaatgagttatttttttttttaattattattattatcctatgtgagagcctaacctatgtaacacccattattatactttgtatttatttattttaatatattttttggggggttttttttagtgatgaaatggtctagtggaaagggttattttatatctaaaaaaataatgaaaataggattaaaggccgtccaactaaaataatatccagaaattaaggaaagatgaggaaagcaaagactgtgattaggggacaatgaattgaccttcaatatgtgacacttatataggcacaaatatacattctatattatagcctcttttgttcattgttaaaaaaaaaataaaataatttattttagaaaaatttataaaatggactaaaaacaaattataaaaatacttgaacatggattttttttttttttcatttttaaaatcttttttatttacaaaaatactttttcagtaaaaataataattttttgttgttgttgttgttttatagttttttttttttgtgaaattaatttttgattattttttagttgttttcttatttttttctaagcaaaatatatttttgtaaataaaaactttaggtcgtaaaattgtaaataaaatataaaaaagattatttttgaattttttctctttttttattgctgtttttagtattttttgttatataagttataaatttacttgtttcatataaccatgtatatgtatagtgtagttataaggcattttctataaatttttaaaattttggaataatttagtggggtgaaattaagattgggattcaatagcttgttgcatgcatgcaaaaaagttatttgaattcttatttcaatatcttaaattatctaaaatttcttcaaaatttgtgagagatttactataactacattacacaatgttctgtaaaataatagaattgtaactcattcatacactgaaagtatcgaaaatacatatatatggcgattagaatctgttactattataattttaacattttatttatttattttattttgctttcttcatggttttttacttgatttcaaatacaaaatgcattatgtatgttttggtttggttttttttaatacaattttaaatgttttacttttattttatttgttacttaaaaatttaaaatataaattttaaagacaaataaagggtgtctttataaattataaatggctctattaatataggtaaaaaaagtctaacaaatggaaaataaagctaataataaattttctccactaactaaaaaacaaaagaaagtaatggattcaaagatcaatatgtaaagtatttttttaagtgtcattactactatacatacatccaagataggtttcaaattagtgatgtttctttcttaattaattgactaatattattattatcttatcacctaagcacctctccactttgaaccattacatcataataaataataataataagccggcattaaaattttaatgaacttaaagaaaatttagttaaaaaaaaacgcaatacaacagaataggaatagaataaaatttaattaatatgcatataaaaatagatagaagaaattattaaactttttttttatctcgtattagaatgattttaatcataaaatgcagtcatatataacaaatattctacaaatttggataatttatagtgttgaaattaagattcaaaaagtatattgtatgtatttaattttttatacatgtgaagaataaatttctaaactttgattttttataaattatgtggattttctaaaaaaattacatgagagttgttataactagaataaacactatcacataaaacacatatattataatcaatttaagtgtctaaaacaaaatcatgtcacaccgatacgagaaaaggactacatcttagcggtagaattgctcgagaatattaagaggcggattatgattaaaagtgagtcttaaaagatgctttatttagtcaaaactatctgatttgaatgtaattagcatagcttaattatgcattttctcttgatttgattgttaaaagccaaatgatgatgattatatatacataattttatgtttaattattattaattagtttcttttttattttcggctaggtgtattattgacatccataaagttagtttaatagaaagtaaaaattggtataatcatattgtcaaactagagatagataaatgggatacgtggctttcacttgagtcaaaagtatgagaaaaaataataagaagaagagaaatacaatataatacaactcctttcacttcttaataataataataaaggtaaatagtggcataagttccaaagtttcaagtttttaagtggcataatctcaatgtttatttttagcggcataagtacccaatgtttattataaaactgtaatttttnnctaattttgtcagtacaaactctgttattttcttaaataagccacatataaggtccagattctaggtcattgagtttagacatatatagtatcagttactttcaaatgttcttttaataaatttaaaacggagtttgtactgacaaaattgaagaaaaattacagttttataaacattaggtacttacgccgctaaaaatagacattaggtttatgccgcttacaaacttaaaactttaggtacttatgccgctatttaccctaataataataatataataataagtaattagtgtaataatgaagttttgggcaaattgccaatattattttcttagaaggcatgcatgatcatgaatgataagtttaaggaatgtattgcaaatttaattgttataatatacatatttaggaacctaattattattgttaatttatataattttaagaaactaacacactatatatttttatttaatttttgttagaagaatagtttgcattactatttaagatagaaatgaaataatagaaagatgtcttccaaccaaataattttgtgtttaattattaaaggacatgttaagtcatgatttgctaaagtaatcgatataaggctaattttaataaataaaatactaaaatattaaatttgttgagatttcacactaaatttattctaatcacactttaaaatttatcgtatatgtaaaatttattaatattaattagtgtaatact

SEQ ID NO: 15144 - DNA, 2426 bp, Cannabis sativa
tattcgtactaaaaaaaaaattaaaaattatttttattaaaaaaattatcaaaaattaagtttagagtattaattttaaaaaatataaagctcaatttattgcttaacaaaactaaaagtataactaattatttttacaaaataaaaagtccaaaacaattaaaaaaggtacaaaataacattaaccctaaaattaaattaatatagagtttttggaggttaaactttcttaattattgtttgacttccacttaaccctccaaactcaaattttgactaaaaccttcaaactactaaactgttagcaaacgtaagatgtcattcggttaactaccaccacggactgtttatgtgtacactcttgtacacgtgacgcatttatattagtacttctaatattattattttaaaattaaataaaattataaaaataaaaaatagaatattaaaaaaataaaaaaatattataaattttgaaatattttttttatttttaaataataatattaggtgtaccactataacatattacgtgtataaaagtgtatacataagcagttcatattgataattaattgtgaaaaataaaagtcatcttaaatttattaacagttcaataatttaaaaaattttaccaccaaaatttgaactttaagagttaagtgtaagtaaattaataatcaagagagtttagcctcaaaaactcattaacataatgaaagaaaaaaaaatattttgggtatagaatatatgggcccagcaatgttagatggggtatcattgtttcaccattgaaaccttcattaattctcctcatcatcatcataatggctgaagtaaactggagaaggtaatacagatcagatctggtgggtcttcgccacgtggacaagtacaagtggctatgagaataagtacatggtctgggcccttaaatgtttgggcaaagatgggtttcactttcaaggccatcaacaaggggaatttgtgctgggtgtttatttgtttatgcatatcccagctatgtttagctgtaacccccaaattggaatttggctatggtcttataatatattatataataaatattttaatttcattccttttaagttgataattttgaaaaagttggtgtcatgtagatttagattaattctttttgtacaaatggcgagacttgtctaattctttgtaattattatggttgaataaaaagctttaattagtttttttttaaaaaaatatccaatagatctaaagtctaagcccctcctctccatttaaaaaacacacatcttttagttggtttcttctacatattctaatacttgttacttttgaccatctatcaaccaataaataaaaacaaaaccaatatcaaaattaagttggtaaacaaaattcaattcaattttaattataacgactgcatgttaaaatatgttttttttcttaaaattagtataggtctaaaagaagaaaccagtcccaactgatgtgctaccttatttggtagcttaatttgttggctaataaaagtttctttgccttcaaaaaaaaaagaaaaaaccagtccacgtgttatatatagaaaataccctttcaaaaaaagaaaaagaaaatataagtatgcattaaaatattgatattttatagtttctgcaatgatatcatttttacagagaagctattaatttataaaaaaactaagtagtatatttcagcataagaaaaagtagtacatttctaaaaaagatacaaatctaaattgagctacgtcaatattcttgctagacaataatttagagatgcttacgattagattagtacaccaacgaataaccggtactttataatttaactaacttaattatacaactactaaaagttcaaagaagtgcaagagctcaaacaaagtttacaatggaaggtaaagagccattctagccaacctcattatcaagtccaaaaccctttggctaatctatgcgcatcttcattgtcatttaatttttttaggatatcgcctagtcaaaaacactatagactttatccagtacagctttacaatttgtcttattacactaaactggtaacaatgtaggattaatattcctaagttgttgtgaaagcctgaaatgataatacccttatgatcatttgccacagtttctaaactgaacttgttatacctttatgatcatttgccacagtttctaaactgaacttgttatctgcatggaggcttacgctgatcaaattagtggcggcttctgtaacgccctgatacttaggcaccttacagtgatttttcaattacagtgccctctttgcaaatcaaaaaaattttcttgaaaatcatgtcaaattaaaactttagatttaattactaaaattttattaatttttatacatttatttacaaa

SEQ ID NO: 15145 - DNA, 4159 bp, Cannabis sativa
  modified_base (2510)..(2520): a, c, t, g, unknown or other
  modified_base (3755)..(3760): a, c, t, g, unknown or other
tctttatttaatatattgtccttgtaatattttgtttagagttgtaattgtcttagtcttttattcatcttattttattcttccattgtaatttctttattatttctaacatagcatgcctactagagtccttgaaaacattagcccttatcaatgcctctttaacaaatgcctaactatcaatttctcaagccttttggttgcatctactaccctcatatgaggtcatactattctcacaaaatcagtttcagatcaaaaccatgtagatttttgggttactcaccaaaccacaaaggctatgtctgtgaaagcactactggcagaaaatacattgcaagaaatgtagtatttaacgagcatcaattctcatttcttacaccaaatgctacagattaggtacttcccaatccttccaactccttacctttagcttagttttcacctaacattgtccaacaatattctaacatagatgcttttgttgtgtctagtgcttctgtccatgaaactactgagcaaattgacttttataacaccaaagttcttgaggtgtctggtgatgcaacacaatcaccatagtctcctagctcctccctgtctcatgtcagccatactactacagttattgaggctattgccactactgatacttcccaacaggattccccttgttgtgacacattttctcagcctctaattcatacacatcccatgcaactagatcttaaaggggcatccacaaacctaaggtctttatggccaccaaatatcaattatcgtcttccttgctcccaactgaactaatttccacaaaggcagcccttagtgaccctaaatggtatgcctctatgaatgatgaatatatttccttgaagaaacaaaatacatggacattggtcccttacgccccaggaatgcaggtgctaaccaacaaaaggatgcacaagatcaaactgaaagaagatggtacaactgatagatttaaatccaaacttattgcaaaaggttttctacaaacacttgacattgattttgaggacacctttagccatgtggtcaatcctgccacagttagaactgtgctcactcttgccgtctcttatgattgggaagttacttaacttgatgtgagcaatacttttctgcatggaactctaaatgaacttgtgtacatgcaaaaaccagctggatttgttgatccaactaagcttacccatgtttgcaaactgaacaaagctctctatgggcttaagcaatccctagagcttggaatgacaagttgaaacaaatacttctgcattgggattcacacaatccaaattagacacctcattatttatttttagttcaggaccaacactcatcttgttattggtgtatgttgatgactttctcctcacaagtccaaataaagctctcatacaacaactgattaaggatctcaatgcccacttctcactaaaagatcttgtccctatccattacttccttggtgtggagattgttcaaaattctattggtatgtacttgtctcaaacaaaatacattacaaacttattggttaagctccatttggaaggtgtcaaacccaggtcaagtccaagaagctcagctcacaaactctctctcacataaggtgaccattttcctaatatgcatctcttttgtagcaccattggagccttgcaatacctcactctcaccaggctagatgtagcttttacaatcaacagacatagtcaattcatacatgctcctactacaactcattgggaggcacctgagcggttaatgagatatttcaaaggcacaattattgaaggcagtctcctcaaaccaacaccttttctctccctatatggttactctgatgttgattgggccagctaccctgatgatacattattaactgggggttatgccatgttccttggagataatctgatatcttggtctgccaaaaagcagccaattgttgcacaacccagtaccaaaagtgaacttcgagccttaattagcgaatgatgcctctaaataaagtggtttgtctcccttctctctgaacttcaagtacaactgcacggaccaccaatcttatgggttgataatcagggagctgctgctcttgtaactaaccttgtttttcatgctcggtgtaagcatatcaaaattaatatgcactgtgtcagggatcagatcattgcaaatcaacttcatgttcattatgtgccatctgttgatcaagttgttgatttactctctaaggccctctctactgactgattacaataccttaaatccaaactcaaagtcaatcctactccctttcgtttgaggtgggaatattagctaatattaactaataaatcgttagttaagtcaattagagttggctatactatttaattagttagattattaacgttcttgttgattaccgactgtaactaattcttttatattttttagggttcgtttggtacattgtattacaccgtattgtattnnnnnnnnnnntattaaattgtattttatgtaaaactatatgtggtattaacttttatgggcacctaaatatataatattttagtataaattaaagtttaacatagtattacataaaaatatgctatataatccaatttaatataatacaatacaatacgacataatacgacgttccaaacgagctcttattctataaataaaggcacttgatcattttagattaatcaagcattttaatgataattcagtgtgttgtttttacaaaactctctcagcttaaaagtctttttacattaatctcactttatttaatttggcgaacttctttcataatcttagtacatagaaatatcccatcaattataggtggtattataatgttttgaaacaaaaaaattaaattaaatcaatatatataggagagttttaagagatcgagtttagctattctctactatttcaatttttatcatttgtttaattttaattattcttttcacttaataatctaatggcttttcagttttttgtggttgagagaatgacttttcagttttaatgtaatgaataataattgataattaagtatatatctttttttaaagagtatttatgttctcttgaatatttaatataattaataaggacacatcaaaagtttcaaaaaataactgaaaatatgaaataaataaaaattttgactctttgaatgttttatcgatttagttttcaaaaaaatacacatatatataggtaagtatttcagccaagcatccaagttggagtatatatctagaacatgaaatctaatttgctttagttcagaagaataatattctgttttgctttaagaaaacacagtaaattcttccaccatatataattatataatataattaagctttctactattttcatttttaataatcttttcttgattacatatttatatatattgtttagctggttattaaagttttattagctttcaaaatacagtaaattttttttgtctccatatatacatatatttatatataatttagaattcagattacccaattttttttttttttctctagaatttttaatattatttcataaatataatattacttttttttgcataagactttgacaattggaattcgctgaaaatacatatatatatatatatatatataaattcatatcgatcgaatagattcatgtttgaatatcatcaattattattattattattnnnnnnattattattattattattaaggtgtaaaaccattataattacactattcttttattatttgaatttggattaatgtaattttttttttgaaagattagtgtaaattttgtttatagtattaaactcttctttttagtaatatttcttttttaaattcaccttattaatttaatacttaatcaacaaattttttaataataacatttttttttcaaaataataataataattttgatcataataataatgatgaggttgtgtttcagaaagaattgtatttcttttgttcatttatttttttttataaaggatgttgaccgaggttttcggcaaccaataaaatattataagtttatggagctataagaaaattagagaatgatttttacgtggttgggg

SEQ ID NO: 15146 - DNA, 5646 bp, Cannabis sativa
aaagtacaataacgagacaaaatcatattcctctatatatatatatatatcatttcattttattttttttaaaaaaaatatgtatgtatatatttttcataaatggtttggcttaggttaggtcctcgatcatagattatgatgattcatgatgaatcattgttgggcatggagtgaattggctatgatcatgtatggattttgtattaataaattaattagaatagaaatttgtatagatgggcacatgagatgagatgatgataagaattggcacacgtgcacatcatcacaatggttgtcaaccctgttgttgtagtagtagtaaaagtaatgtcaatgagttggatttggcttttgttttctcttttgttattttcactgcttttcccacctcttttatattcctttgactttttccaaactatatatataatcaaaaacagaatcttaagttaaggctatcattttctattcaaattttcaaccacatttttcaacctgcattattcgtaagatttgttctaccatatatatattttcagtacaaatttaggtgaaaaactggcaataggctatttttatttcatgatttcttttagtacgtaatcaattttttttttcgtgaatatatttaatatgtttaatatatcatataatatatatttttgagatattttgaaaaaaaaaatactataaaatgtaatatttcgaagacattatataatattctcacacaaattaaaataaatatatatatatataatattataacatttggtatatatatataagcgattatcattattttgtccatgttacttattaataaaaatttccatttatcttttaaatatatacaaatacaatattttaaaaggagaagtaccataaatattatttttttttattttttttttttaaatttatcgtttgggtttctaaacggtagtttcaatgtgggttgctatacgattttttattgcaatttagatttcagtactagttaaaataaaaatttaaaaatgcaaaaaaaaactattttaaagtgtataaataaaaaaccccgttttaaaaatactaagtattccatccaatacataaaataagataagataaccatgttatttaaaaatcaaaaaaataatattttcaagaacttttaaaatttacatatatatatttttttaaataatatagttttttttttcttaactcttaactaatatagttattaggaggtttttattgttcttgttgttaactctaacaccttttacgttaagaatttttttaatatacttctgctaagtaatatttttaatgaggatataattagtttagtttcaaaaattattctcaaacttcatgcatgtgaagtactcaagtaaatatttagtattaaaaaagtctcccctttcgattatttattttataattaactgattataataattttgaacgtagaagacaaacttttttgtgggcaataatcactaacattgaaccgatctatatattattataacagaaaaaatattgaacttttctatgatcgtatttttaaaaaatttgctatactttacacctaaaatgatgtgttcaggcctgtgattattagtaataagaacaatttgttatacaatttatatataaaaaagcttttaacctttagactatatatcatcatgattcatgatccctcctttaataatcaatatataaatttacttgcatgcaaaaacctttgtgtacttttttagtacaatacaaaaaccttggtccatgaatcagaccacccagcctctaaattgacaaatgacaattcaatggtcaaaatctggctctttggaattttcaacgaaactcatttggatttttggtttgttggggtatgtgatcaccataggttaatgaactttcaagacatataattaataataacaagttttcctgacaattgtagcctcaaatatttgtctattgtcaatattagaataataataatgataatattcacctcaaagaaaaaaaaaatgttagaataatattattgagttaaaccggccttctcgaacatctaaaatactctgtttcaaaaaaaaaaaaaaaaaatctaaaatactatttttgaccttgaccggcctatagttttgtctcaatcgatattaaaaaaaaaaatggaattttcttctcaattatataaattatcgttacatttatttatcctatattaaaacgagaaatagccctttaagccaaaataacttcattttgaaaacacacacaaaaaaaaaaaagtatttgcagcataaaattttgcttacaaaagtttaagttttacatagataataatgtgatatttaacgctaaatatttacggaagtttataaaaatataatttaaatatcataacttatttaaaaataaatatttttatttaatttgtcaaatacttagtggagactctatcattcaatttttttagtgatgggcagtaatagtaatatatatagaggagaaaaattgaaaaagaaaaaagaaaaagaaaaaaaaaaagaggagggctttgactaggagagacagttacgtggtgtttagcaaaatcaactttagaatgataaccacctatgaataaatggaatgtgtaaatgttcatttgctaccactataaatacaaagaaaaaaaggaaaagaaataaaaatcaattgtctaaaatagtttggacagaaataaaagatgatttgtgaagattttatgctttaaaatggaccattaaaccaataatttatgggtactttctaaagaagagaaaagatttatatatatgggtgaccaattgaaatgagtccctgttgaagttggttcgaatattacaactcattattttagaatagtataaggcatttatatacttatatatataacaataatgatatgtgtgaatatatcgacatactaattgctagtataatgttctatgatgtttttctttgatcgaaaaatcaaattacaaacttttttcaatctctatatttagtggcaaaacagaatgaaagtttgaaaatttgttgggaatcatttaataatggtggaaaatctctcattccatttcaagtgtttgttattggtcctttctggcatcacaaatcttttcactttgtaatttgtattctctccattttaattttgaagaatcttttggtctcaaccacatcaatttattttctcacaagttgagaatagtacaatttctttcctttctttctattgtaaattaggggtgtttacaggacgcgaaacaagacatggacatgcctgctcgtccccatttgaattaaggttcggggttccatatttacaagagtaccctaatctctatgtttatatcgaataattattgtgaactgtacatgctattcaaatagataaacaacttatttaattagatgattttttattatattcgagttttacttcttgtaaaatttattaattaggttgtaaatatatatagagagaaagaaacaaaaaaaaaagtagactagctagttactattactactagtagatgagtagtgaaagactttgccatgatccacttctagtaatgacctttgagtggagttcctattcccacttactttactatatcaccttaaaaagacaaccttttaaaagaataaaagagagaaagcaagaaaccaattttttattttttttaaaaaaaattattattatcttttttttttctaatttttcttagaatgcaaaagttattcctctcccccacaaaagaacatcaacaataaaccaagacagtgactccttttcatttcacccctccttttgagagcacacacatgcttcacacacacacacatatatataaatatatatatagagagagagagagagagagagttgcaatgaagaagggggttactagaatgagtggagatccattattatatatatatatatatatatatatataaaaaagaatgctgataaaacaaaagcctttgtggggaggggataggattccctttactacctctaaatttggcagactttctggggtaagtcaacgagaaagctcatcttttatttatttatttatttattattatgattatatttattgtgtttttttatgtatatgcaaaggaatccattccttctcttattgtgctccccacttgggaagtgattaattgcaatgggttgcacttggacactacactctattgcattctcctctctctctcatctatttttttttattttatttattataccacacaaaagaagattaattaatatatatatatatatcaaatatatataattaattaaccaaaacatgcacactgctggagtacacaaaaacattatcttataactagggtttccaaccgtatatataggctactactaattgggaatcattaattaaattagaaaaccataatcttatagaaagatcatatatatatacgaatatctataagatatatatatatatatatatatatttcctttttgtggagatggagatggggaatatgtaacaaaatatagatttatgtgtaaaagttggagcatataaattattgcaatataaatttgatgtacagaataatatataatagaggatattataaagatgaaattttaattataaccaatgcatataatcccactaccaagcaaaaatgatgaattaagctgcttaattaatgatgatgtcacatgtatttatattgatcatcatgatcagcaaggtcaaacctaatccacacatatatgcattcccatgggtccatatatgtttaaaaatcatatccagcaattgcatatatgctactctttttctccatcttctttttccatattcataatacatatataaatatatatatatttatacatatattgaatataagaaagatcatgtaatatcaagttatagataaagattgactatcttcaatctccccccgacatgatgatacgaatcaaagtaaaaccatattatctatttattgtataaattttaatttagttcacatttggaaaaataattactacaagaaattttgcattttttctggcgctttttatttttccatagaaagattatatattagtattagtgattaagaaaaacagaataattctttattcaacaaaaataaatatcaagtgtttgttacaattggtcaaaagaaaagaagaggaataaatatatataggcaaaaggaaagactaacttaacagtaataactaacctaaccgatttgagctaaacataaatttaatagcttccttcaagatagagtgtataaatttttgacacttatcttggacaaataatgaaataattgattagggaatagaagtttagtgaagatgtcgaccaagttggatttggataaaacatggttagtcttgattgtgccattgttgatcttctcccttatgagatgacaatctatttcaacatgctttgtacgctcatgatatactggattctttgcaatgtggagagcagcattgttgtcacaaaacagtaggcctgcacatgggttgggttgggcggtttttgggcggtttggcggtttttttatttggcggttttt

SEQ ID NO: 15147 - DNA, 5318 bp, Cannabis sativa
  modified_base (4454)..(4470): a, c, t, g, unknown or other
tgattttttattatatgtatgttattttttgttgttattttgatattattttcatgttactttttatgtagttttcttattgattttatattattttcgtgtcattttttgaagaaaccgtaaaaatataaataaatattttttaaacgtaaaaatgtaaatatttaaaaaaaaaaaaaaaaatggtattcctaaacaaaaacacaaaaacccacttgaacaagcccagcccagcccctcttcttcttttgatccaacccctcttcttcttcttcctccgttcgtccacatccccagccgccatctttcctcctccattcgtcagccgtttatcctcttctgttcgtccctgtccccagccgcactagaacactagcaggagcgcctcctccagccgatccccagccatctgctcctcctctggccgttcccaatctcgaacaaaaataccagcaatgaaaatggcactcatcttcttccttaggttagtttttctttgattttttttttttaataatttgtaatttatttatttaagaaagtttgtaagatataaaaattctactttgtatattaatgttaatatgtagtgaatttattttatccattaggttcaaagatgtagattatattgtattgtagtatgatttatgtttatattatattatgaaatatattgttcgtgttttaggctgtgataaagcaatttagtgggactggctatgaaagatcagatgtcatggtgatagatgagattaaaatgcagagaaatcaacaacttgagaaactttatagatccactcatttcataaaggtattattattattatgtaattttagtgtttctatcacagtttaattttcatgtttttaatacataaaataagaaccctttagatttagccaaaatttgatacctaaattttgaaatactattgttagtgaaattaggaattttagtatgcgataaaggttaaaatgttgtagttttgcaacgatagttaaactatctgaggttgaaaaaaaggatggtgctgattgtttacttagtgctatggaagaacttattactgaaaaattagtttgcattaattttcctgaaatattctctaggtgttgtaatttctattttttttttcaataatgtttcattgtttatagattataaaaaacttggttgaaagaagatgattacatattcttttttttttttgacaaaaagcgttttaaattatacaatgacacaaatagcaatatagttaattatacatataaatatatagatgaaacaagagcttgtgtagctaaaaacattttttatctatataaatcagatgagaaatggcccaatgcccactttctcatggcctgtgtcctttgtatcaactataaataacagtaggacaagccatcttcttcctctttctctacctattcattgattgtactctcttctctgttttattaacaataaataaatcttgtagtgtagagctctttcccatatccgtttatcgagtagcagcagtagcaagagctaccctttctctccctcatggaagaatatttgagagccttttacttttcaaataatttttttgttagattatattagactgtatactacatagtaggaggatgtgtttattgttgttgctttacaataaatgaggactgtagtatagtgcaagttatttgtatagccaagatatttctgcgactgtttatttatttttctaacaattgaagatgagaaagagaggaaaaaaaattgtatgagtaaagaaagtattagaacaaaaaattctatatcgtgccatctacgagcttagtttaaaatccatacaagagagctagataaggagctccgagttcaacaattgagtaaaaaaacttcaactaaattattttggaactcgtcaaaataatagataattgagtaactaactttccaaagtttattgctgcattcacactgtctctagagtgtttcaagttttatttttcttcaaaaagttgtgattgaaggaaaatttgataggaatttagctttaaaaatagagggtattactctgtgtgaattgttactacacattcttctattccaagctcacacatttatcaaatttactccactttttctcattatcaaaattcttgattagcaatagttgttttctattatattctaatccatgctaatttttattgtggttttctaggatttttgaaaagaatttagagtagcagaatccttaatagccataggaatcaaacatgttgaaacaggttaaatatggactgtgattgagtgacattttctagtcacatagaatatgattcgtaccttgattttttgtggttatttttattatctttattattttatggtaattaggaaccaaactgtcagatgattgttgtagatatggatccaaaaacattgatgactacatattagctaaagctgcatctatatatggtgatgtttgcaagcatgtggagaaataacaagaagaatttaacaagctgctacccatataggcacacttatcaaaaagatatattacatgtagtaaacatttaagtttatttgttgatttttaatatcaaccaataccatattctaattgattaacactgatcgggaatgaaaacaaaaatatttgcaatagttcattattttttacagtggtggcattactgttttttaatttttatgaaatttaatacacttttcatatttagtatcgtaactttctaaatttattatgaatacagtgcactctaaatgataagataattagttcattttctatatgattaatattgatacagaatcaaaatactatgttctatatgcttcctggttttagatcaactgagagccatggtcataagtgcccctcttgaagatgctcgtcatcttgctcaacattatagttgaatgtagggatggcaattagggccatttttgtgggccgggtcggcccctagcccgacgaggcgactttggcccgaattattcgggcttttattggactcccagctcggtccggtatatattatttcgggttcagatattaaaaaaaaaaaccttaaattcctagattaattttactcttccaccatttcccttcttcttcttcccaactggaccgaatctggtttaaacccattgtcaatattaaaatcttctattttctgttattcatcttgtgttgattgttatctgaatcattttacatttcaaggtttaggaaagctcgttgatgacttttgagctatctgtaaatgttcgagagatgtggctcgtttgcatttgcaactagaagcagcaaggcttgcttcatcggccaaagggtatcatccagttcatgtgctttttgtaatcgagtgctttccaatctcgaatctgtttacttgtaaagatctcgttacacaagaagggaatgtctggctgtatgaaccagatcgtaataaattgagggataaggttcagctcctagttgggtcatgtgaactttcaattcctcttaatgctaaaggttagactttagctatttccccttattgtaaatttgtttctttgatattttcttttggaaaactaaccaagtagttgtaagcaaaaaataggcctttgtaagaagcttatttttcttgaactaaacacaaataacttaagtggatccattcaagttaatcactttcattaaccttctccagttcagttcatgcagaaaaaaatgtttaacctaaattcagtgtagaatttagtctactgtgctatagttaaaaaaataaacataattaataagcaaataaaacgagttacagaatacaatagagtttggaatagggtttaaatctcatcccaaaaaaatatttgagatcaaattgtgttgtaaacttgaagatgaatgagctaaggatgaagtagttatgttgcttgtccaaaatcataaagatggcaaaaaaagtgaattttcatggtcttatgtttaaatagcaatttaacttgaatttatgtttgaagttatgtatttacttatgtagttggattatttaaagttaattattgtataatgaaatgtgtttattttttataggttttggcgttttgcaagtgtttgaaaagaatttgagtcaagtgggaatttcaatctcgattcatcggaggtatatatatatttttttataattgctttattatatcacatataatttatagaagagtttgaatatcttatatattcattcatagcaaagtaggttttgcaaaatttgtgtgccgcggtgatgtaaggatgaaatattgtgtgttatccaatatttatagttgaaattgacagatggttaggttaataaaatagggaaaatgctgtatgatttttcgtatatatgtttctcatatttttaaagcaattgcatggattaattgatagatatgnnnnnnnnnnnnnnnnntaggttaaaatagaatgtctggtcaagtcaattttaatcttgaggatgaggttgattttgtgccatcaattgcaaatgaagtacaatttgttagtaatacagtagacgaaactcagactacagggacagtttaaaaagaacctctcgtgcatgggatcatttcacacggcaaaatattgatggaaaattaaaacagtttgtaattattgcaagcgtaagctggtgggagaaagttctaaagggactaggtatttaaattctcacgtagagaggcgtccagtaagaaaggcccaacttgccgctaatcctagtgcaactgcaagccctttagttacttttaattttgatcctgatttaggaataatcaaattggttcaaatgattgttaagtatgaatattctttgtctatggttgagcgtagcgggtttatagaatatttaagtactttgtgttccatgttttaaatggtgttaaggaatacgtttatgtctgacattattaaaatgtataaaactgaaaaagaaaagtgcaggcaaatttcggataaaagtaggagtagaatagtcataactagtgacatgtggactgcaaattattagaagagtggatatatggctgtaatagctcattttattgatgattcttagaaattacatagttagatattaagttttaagtatgttttgtgtccttgcgatgctccagcactacttgaggccttaagatcttgtcttaatgaatgaaaaatagaagacaagatcagaatagtgactctcgataactgtacttcaaatgatgctatgattgagcttttaaaaggacaatttgagcctgacagttttatttt

SEQ ID NO: 15148 - DNA, 3081 bp, Cannabis sativa
  modified_base (2020)..(2020): a, c, t, g, unknown or other
catggaataaatggtagaaaattgagctatatataagaacatgagctactccactccatgattctcaacactctccatctttaaatgatccacaaacaacaagggaaataaactcattgcccgaagagcaagaaaaagaatcgtcatgaggctctagggagattgcaactggtagaactgattttactggctgattataatgaaataaagtgcatatcagtactttttgattcaaggatcttttggtttctcacgtaccagatagagtcgcacaaagccgatgtaaagctcacaaattcatctctctttggaggggtaacaacagtaaaaatccagtcaataaactggaaattaaggagattgaaaattcagcttctgatgccccattttgactagaacaaaatagcacgagctattgaacaattcatgaatagatgtagggcactttcttcttcaaggagacaagaaacacacaagttttcctgaagcaaaatagaggcctaaagcaatttgtccatagtagaaagaatatcactggctatccgccagagaatatccctaaagcattattagaaccattagctgcctcttttcacacacacaggtcctcacagccagggggaaggattctaatatgaagaattgattgaattccccaaatcagaatcattagaaactaacttatgaaaataacactctagagtgccatcataatcagggacctaaggttgagataataagttggtgttagaccctgaacccaccaggaaacaacactatctcttcatcacatttctcacaccaagaatacttttccaaggattagaatctgaggctttccctaccagaaagatcctctaatacaatacttatgcaccaccaatattttaacccatggtttctcagagttagagacaatcatccatgcaagttttgatagaaatgctctattcacattctataagccacaaaagcctagagcaccactactttttagttgacatattatgtaacgccctattagtgtaagtgcgctacaatgtttttcttaattaatattgtgttaacctttgctaatcaaagggtttaatgaaaagtatgattaaatatatatttttttaaaataattataaactttactaaacatatatacataagtttacaaaatacaaacaatcaaaagttgtcacccaacaactaacaaaattgagctcatgatgtcccaaagagctaaacattttaggtctaactgtctagatatgtacgatcttcattaagttttagactcaccattatttaatttttaccttgtctttacctatacaggaaatacatatttgtgagtcaacagattcagttagaaaaacatacaacataaacatataatttgacttgtaacttacgtgcccatacacctaatcacgcgtctaaccaatgtccaacttctgtgactctcgaacgttcttgactatgcaaaaccaacagctataccatatgcactcaatactccaaaatactagtgttgataggattaatttcttgactaatggttgtaccatatgcactcagtacccctgggttcccgcacaaccattatctattggattataagattatcatttacaatgtccattagccagttccccaaaacaaatataaattaacataaaaatgatacttcacacctttcaagacaaaaataaaaaagtggcatttcactgcatgagatgagaatatactattcattcttgtacccttctaatcaatctatttgagcattaagaatcttgcatgcaaaagaacaaaaaaattgatgactttccaacatcgatacacaaaactctagtctcatactttgattttccccaataaataattgaaaacaaaattgatttttggaaaaggccaaattaagggtaccaaaaaaagaaattgttgaaataaaatacagtactagtatacaccctcttcttcatttgtttcacagttttttctatcttttttttttctttctttttcnttttttttttttttttaaagaggggttctcaccaattatatgagaatatgaatcaatcccctctttattattttcaaggtaaggcaataaataagagtacagctttggttacaatttcatagagtactgactacacaatgggatcccatcccataaccactgcatgaggatttgacctttgcttggtaatagctgtctgtggtttatgatgcaacaacatttaaaaataaataagaaaaacattttgaaatttaaattatatatgtacaactctttaagattttagtgtatatatcgaatctttaccattcattggtgtggatcccattcccatacatgggttaagattattattagtttagcccctgacctgacctgacccatgcatgtttggttaataattcttcagttattagaaacaaaagataccatacaagcaatattagaaatagatggtaccaattttgtattttcagtaaaattggttggttacaattgcaaatacacttgtgtactgtgtagtgtttgtgtcaacatatcattactcattccactttatatggtatatattgaatggtaggtcttgtttgtggtgtttaataaatcagtggctgctgaaattattttgggaatagtaataccagctaagctggcagatgatcgatctggagctgttatatagaacctgaactgtgtgtgtgtcagtataatgaaatggtcactatgtattggtaagttggtaactgcttgttttggcttctttaatcctaccacaatccacaatttttgtaccaaaaaaccccattattattttcattttgtatgaataatatgcttagattcagccacaataagggccgacttttgactttgacaagttatatatatacatatatatgtttatatacaagtatgcttgcatcacatgttgaattttgacaattttattacttcaataatcttgctgatgatgactattataacaactaattataattgtaggaaaaaaaatacttctatcaaaattcaaacctatatcaatgttattaatatgtgtgttt

SEQ ID NO: 15149 - DNA, 5595 bp, Cannabis sativa
aaaaaaaaaaaaaaaatagtaaactttattaaaaggaaagtatgcaaccaattccacaccacacccctctattttagccaattattgtgggcacaactttctacttttccaagtcttaattactgtgcaatttgcattattgggctgctgcaaaagagaagtgcattattgggctagtgggcccatgatccaactgttgaagattggaatgagcatatgggcttcagactcctaaaactgttgcaaaatgggctttaatcctattttttaatggattagatagtgtttgcttacatttgaggaaattacattttatattctttttatattgtctttttttatttttatttttttttttataatttattatttttacttttttttttaaacattgtaccaattttgtccttgtcacttcaagatactctccatgtgactttcttatgtgagggtattttaggtacaatatatataaaaatagatatttttcaattaaatataaaattaaaggtaaatttaattaattgattaataaaaataatatttttcaacttatccccgaatatctatgtaattactttttgattgggaggggttgggaagaatgatcttttcaatatcttcaataattatttacttaactatattgtgcattcagaataaatctggaccaccaagtaaatccataacatttgattgttcaaacttttacaataaatatggttaatattaggcttcaaagttttaaatttataagcggcataaatttaatatttatttttaagtatttaatatttgtgtaaaattgtaatttttctcccatttcatgagtacaacttctgttattgtcttaaacatgacacatataaagttcaaattccagatcattaagtcttgacagaaacatatagtatcagttactttaaaatatttattcaataaatttaaaacaaagtcggtactgacgaaattggaaaaaaaaatataatttacacacatgaggtacttttgccgctaaaaataaatattaggtttataccacttgaaaatttaaaactttgcgtacttataccactaccttaaaaaaataatgttttttttagttggtcatagaatttttccttaaaaatgtttcatcttaacaaagtctatgtttatagtttagtcatgaaattagatagaacctaacattatttttcttagatttggtcactgaggactgaaaaagtttacttgtgttgagaatcatggagatctatctcaaaaccaattggtaataagtggagtagctcatgttctttgtacatgactcaatacttttacatttaatccacatgggacaatgttctataacttgatgcattgaaagtttcacttaatcttaatatcacttccttagcagatagccacctcttaattaatacttttcaaataaatatgtggatgatcaaagagtcaagtcaactccttagatttatggctttctttttctattgagctttcagccactaatttctaactaccttccacatagcttacgtactttagattgagtgttggatcaaaccactaactgggaaaatgaaagcttttaagactttaaagaagaagtaaaatgtatacacaaaatatacacccaatgaagtgaagacaaaaattattatatggtatattaagaaatttaacaaggaccctttgaagaaacatctttattcttctaatatagatttaatggaaatttatatcacatcatggattattttaatttatcataaaaactaaaagtcaattacctgaaaagggaaattgatacaaagaaagaagatacaagaaaaatagcaaaataatgaaatgtctagctttgaagaacaagactctttccaagaataatgtcatctgttgaaaaatcagcctctttcctgaatgtgcctctgccaaagtctaaattgtatgagtcagtaagaccttccacaagatcaaattctggtttccaaccaagaacactcttcgccttatcgacggatgcaaagaaatgctgcattaattcaatgaaaacaatatgatcaccatgtgatgaaacaacactaaacaaaacacaaaatgcaaaaggaaggttgtccatgtacctgatcacggaatggaaacgctttctttttgccaaaatcaaactctttcgggttgtagtgaacgatctcaggctcaggaaaaccaccagcctaacaagagccaaaaacacattgtaagttttgagtagtgatttttgatcatacaaatataattataggacatgtacctttgcacatgctcttgctagtccatcaaatgtgacatatttttctccagatatgttgaatatttctctactggctttttcattaccaaggacctgaataaaagctgttgctaagtcctgcaaattatgtataacataatatcaccatttagaactcacttgtgtacattttaataagtttattggagaacattaagaacatgggctactccactcataaccattaagtctaatgttgcaaattatgtataacataatatcaccattttaataaaagttgttgctaagtcctgcaaagtattgagccatatataagaacatgggctactctactcataaccaattgattttgagatggaaccccatgattctcatcaaagtcaaacattatgtctgcatgctgagaattatgacaacagtgaatagagatatggtgcatttttgcaatgttacataaccttaacatgaccgagttgtgttatttgcactccggagttgggaactggaatagggcgaccagctttcaaccggtggaagaaccattcttcgacgggattgtaattcaagggtccatagatgtagactggccttatggaagtccaattaacatccctagacgctagcaggctctcggtttcgagctttcctttgtgcctgctttttgggtcaacagcatctttctgtcaccaagcaacaagaatgttatgagaaaatgaaagaggggtgtcattttttgtttagtgataaaattatgcattctcatattggataatctctaagcacaattgaataagtagaagtagttcaactcctaaattgagagttagctatgtaaaccagaaaatttacctcaaaatgaggtaatagatcagatttgagatacacaccagctgaagaacagtatatgtacctgagaatcatcataaaaaacaatgtttccaatcaaatttaaatgaaaaatgtatagaacattttatctaaacttataactcccttggcaccaatgtgattattgtttatgtacatagccatgtcattcagcttgactttttggacaattttttctttttgtttcatgatcaattctgtattctaaaatggaaattcatggaattagacctaattgcattatgagttgtaaaacagtctctatgtttagaagttcttagcaaactcttttgaataattacaagttgaagatgagaagcttcattataaagaaccacataaggctctcttaaaataattatatgcttggtttatcagtcaaatactataatgtatttcattcacaaatggttgcggaacttactgttcaagattgggtagtgcatccaatataggtgcaacttcttctgcctctcttcctgaaaatattcattttaaagcaaaccttataacaagatactttgtatagattacaagtagcacaaaactatagatagaaaaacacataccatttatatcataaactacatcaaagccttcagctgagaggctagatttcacaaaatcatagtcctttctatctcctttcagatgcaaaatctgcaataatttttttacaagtagaaaattttaccaaagaaaaagaactttcagaaacagaatttgaggtagcatttttctttgtagggttaataccatttagactctgtgttttgcgtaacttactgattagattctctgttttatcaaatgagatatggaccatatattttctaaaatggtacaaaatagtacgggctcaatttttaatataaccaatgtgagaacaatttttagcataaataaatgctaaaaattaagtttgattttgaccaaaaaatcaggatactattttgtaccagtccaaattgtcatttaacaaaatagaaggttcaatcgaaaattttgtaaaacaattggtcaaaatgggtctttataaagtcaaagacattttgacattatttgaggcatacaccagactttgcataagcataccttggaagaaaaatcactgaaatcctcatctgattcccctggcaattgttgggcaatgggtgcttttcctctagtaaacaaagtcacctgagaaaattttgattcttctgtcaaattttatttttcaagagaacccaaaaataggggaaacctaacataagaatggtaaatataccttatgaccctctttgacaagtagtctggacaagaatataccaataaaccgagtaccacccattataagaatctttttctcacttgatgctgaaacatgtaatgcaccttttggttgagaaatcctcttcttgaactgcaaacagatatgggtattaacaaacatgtcaaccattataatcttcttatgttctcttgttcttaaaccaaatatttaaggcattagaaaattattagtcaaaagggttaatataaaaacaaaccaaaacaggtttagcccagtgagaacaacactttacagtacaaaatttagagaacctggatttgagagtggagtctggtgccattgaaatcagagagagaagaagggagtatggagaaagaaggatgattgtgttgttgttgtacaagggccaaccttgccatagctctctatctctctctctttctatccaagtaaaatttcttcttccttcttttgctatgttaaaaagaaaattggaaagaatgttgttggtgcccatttctttgtgttctttggttgtgttttgttgtaacaaaaacaaaatggataagacaatgaccccatgtcataagataaccacctctcacttctcacctctcttttgatttggttatagtattgtagatacttatatatggcttatgtttgatgtcaaatactcactaaagagtggccacactcacaatctcacctcttcctttgtttttcaaactcatcacacaatctctaattctctttaccttagttttatcaactatatgaagttatgaaccgctaaactaaagcattgtctgtggatgagtattttttggaaattaatttctaagtttctaccaactaaatcttaatttttagctaattttaatgaaagttttaaatttttcttgttatgaataattttgattttcttaattaatacgatacaccttgaccttccttcaaaaagaaaatataatatatgcggggatctttttcggtagtcgctaaatttgctaattgctagaatgttaaaaattattttttttattacacatttaattaaagaaatatttacataaatatgcgcggatctttttcggtagttaagtgcatgtttgacatcataactaaaaaactgttt

SEQ ID NO: 15150 - DNA, 20402 bp, Cannabis sativa
  modified_base (5301)..(5315): a, c, t, g, unknown or other
  modified_base (5408)..(5408): a, c, t, g, unknown or other
  modified_base (5503)..(5506): a, c, t, g, unknown or other
gtgtgaggaaacaaacgtagctggtgtagcctagccgcctctaattcatttctttcatgtccttgaatttttttctctctcccaaaattctttcttctttcgcttttacaattttccatgtgtatcatatctaccctttgacttgttacccatccatttcctttaattttactccatttctataaaaaatcaaatttttatattgcacagtgtaccaactagtaagggcattgactgacttcccctgccttatatcattccatattagctttcattctgttttgggcactctgagtttttcctttctttcttttttttagagagagacggatctgtgaccgcatcactgaccaggcctcctccaccaaaccaactacataaacattaaaacagaccaagcattacgcactggacccttttcactttcacacttttgcttcctaattcttcaaggttaaggttgtactctctatttattactgcccaattttgtttatctgaatttcagattgaaagaatagtttttttcgatcttatgttgtgttttcttacttgggttctcttatctctctttctttcaatccattttttgtcttacctttttctggtgacagttgcaggtgttatcgtgacatttggtttctaacaactattggattgattacaaaattgggcttttaaagcatggtaaaggagatggtgttgggttgaaaatgcgagacgtggttggttatgatggaaaccatcagttattgtccaatcagaggttgtcttcaacaggagaatcaacttctaatgatatgtcttctaataagggtgtgtcgcagtggcttaacaatgataggaatcaaaagcattctgctgatgttttagataggtaatgctctttttttttcacaagctttttcttttatgttcatacctgggcttgagttgttggatttttagaagccttaacaaaaagagatatgaaagctttccaggggtttataacaacacacagacatatattttaggcagtcaaaatggagaaagaactggggtactgctgtgtagaaatttatgagttcaaatgcacctaaactagcataaataaaactaaatctcgttttcgatgcacgtactaattatttttggtgttctttaagtcttctgtagcgtttggttgggaggaattgggaggaatgaaaatataagaatgggaatgagaatcgtaataggaatgaaatggaataaaatttaaaatgtataaaaaaaataataaaaaaattattatttttttctcattatatattagaatggtgtttccttctattttaaaatggaatagtcattccactaaaatagtgaaaatactttaatatgcaactgaacaaatgaatggaatgaaagattgttttcattctatttcattacctccaaccaacgccacctaagtgctcattcgtgttcttcttctgtaggcataaatccgaagcacaatttgcaccaaagaatttaaaaggagatggaaactttggtcatcttcagaatcagagcagagaagcaatggtatgtgtcctttcagtttaaacatactgtggacggtattgttcttttacactgacaaagttttgtaattaggaaatgtattcacgagttagtaaacaggaagaggagatccgatttcttcgtgaacaaattgctgttgcgtctgtgaaggtatgaactttcttctaactctagtaatggtatactcagtttactgatttaagttcacatccgagagaaagcaatgattttcttcgtactaggaactgcggttgcttaatgagaagtatgcgttggaacggaaatttgcggacttgcgtttggtatattcatcatctcttcagaagtgtttaatgatcttttgattttcactaagcctctctcttattaatgttatcttgttttttaactttgatatacttctcatatatattggttttcaatgttctaaagaagagaaatgcaatttcactgataggccatggatgagaaacaaaatgaagctgtaacttcagccttaaatgagctggctcgtagaaaaagtgatcttgaagataatttaaaattgacacatgaattgaaggtatgctactactctacttggttgctgcttttcctatgctgctacttgagggcttggtggttcggtggatgagtgagtgagtgtgagtggtttggggttcaatgtttccatgtatgtgacaatggtttactgtgtcaattatgtattgagcaactttgaatctaaagtgttagtatcacaatggtttactgtgtcaactatgtattgaacaactttgaatctttaatattctctcttgtagtgttcttcatcttcttttagttctttactttttcttgaactactattgtccaatgtttgctgctaataatggtgtatatgtataataggctgctgacgatgaaaaatatctcttcacgtcatccatgcttgggttattggctgaatatggcatttggcctcgtgtcataaatgcctctgctatatcaaacaacttaaaggtattgatttaatattggaaagcatgctttgtaagatttaaaccactgaattttggcgagaagacacttttgctgatagaatcttgtaaatctcttcaaatatcaagttcactttagattcagttgctttcgatattgtaaggttcaccattacatagttcagcctaatctttatttagttgtgcatatgagcttcttatcatatataataacttttatctctggttaaaggccactaagcttttacatactttccaggtacaaaattgctgttgtgttcattttttccctaacatatcttggtgctatttacatagttactcttaacattctttagagttactctcttaaacttactttttataggcgcctataggaaaaattaacaatcattgagtagcagaagaagtttggactgatttctctatatcatgtacttggattgatttctcaatatcatgtccttgagtaaggcgtattttttttcatgaatttgcagtaccttcacgatcaattgcagtggaaaatcagaaaatctcatgtaagcttatagcctagtgattagattgttcttatcgaagatttttattatttttgttgtagaatttgttatgtataaagtttaatgtttctcaaaatctctcatcaccgctactaatgtataatttcaaatggattacaataaaacatattatttatcgaatttttcgaaaactaattaaataagagcttaagaaataataatacagtaataaagaagacagatttttacgtagttcagacgttaataaatcctagtccaagagttagtgtattggtcttaagaggctggtatgttattttacaatagtagttacaagaaaaccctaactctgccctcttagtttctcttgaagaagaagaaagcttagaggaaatttggcagagcttcggctattcattttcctccccccctcttgtatgaagatccagggtatttataggctaaattgcaggtatgggcatgccatgaaccgcctagggtttctgcaaaaagcctactattgagataaaatacatgtaaaggactaactgttgggctcccaagaaggttcttactcatgtggagaggaggtagctagataatggggaccatcgttggtactgaccacgtgtcgctcaaaggttttaccttgaaaaagagacgcctagacaaaccatcaggcaaaaaggtatattcagaggtggggtgtgcacactactatggtctgatactggggacaagatctgatcgtgtgtcagaaaatatataatcgtcgctagagcgatctgagtctctctccatggtagacgtctgacttcctctgtgcgattagtgtctgtgttaggctcttcgggtgccttccaggtgtcgttggggcatatgacgagcttggccttctccgggttttggagagacggtaaggcctccgggtcctggagggcagtacactgcagggcaagtctccgtgtagcccttgggcttaatattttcccggacgtgtatagcttctctgtggcctttcttaattaaggggacttaattagtgacgttttaaggtcgtgcttctcattttatgccacgtgtctctcgctcggaaatgcagataacatttacctcctaagttttcgggacattctgagtcgcggaagcttgcaaccttctttcggatcatcgaagtgtatttgtgagtcgtgggtgacttttgagaacatggaagcatccttcctgtttggccttcaacaattaaaaggtcaaaaagtcttgtgcagggtgcaactggcattgcactcgtgtcgtgtttttaatgagttcgtgagcaacacacgcttgcagagagcacatacttcacgggaaatttttctgacagcagagttgttgacgtgacaactctttaatgcacattaggcccgaggtatgcaatgatgaaaattaaatgtttatattttagccgaagtatgttaaatgccatcttttcaactccccagccactgaatcatcctatgctttttgaagagatgatctgagctgctaattttgaatcactcaaaccgcccttggctataaatagacgcaaaaccacttgtcttcattttttccatcatttctcgattttctaacttcctttgtttccttgaaccagaacccttctcttagaacccagactgaaatatcttgatctgttactccatatcttcactagtgaatgaatgaaagtttcgatcttcttataaactatttcttgcacattcgtgcttgctgttttcctggcgccccgactctcaattttaagcaatccacctccagtcacacgaagagttcgacgttcaagcgggctttgaccgagtcatcaactgggcatgaaattttgaatcaatttcaacgaccatccctcttcttcgaatcgtattgtaagtaagttattctgaacttgttgatatttttgattctatgctaggatagaaatcgtttgttcaagctgtgttctgaatttttcttgcatgcgattgctttagatagaatagttagggtgttatatggtgatgaactgattagggtcgagaatgtcgtgccataagtgtgcgtatgtgttttttctgggaaataggtgtaaaggtttgatggcatgttcttgaaagtaaggtctcaactttttgaagggaattaacaagcaaaaggtcaacttctctgtcggtggatatctggagggaaacttacaaaaatactgnnnnnnnnnnnnnnntttacaaaaatactgtcacacggagaagttttcaaaaatactgtgtttttataaaacaccagtaaaatacaaagcagaacaactcaaaacaanagtagaacaactaaaaaacacaagtagaagaccaatgaaagcttaacacagtatactgtagtatgaaacttataaaaaacacagtaaaaaagtannnnataccgcctgacagtatttttataaaaaaatggcagaagttagtataccatgtaaattttcctatctggatttttcacccaacaatcttttgcttatgtaatacaccgacaattggactttcccttcatctcgcactaatgcaacacttacgacgtgatcagacaggtacatctcttctccttctacatgtttcgataggattggagctttggtcaaatgctcctttaatttttggaaggcttccttgcatttttcgatccattcaaatttcttgttttcgcgcaataaattgaaaaatgggatgcacttgtccgtagactttgaaatgaattgactaagggttgcgatacttccggttacactttgcacgtcttggactttacgagcatatcatccccgacacttccatgtttctcccaagctggtccttgaacatcttgttaaccaaccgctggtaagttactccggtgttcttcaatctaaatggcattaccttgtaatagtacactcacttgtccgtttggaaactcgtgtgttcctaatccgcgatgtgcattttgatctagttgtagctggagtaggcattcataaagctcagcagttcatacccggatgtggcatccaccatctggcctattcgtggaagtggaaaacaattctttgggcaagctttataaggtccgtgaaatctatgtacattcttcatgtgccatttggcttagggaccaaaacagggtttgccagccacactgggtataatgacttccggaggaaattattgcggttaacttatcaacctccgcatttagcgcttcttgcctttcccgggtctaaaagcctcctcttctggcagacaggcgtcatattctcattgatgttgagggcatggtattctcattgtgggggaaatgaacatgtttggcgtcgtcctccgtgaatgtgataggcaggttcatggtttgtgggtgttgtgctagtgattgtaccaaagcgcatatttccccttcattctctaactcccttaaatatttcttctgggaattccttgtatctgcaatgtgtggttccccggagatggtggccacatgatcgtcgattggtggtggagccaagcctggcggataggggttccccggtctcggagccagtactgctactgcagcgtgaactggcggagcaggcatgaccggaagctgggtttcaggagcttaaggacgactcactccttgtggaggattcactgtaccctgctgtctcgaaacgatcagctgtctgtgaacaacctcttgtctgggatagataattgggatccttatccattggcctaagtgtctggccctaaccagagattccatctcatcttttaagtagtcacactcattggtagtgtgccctacatctccgtggtactcgcatcttatgtactgatttgtgtttgcctcctggaggcattctcgggggtttcctgtaatggaccatgttgcaggtcgctttgtagacattttcttgagtatccaataagctagtgtactcgatgtactttggttcaaacttgtttatgggtttctttgaagtttcacttcgactttggttcctcccgctcctcttgctccggaaatggctcaccttctgttctagaacttccaccggtgggttcgattgtccgggagcgatgctgcatctggtttacgcagaaggtccatagactgtgggagtatattaagtttccgggaccgggacttgtggaacaaaatttggtgaggatgctgagggagttgaagccggagggactccaaaagcttgctgataagcctcttctaaattgatgataccttgtgctctggacataaactcggacaaagtctcagtctttttttctttgcatttcgccccatagcaaggagctaatcgtaagtctcgattgtaaggctacgagtttcatgtcgtcgctcacctttgtctttaccgacgcctccatcattcgctgaatgaagttcttcaggctttcacatggtgatcgtcccaacttccatgtcataatcccaggcagatatgaattgcttttggaaagcagattgtaagtctttccaactatgaccagatctgggagccaacttttttcaccaatccttcgcgaatttggttagtcagtgagaagcacaaatatttaacatcatcgcatactctggccacctgtatcattttgttatacttcgacaggtgggtccttggatctgtacggccgtcgtacaactcaatttggggcatcttgaaattctcagggagtgaggcttccgcgatccgcctgatgcatggtttcggatcttcgtcttctgaatctgaaagggccccactctgtttctggacgagttttgttaaggcaacaatctgctcctccaacctttttgtgtcactatttggaaggtgacgtccgcgagccttgtcgttcaaatggttcctgaggtcatgtccacgtggcctcagcttttctcctttggctttttcgtacttagcatcaagacgccttcggaggtccacggtggaccaactatcatcagaatactatcttctggtcccaccgtcctggttaacggaatcaatggggtggtttttccttcccttggacctgggtactttcgcaccagtctctttttgcgcaacaggacctttcagaggagaagggtgtccaatcccggaggtatcagtggtcttctgtgcttgcataggtctgctggctagattcacacttttcctaagaggtacaggagctattgggttttgagggtcacctaccttcgccttcgcctttgccttgttcttcgcaggagctgaggtttcatcgttggcagggttttccccgttgtatttatcgacaagttccactgagggttcctcttcagaatcctcttctagatctttgagctttgcttggaggcgggccatcatcctctccatcttttgagaaaacctttcttgacgggctaatttctcctgggtctcatgcaactctttggacactcggaccatttctgggtcttgttcataataatacccatcattatagtacccgtccttgacatgtccgtcatcatcctcctcgtcgtcttaaccgttatggttttcttcaccttgtttacgatgcttatctaagttaccctctcggttgtcagcttttgacgtatccccttccctcacattgctcggctgggtgtttctggagagagggttcacatcttccatgacgacgtcgaggctgccttgaggagtcttctttgtgactgtttttcatgtagccaccatggttttagcaataccgtggcttaggtctttccttagctctcaatgaaagcaccaaaatgtttaccgagatttttaaaaactaattaaataagagcttatgaaataattaatgcagtaataaagaagacaaattttttttacgtggttcaggtgtcgatgagccctagtccacaagtcagtgtattggccttaagaggttggtatggtattttacagtagtggttacaagaaaactctaactctggcctcttggtttctcttgaagaagaagaaagcttagagaaaatttggtaaagcttcggctattcattttcctcccccctcttgtatgaagatccaggggtatttataggctaaattgtgggtggtatggtattttacaggagtggttacaagaaaaccctaactttgccttcttgatttctcttgaagaagaagaaagcttagagaaaatttggcagagtttcggctatttattttcctcccccccttgtatgaagatccaggggtagttataggctaaattgcgggtatgaacatgcccataatgcgcctagagtttttgcaaaaaaatccactattagggtaaaatacatgtaaagaactgactgttaggcccccaagaaggttcttgctcgtgtggagaagaggtagttggataatggggaccatcgttggtactggacacgtgtcgcccaaaggtttcaccttgaaaaggagatgcctaagcaaaccgtcaagcaaaaaggcatattcagaggggtgtgcacactaccatggtttgacacaggggacaagatttgatcgtgtgtcagaaaaggtataaccgtcgctggagcgatccgggtctctcttcatggtagatgtccgacttcctctgtgcgattagtgtttgtgttaggctcttcgagtgccttccaggtgtcacttgggcatatgatgagcttggccttctctgggttctggagagacggtaaggcctccgggctgccgggtctcggatggcagtacacagcaaggcaattctccgtgtagcccttgggcttaatattttcctgaacatgtgtagcttctccgtgacctttcctatttaagggaacttaattagtgacgtttaaaggtcgtgcttctcattttatgccacgtgtccctcgtccgtaaacgcggataacacatataatgtgttcattagagacttacagggaaatatagaataactaataattttcattgcatagttgaaccatgattagccgaaaaaagtgtcttgctcaaacattttgtgaatgtagcaatgttctctctcatttttccctgcgattataacaggattctctatacttgatgtctgagtactacaataaaagcacgattgcatatttgcaggacagaattagtgaaataacatcaatggtggaacctcgtcctgaaagtggatctcatagccaaggtggcagcgccgctacgacagtgaatgacacagtttccaatagacccatggtagtattggcatgtcatatctacttatataccatgttaattgtgattttacttgctcaaactatagtgtattaattattaatcattcttattgtctctttgagaatcaacatggttctttctataataatcagtctgttgaagggcagcacccgagactaaatgagagttcacaaatatatatgactgatcttccagatatgaggtacatagttctatccaataacatcatcacacagttcacaattggcacttccatgttcacattctatattgagctcaatgatagtaaatctcaatctcttttcttcatatcactcaagcattttttgtgctaccaggaggtttttgctacattctgatttaacttttttttttctctactaaggggattatatgtctcattatgattatcataattacactagcaacaaatctctgtgagggtcttaaaatattaattttcattaacttggctgaaatgttacattcacagccacagggaagtgcctggccattatccttatgaatcagtcgatgaaggtgttaatgtcggagaagaaaaagtgtctaatagccctgcgtttccttctcccacagcaaatgatgagaatgtttcttctgtttctaaaggtgatttgtattttgtttgtaggtcatcagtgtgatctctagtgtagtctaaatctaatctttttacttatttcattttaaaggccctggcatagaacatttccagattattggtgatgccataccaggtgaaaaacttcttgggtgcggatatccagtacgagggacttctctttgcatgtttcaggttaaattctttgtgaattatgcaaatgaattatccatgctgtagacagtataatatagatacatctgttttttaaatgcactggattattatataatttctgttgcctacatgcttcatgcttgtacttcagtgggttcgccatcttcaggacgggactaggcagtacattgaaggttagccaaaaatgattaataatttgattctgccattgtagatgaggatccaagcctttcaatgaataataatttgttgttgtgattttgcattactaattttcatttcttatcatttctcattcaggagctacaaatccagaatatattgtcacagctgatgatgttgataaaataattgctgttgagtgcattcctatggatgatcagggtggccaggttttttttgtttttttgtatctaattataaatgtagtataatttcaatatgcaagaaaaacttctatgtgggaatttcgctcttctactaaatatgtggataattgtcagggagatatcgtcaggcggtatgctaatgatcagaacaaaataaaatgcggtaagatttgtggaaattgtgaagatcattgtttttcttatttatttattttttttttttgaaaaaagagaagggggcctcttgtcttagacaggaccctccccaatataaagtgagaatcctcactcgtggccgaggaacaccttggttacaaaattaccaaaaataaataaggccaaaaacagttaacactctgcagtacaaaaaaattactaaactaggcagccaaaatactgctaatacaacagtgatttccattctctacataaatctaaaaatgacaagtcctcaaaaaatctggtcttaaatacccaggtagctgtccagaacttaactttctcccacacatccgcttctgagtttgtaaccccttcaaaaattctagtatttctttccaaccacacaacccaaattattgctaagatcaccgttctccataactttgttcgaaggtacacatcttttccataagattctcatccagcacaaactagtaagacccagatttgaagcaaaccagctaaaggctgatttacaagagaaaacccctgaacgatctgtcttccaaatactgctatcattggaaatatttgacactctaacatgttccaccttttgcaataacaaagtaagacttggaacctcacgctccagtagattccttctgaacttgaagtcccagctctctccccagccactggcagcccctactaagtcagggaaggcactgatcagagaagaatctccaatccatacatcttcccaaaatcgaattctgtcagtttatgatatacaaaaagggtttactcaattaattagtcagccatgaggttcgctcctacaagatttgagattcaaatctttccttgataccgacatagcaattgttataattttctgccctaatagtttagtgttaggtgggaagtctgtttcaattctaaaaagggaaaaatgttttatatttctgaccattcacaaggacaattgtatgacttttggcagtattatttaatacattctgaaagaaacattgataaggtaccatctgaaactcaatgtctaattagtaatgacataaaaaagaaaaaaaagaaagaaaaaaatgctactcaaacttatttccaaaaatttataatttattatgtgaagaagttaatttcttgccatttattttccagacgattgggttaaattggatcaaactagaatttgaaactgtgaatttaacaagaattagaaagcgaaatgtttacttttggctacttcaccaaaaagatgaagagttgagtggttaaagaagtgctttctattgaacattataaatggttagatttttctaaaataatagtttacatggaacgtcaagacatcgaggttattggtgctatattatgtttcttgcaatccctgcaactgcttccttcttctgattgttatatgtttgccatgtcctctcacgaggtattttgtagaccctgatatgcaaatggagattgataaccatatgttcagaggagaagcctcgtttagtgttcttttgctggtatgcctggtttttcttctaacggttgtattattttattcttctgcaatttctatctttggtgtaatatgatctctgatctctcaactatagtttaaaaggcttgtagtttcacgagagttatatgtcctcattgtgaaatgcaacaagggtgaatattatattaaaagtggtttccatgattagttaaacacattgtttattttcttaaataaccttttaaattttgttaaaatctttgaaagttctcttccatgttgggtggtttgttctggggtatgctgctctctattaatttcaacatcatatactgcactttatagcttaaggaatttatctcagtttgcacatttttcttgtttttttgttgtaggtggattcttctgagaactgggagaggacaacattgtttttgagacggtctggcttccaagttgagatggatggttcagaagctgttgtgattaatgagaaattctccaaggatctatcagtatgttctttaacttttggtgcattgagtttagagtttttgtgttgtattataggatgctctctaatgtagttttgctatttgtcaaataggcatagctaattcttgtggtctagtatagttccagggagcttttgggaagtattgagaaagtttgaaacatttgcatttaactccttttaaaacaaggaacactttcactacagaaggtcgaaccaagaacctattagaatcggggctcttcctttgtgcttacagttacctaaaaaaacatttcccttttgttttaagttgtcagagttttatgtttctttataagatcccagcaatgttttcatggtctgctactatctgacttgctaaagatgatttctgtgctcggaaaacttattcacgagtcatcactaggtcttgttaagtactatctttacagtgattttgatttttttattctttttcggggagccaaggatagatttcatatatgcttcttaatcacagaaaattgagacaatcaatggttgcatagaaaacttttctctacttcttgttctgcagaagtaacatatgtgtttgttgcagatcaaagttccctgtggactttcaacacaatttgttttgatgaccggtagtggatcttctcatccatttagcacgtatagtgttcggtatgctttcattttatcttcgagatttcagtcaaataaattataaaactatgttttatttttgccttttttttttgtagaatgcgtgatactcttgtgctaaccatgaggatgttccaagcaaggtatgcatcttatgatgttgttttctttatcatatttttggctattcttgtagcatacacattttagttacattattattttctctacttttctttgagggccctcttaagagtgagtttgtattttctttttcttttgaataaaacatttctttgttctctttttgacttccaactgtttttgaggcaggcacatgatgataaaaagaaaggaagagcatagctccccaacaaagcatttttaaagccaatattcattcttagtagaaaggagaaaaaccataaattgaagaataatttatctctttagtttcttttaattataataagtgttgctgtgtttatagtctactacttttattgtataattttgaccataattcgcaacaaaataggcttgttgtatacctgattagcatgcaatgataaatcccaatatattttcatgtattagcacattgatgaaggcactttggaatgcttttactttgctacaatcaatattgaagttgtgggttgggatcataagtttaaagttggagtatgactgtatgcaactttatgatacaatagaatctatatatcagaatcttcttgtgtattgtagatgacatttggttggaaacatgaataaaaatgagaatggaaatagaaatagaaatggaatggaatcaaatttaatacgcataaaagagattgataaaaaaaattaataaattttttcttattttgcattagaatagtctttcctcctatttcagagtggaatctcaaaagaatgcatgatatgggagatggagcaaggcttgttatggggcgaatttttttttttcagggggaaaactatcgtgcattattttgacgaaattattaattcctagaaagagattgttttgttgcattttggaaaattaagatagatatagtaggattactatagtgaagaagagaagcaaaggtgctaacatgtatggcttcctgaaggggtttttagagttgtttgtggggataaaagagaagaaagaataagccttgtagggttgcagtattggaatggatgttgaccacacattagatgctttccacatgcattgttttaggttcgttggttctagctagtttaaaaaagcagaaagcaaacccatcatcattcttaaaagttaatgggtctcaaatttcaccctggttattataaccactcaaaacaataaaaatcaaatcatgtaaattattactcaatacggcttactctttagagtacttggtgttcatgattggatgagtttttgcataaaaaggaaggaaaaaaaagttttgccttgcactcaacattaatacccaatttttctttcttttttttttttttttcagaatggctcttaaaaattttaaacttgatattacaaacagagaaaaagaagagagaatgaaacagaatattgaattattatcactgaagaggaaaatacaatcagtgagctttatatagctcaagctcacttaaacaattcacaaaacaagtaaaaggaagttacaacaatttagttaactgtaactaaccaataactaacaattaacagctgaccaactaattattctcaacactccccctcaagatagagaggtaatgctcattaatctcatcttgtctttcaaattattgaatggattaagaaaagagccttagtaaagacatctgctagctgctcttttgtgagacatggctggtttcgattacaccttgttgaactttctctcaaactaaatgacaatctatctcgatatgtttagttattttgtgaaaaatagggtttgatgctatacgttgagcaactttgttgtcacagtgaagtaaggtagggccattatgttcaatatttagttctttaagaactaacaaaagccatataaggtcacatgtcgtgtttgccattgccttatactcagcttctacatatgacctagaaatagtttgttgtttcttgcttttcaaaaatgacaatgagtctccaaaaaatatataaaaaccagtagttgatcttcgagtatctggacaagttgcccagcctacatcagtataggccttgagcttcctttctgatgttgcaggaaaaagcagtccctgcccaggataacgtttgatacactacaggactctttgagttgctttcatatgtctagacttaggaacaatcaaaaattggcttaacttttttacaaagaaggatatatctggccttgtaatggtaagatattgaagcttaccaactatcctccagtatagtttaggatcttccaacttatcatctttttcatcttggcccaactttaggttagcttccattggagtagtgactggtttgcaacctaaatgcccaagatcttcaagcaattgtaatgcataaggcttttgagatatgaaaatccctttagcagatctagccacttccaatcctagaaaatacttgaggtttcctaggtctttaagttgaaatctgttattcaacttgacttttagagcttctaattcacttaaattgttgttagccagtattatatcatcaacataaatgagaagaataataaaactgtccccaacatgtttcataaacagagtgatgtgtggctgagtgatgaaaaccttcttcaatcaagacactagaaattttttcaaaccattgtcttaaggcttgctttaggcaatacaaagatttgttgagtttacaaattgcattaggtgaaatctcccccttagaaatatacccttgaggtagagtcatatacacatcttcatgtaaatctccatgcaaaaaagtattactgacatcaagttggtgaagataccatccatttatggttgcaagagctaacacaagcttaacagtaaccaaatttatcataggagcaaaagtatctgtgtagtctattccctcttgctgattgtaccctttggccacaagcctgtccttaaaccttttcacaaaaccatcagcattaaacttgatcttataaacccatttacaaccaataacataatatccatcagataaagtaaccactgtctaggtgtgatttttttcaagagcatcgatttcattatccatagcattatcccattctggtatacccttagcttggctaaaaaattttggttcaaaatgactggaaatggccaaaacaataactcaaaaatggagtatcaatctgctataatcaagaacttgagaaataggataaggagtaacattggtagaaacctgaagaagttcagatgaattgttatcaataataatgataatcttgtaaataagatggcttattcgagattctaacaggtctggtatgagaagtagggtcagaaactggtttattatcctgttgaatatcaacagaagtaatatcaacaggagtaatagcaacatgagtaatatcgatagaagtaatatcagaaatggagaaaaaataatgatatgaaccaggtaaaatttcagtgttatggaaaggggatggtttcatgaaactgaacatctttagagcattttttttttttttttttattagagttgagatctaacaatttgtaggttttcatgccaatggagtatcctagaaagatgcaaggagcagctctaggagagaatttagttattgacatggataaagtagaagcatatacatgacattcaaaagctcttaaatgatcataagcacgagcttttgattttagtacctcaaaaggaataatattttgcaaatttagcgtaggtgttctattgattaagtatgcaacagtagcaacccacttattccaataggttagaagaatgtatgactgaaacaagagtactcttgccacattaaatgttgatgttttctctcaacaacttagttttgttgaggtctatgaatgcaagaatgatagtgaacaattctaagagaactaaataaattaacaaattgcaattatttagaattatctaacctaacacctttgatggtcttttggtattgagttttaattaattaaatgaaatttagaatgacaacttgtgcttcagctttagttttaataaaatgcacccaagtgtatctagaatgatcatcaacaatagtaataaagtatttgtgtccccaatggtaagagtgttatatggtccccaaatgtcaatgtgaatcaaatcaaaacattctttagcaatgttatgattagaaacaaaggtaatttttttttgtttggcataatgacaaattgaacagtgaaaattaagacaaggagtattttgaaattgtaaaattttattcaatgaatgaagtttgatacaagagggatggtccaatctataatgccatatagtatcattggtaattcttgaatcaaaaactaaagaaaaaaaaaggactgattttttgtttaggcaatttcaagtggaaaagttttccatgtctcttagctatcccaatcagttgaattttcgaagtgtcctgaataacacaatgaacataatagaaaatgaatatgcaagtactagattcaagcaaagaagtaacataaagcaaattaagatgaaattctagtacatataaaacgtctttgagggtaagagttggggatagcacaatggtgccaagacacgaaatcttagtagaacatccattgggaagtttgacatatgagatggatgcatctgagtaagtattttgaaacagagcaagattgtgacatacacggtgaatagtaccagtatcaaaaatctaagaaaatgcagaattagaaaggattttgccagaaaattgagatattgatagttgagcaggttgggatggattatgttgttcaaaaactctctaagttaacatattcatgagcttttgacattgagcaaaggttgcctctgcctctaatgtctattgtattttaactttttgcttcaatataatagcattttatttcaaaaaaattaattttaaataaaaataaaaattaaataatttggaccaataaaaaaataaatgaaaatagtgatgtaacacttaaaaagttctagaattctaacagaaattatttttactgaccaaatttttatttaaatattaatttgtaaccatgagttatattagatagtatttttatcacaaattactcttatattatttagttgttttatgggttttggcatactatatggtttgacatcatgatgtactatagatctagtgttatgcaccaaagaatatccagtctaaggatcagagttttgaaaagcatcactacttgaaaatgaaaattaatcaagatatacaaacctttaataacgtgacaatttattattagataaaaagagaccccaatatgaaaactttttcactgccaccatatgaaaattcaatgagatatatcatcaaatttctctaatttaataatgtagtaaaatgtaaaaatataagttttgaaagagttgagactgagaggctgcaattatggttttcattactaatacagtacaagaagccaagccaatggattttgcatttgtgtggtgtggaaggctccacgccattggcggttggcttattattgttattatttgttaatggggtagccccccgttgttgcatgtgacaattgttgcttaaacttaggtaacactttgtgaacatggcaaactctcattggttagttcacaactctttggtaatggtagcttagctcctccaatcctttatcctttctttaacatatttacacaattaccccttccctttccttacccttctttgtattctactttagtgttgtaatactagggctgtactgtacaaaaaaatttgtaaaccgcctaaaccgaataatccgcccaaaccaaaccgaaaaaaccgataaaaattac

SEQ ID NO: 15151 - DNA, 3979 bp, Cannabis sativa
atgaacactcaagagattctctagaaggagctcacatggagatgacaaccctaagccaaaaggctctctttttctctgttgttatttctgatgttgttctctctggttgtgactctctattttactccttgttgtatctcttattttctctgtatattactgcttgtatctcttgtttttgtatctgagaaaaatacctccttttatactgatctgtgattctgatctagggcagagccctagagtaatatttgtaactgtttcagttataactgtctttgtaactgtctttatgttctttagtcttgatctttggtgtatcttatgtaagggtatatttgtcaaaccctgtgagtggtattattcaacttaagggtaaataagtgaatctgtaacaacacctatgtcacaagcttcgagcttgaggccgttgaagagtttgctaagttacaattagttagagaagttagttagtttgtagttgttaagttgtttttctttctttagtttctgttatgttggaatattgaacaaagtatataaatactcttctgttagttgttttgtgataacgactcaatcatcaataagcaattcagaaagtattctcttcacttcaaattttctttgttacttttctcatctctcatatgagctagctcctttccttctagatcgcgttcttacactctcgctcgtccttatattttttctttcatttaataaaacggtatagtttgcattaactgccatcacctgtcaaatttattgaagtgaatttatttttttcgttaggcatttacaaaaataacctccaaggataagatcactccacaacattctataatttatcatgtgataatatgaattagggacaaattgcagtaaattaataatctcaaagtttacatagtctaggcacatttataataaatttagcaaataattgggaaagagaagacttaattactatatattattttagatgaaggcatgacttgctatagctagcagctggtaggtaggtagtacactattattgtatactgttgaccttgtcatttaattgatctatacatgttgacaataattaataatgttgatatataattaataattaaaacagcttaagcttacaatatggtttgtttgtatatctctctatatatattcaagtagtcattgtttccaagcaccatatcgatcaattaatagatcacttttgcctaggtctggtgttcttagttaatttctttttttgtatccagttctatagctaagcctaaccaactatgtagtactactaattagctatactcctctcacaattataacaaaaatatataacctcatatatatatctactatctatatccaagtctcgagagagtttataatattatatatataatggacgacagaatagagcaatcagcggaaagaaatcatgaattgaatggtcatgatgagaacctaaacgacttggtgtccgttcagaacccaacaaaacgtcacagtgtttatcttagcccttcctttctttggaaactctctaagactcattacagttctggtcttcttagaaaggtacctacttacctacttaactaaattaattaattgcttatatgcagtactcgatcgggaccattcaagaggcctccattctcttgttcttttaagaattttttataacaattacaatcgatctcttgtacaataaaaattctgagttcgtcactgactgactgataatagatgatggcggagattgtatcgacatttttgctggtgtttatgacgtgtggggcggctgctattagtgcaagtgataaccaaagagtgtctcagctgggagcatcgattgtgggtggcttaattgtcactgtcatgatatattctgtgggtcatatctctggtgcacacatgaatcctgctgttactctagcttttgctacttttctacattttccatggaagctggtacattatttttttatttctataaatttaatttcaacagttttttcttttatttttcagaaaatgataaaatataccttaatcgttatatcatattattattagtataatttagtatagtgaatcctactctttttgatttaatataagtaaccactaatcagttatggggtgctataagaatttgataattagataaatcttacgtactttaattaattaatgtgatttaatttattaaaaaaattatagggtggcatgatattttaaggtacataataactatgtgatctaattttcccttctagttattatctttctttattccctatttagcttggcactgttactcttcatgcatgctagggaacgtttctaaaaacaaattgagtaataaataaattctcagtttgtatttactttattactcaattaagttgttggtggactatcactacaacaaatttaattggaaagtataaattattataatggctttgtttttgtttttgttttggttaatcaaatgttcgattcagcaaactatatataaatatattataataaaatattccattaaattatggcatcaatactaagagttcttgactatagtcgtggcattttataagtatataatatttattatttattatattttttagtataaatatagtatatttgtttttaataaaagtttatttggtatacctttgcttaataattagggaaaaatcagtatgaataattttgctatatatgtttatgaatattgctattgggcacttttaaggtgcctccaataacacactgatatggcgtgttgtgagtagtgatcaacatattttttatattatttattacatgtagaacttgatataagattatactaatattatattctatgtttattataggcattaaacaaaataatttggagactaataagtgtcggaaactatagttatagtttttttttatataagttttttccatgaacctgcaatatttatatgttctattaaatacattaaaggaaaagctaaacaattaacatgtacataaacatattgagacatgcatagtgtgtagttggtgtgttactttcatttcatggtgtaatatatatatatatatatatatatgacactaattaaattcaggagtcaacgaaatttgtcaattattaaaatatttcgaattaattgcaacaatatagtaatcattagttaaatggaaattgtggtcaccattcactctatgagacaaaacattaagcaaattaactatatataaattaaatcattaatattggtaatattttatattagaaaagtcacattaataagaaccaatctaagccacaaatttatgttgaaaacttcagaagcggtcaaatatatggttaaacttaaactataaccacaaacggatagtcatatatcatttgttattataattatatatactagccggctagtggttcaaatttaatatttcataataatatccacacatattttaagttatacattgatgtgagtgcgacatgaaatgcaatcattcactataaaaataataaaaatattaaaaaaaaaaaaattagttttctatacttaaattttctattaatatatatagacaatcactcatggaaaataaaatacattaatttgaaacgtttcgtctggtataaatgatggtatattttaagggaataatattgtctaattaacaaatcataagataagagttgttcaaaaaaaatttaaaaaacaaatcataagacaaatattaagtaccatttaaaggctagtttgttttaagtggtgccatcttatttaatagataatttatcgatgatccaattaaaacagtctttcaactaacatgtgatcccaaaattatcaaaaacaccatagggttgtgaaaagcattggcaccagtacgtatgtgatccccttattctaaaccccaaaagaaaaaaaaaaaaaaa

SEQ ID NO: 15152 - DNA, 7142 bp, Cannabis sativa
ttagaaattaaagctcagatctaaaaaagaaaaaaaaaacaaataactctagaatatacatcaaattcaaactgtgcgatctgattaggtaagtggcaattcgatcctcaaattagttaagtatatttatatgtttacattgttcaaagcgttgaactaaaatgccaattttggtgtattaaacatgattacacacatgttcatgtgctgttatagtatttaatttttcgcttatttttctcgaaatttttttctcttcggaatatatttatgtttgatttttttgttcaatctattagcagattgatcagtttctagttaagttgttagcgtgaaatggataaaaaaacaaaacagggattttttttattcgtttatttttatgtgtgcaatgagtagctgtactgacgttgcgtcgttggccttgttgaatcagtaatctaatttttgttatcaattcaccagagtgaatcgagatggtggctctaagtcttaaatttcttttctagggcgtgtataaaagaaagaggttggtgaatatggtgggaaagaatgggaaatttcatgttactcatctgaccatgcagctctgatattgtataatctttgcaacggagaagtatgaatattgtcaagggtgttgctgaccttattcgaaggacttccactggccaaaatgaagagtctgcttcggggtcacaagctgggagtttctgcccccctggtcccaggatccgctttaggtaaattatgctttgctaggaccctttactagctctcagctgctgctcgtaacttctttacttgttattcctcagtgagtttgtatgtggtcagtctaaacactttatggagtagactttggtgaagcatttaagctaatgaacaaatttatatagattaaaagttaacattcattattacttggaagacaattgactgatatgctaattaactttaaaataattgagaggctttgggttgaaatttaagatagactgttaggtcaggttgagtgacgagaatgagaaattgtatagtcttccttataagcgttggaattttctggcgcttacctagcattaagcttagcttctccattagtttccaatgtatttgtatgttattctatgaacttcctcacggatgcaaattcatacctacctaaggataactaccactgttttttcaaaaaaaaaaaaaggataactaccactgtcaagtacagtgaaggcttcttcaatcaaccatgctttcttacattttttagcaaaaaatatatctgaagattcgaataagcgttctatgagtaaaacttatattgggtttataatggcatctgagtaaggtgattctctacactatgtttttatgtccaagagctgtatcactttttccttgacaatggaaaccatgttccctttgataacttctcaagcattttgacattgttttagtgaaattggagatgaggcagttctgaaagcactttgggagagatttgagaaagctgctgacaaggtatttttccaaactcttcaattattttggcatttttttgaaaaagagaaagagggcttttatttattttttaaaaacaaaaattgtgtgtggatgtgcaattataaagaaccagaaaatttggggacttaaaatggtatttaaaatattggctttgtctgctttgatttatttacaaaattgatgtttaggttgataaaagaagggcgtttcttgtttttctcaaacaatttcttgttgtatacaagaaatgggaaccagacaattttgggcaattgtcagatgctgcttcaacttctatcccacttgcagagcttccatcacattttggtgatgtagttattggttgttttgctggacatccagctgaaattatttggacattgtctgaggagctgaaacaaataactgctctggtcaccgactgtaagtttaattttgtgtaactggttctattgccctgtctataaaagttgtacctatctattgataacatcagtagaattctcatttcttatctgaaagaaaaaatgtggtggtgatcaaatttcttgtggactatttgctgcatgtaaaatgttttggtactaaattctggttgagtttgttgctgtggtttggtttcatcacaaacactcctttggctgttatgttataatatatccctattatatattgatagaacatgtaacttcctcatcaatactttcttgaccaagctttataatatatcattttacagttgtttttttttttgtttcttccaatgatattcagtaagcaccagcctagtgcgctcagcagcaacagacttctcctgtccttcagcaactttgagtatcacttccgaagggtttcttgtctttgatgcgctgttaattatctctcggtccttgcataattgtagagtttttggatattatggtgggatacaaaagcttattgcactgatgaaaggtattatttgtcatatttatataacttttttcttgtaagtaattgtttcaaaagcctgcggtcagcaggcctttgatatatctacctactgaactgtttcactctagaggtagaccaacctctcttaaatctcaaaactaatattaaaggtgtggtttttcttcttttgataggttttttttgacaaatattttccaagtaatattaatcatcatatatcatactcataattatttgagacttgctaaaggttccatcatatgtccaggtctagttttgttcataattaagggaagcccacaaacaaaggttatgggttttttttttttgaaaaagtgaaagaggtcacttgtcttagactgacccctccctcgttatgttattgaaaactcacttgtggcggaagaataccgtggatacagtagctttagcacaaacgaactaaaaacataccgtaccaaaacagttgaatagtaagaagcacaattgcccagaaataaaattaaattacaactaagttctccattctctacttacttaagtctagaaaagagaattgatcaaaaaacttagtcttatacacccaagtagttgtccaaaatctattctttcttatcccaaaggtccttctgttgtacactcataaaattgctagaattgtggttctccataagcaagtccttctattaccacccaatttgctaactatcatatgggggaccgaatcagggaaaacccactgaattccaaattcattcagcaatttaatccacaaactatgcacaaaactacacctcaaaaacagatgccccacctcttctccacttttcttacagcagacacaccaacctgaagacaaacacatatacaatctctttttttgcatcacaacatgtacatttaattttcctagagccaccaaccaacaaaaaactttcactttgaaaggacatttgcttacctataagattcttgtccagaataattcacctatgttttgatccgaggtaaaccaactaaaagttgatttataagaaaacattctacccggacttggtgaccatacttgctgtcctccaagatatcgagcaatctgacatgctccaattgttgtagtagttctacaaggctaggtatttccctttccatcaagtttcttttgaatttaaaattccaacttgcaacaaaatttcccacctctacctcaatggccacaagatctttaatgctctcgttctttgccttagatatcacagcaagatctggataacggttcttaaaagaagaatcccccatccaaacatcttcccagaaaagaatactcatcccatttcccactttaaattgcaccagctccaagaattcctcataaagatctgaatatccttccagggaccccctggggacatcctaatacctcctcttgtatcccaaaagttttctgtcttaccataacaactttggatcactttgtaccataatgatttgggttctaaagggtatctccaaagccatttcataagcagcgccttgtttctcatatctaatctcccaattgcaagacctccctcatttttagatatgcacacctcctctcctgcaacaagtgatcgccacccaaaaggtctttgcctttccataaaaaatctcgcatcatctttgccaaggttatgggttatattctattttgatattttcgtttggcttgtactgattccttaatgtttatcgttgcctaccaccttaatacctctacttttttattgaagagctacttgtatgggagttcagtattggaagtatgagagaaaattaaattttgggtagcaacttgaattttttaagtcaaaatattttgaggttttgtcatttttagatttattcagggactgggaaaatataccatctagtaagatttatcctttgggggagttttcaatcccgatgtagatatttaatcttttatattaaaatatctctgttatcatagttttccttcacgagaagctacgttaacttgagtgggggtcagtctaagagaagtgatttctgtctctttttcacacaaaaaaaaaaaaaaaaaccctacttccttgtatacacaatgacataatcttcatcaatgatctttcttcttcccttggtcaactaaacttctttcatagttagcattacatttcattggactccaaatttatgcttttttgtagtgattaaattcagtcctaacagagccacacaatcattaaccattacctttgtccataagatcatttgccactggacaaatgttgaatctagcctattttgccaattttaggttttgtgttttatatttttggtgttggttatgtgtacttttagccaatttgaattcatcaaggcagatctcaaaatgaccaattagctgtatgtttaaattttctattagtatgccttatggcttaggcaagggaggtctatttgtttaacacttggaatttatgagaagctattaatcattgtgttctcattttaaattatatcttttgccatttttttttttgtaccatcaatatctgtcttgtttttttttttttttttttatttattgttattaattattttgcaggatctgttgtccaactaaaatcaataagtggtgcactctgtgctgatgaaaatttatctagcatcaccgtggagaaggcttcactcttgcaacaaatacttgtgtatatggtgtcaataatattcagtttcattgaactaaattcaaatgtgtacgagaactctcagttgtacaacaatagtataggctttattttgggggttggtgaatcatcagttgactcttctagtagcttgaatgttccttctgaaacaatgataagctggcatcagaaggctgttgtgtccgtgatggaagctggtggccttaattggttagtaggtaaggtaggcagtttctatttaaaaataattgcactataacatggtatgttagaagcgaaacttgcataagacatatcaacttgcaaaacaataataaataattaaccttttcttgtaaaaagaagaagaaaaaaagtaaaactgcgtgcttgtgctccatctacttgtttatcccattattaattacatttgaactagacggtatttcttttcctttgtctgttttgaattctggaacagttccttcttagctatgaaggcaattgcttgtaaatgatatcttgaatgcatggactcttttaatggtcaggggaagtgatattcaaattttaaattttagagaacatcttagagagagaaagctcacttatttaaatttaatcgacggagcccccggctagcaagatcgggaggtttagtgtcctcttaagaaggaatacccgggtcagcttcgatcacgaggagagaagagcggaccattgaaagtctcaattcctatccgcccaaggcgatttctacatgttgtttcatgtttgagccagtgtgcattctctatgctgtcaataatttgaatcattctaaaactcatgtacccacggttttcctccaccacaagtgagggttttcaatatataacgggtaggggccagtctaagacaatggcctctgtctctttttcaaaaaaaataaaataaaataatttgaatcatactctttatcccatttttcctttttctacaacacagggagaaggcattttctgttttagaaccctcattgcatgacaataacatatgcgtgtagttgtgttctcactagggtattagtttgttaaacaatgtattttttggtggtgattttccaatttatagatactggttttgtttcagaactgctgcgtgttgtcagaaggttaagcatgagagaacaggagatagatttttcacttcatcatttggctctaagaattttgcgctcagcgttatttgacaatcctcgtggtcaaaatcattttaaaagcattgggggacttgaagttctgttggatggtcttggtttaccaccaaacaacaatcagatgttgatgaattccacttgtgctgttgagaaaaggtaatccttatacaaagttttagttgtttgtatcatgatgttcaaattgaggagttaatataataatgtgcatgtatattcttaatgatgaggttaatgtattgctgcaaactatgattgagattccaaccaaaatagtttgaaaagaacaatcatccacactaaacctatcagagattgtaaatgattgagtttacaaccaaaagaattggacatttgttacctttatgcaaataatacctattatatgacattctgaaaattttgtatacaaaagaaactagtcaattttttgagaatttttcttttcaaagtgactgctcaaaatggatttatcttgtcaactttattttaaattagaagatgtttgaggagattttattattttttatttaatttatttattttttaattattattatgcattttcatatcatttctcagcaaggctaactttttttttttttttggtttcagaggtgaaaatacgttgtcaaacattttccagctgcatgttctttctcttgaagttcttagagaagctgtgtatccttcatttagtctttcatatgttttggtgaattcctgttgtgagtcagcaatgacaatgagcattt

SEQ ID NO: 15153 - DNA, 7571 bp, Cannabis sativa
ttgttaaacatttatttcacggctaataatatatctaaattattttgaattgattcataggtagaattgactaagatggttacagaacaagtaaggttgctagctaaggatgaagatgaagaacttactgagtctagtgcttatgatgtgattcccccttacgaccaagcaaaggcccttggaaagacaaatattgatattgaccgcattgctgctggattaccatgtggtagcgaaggatttcttttgatgtatgctcgctggagaaagcttgaaagagacttgtacaacgaacgtaaagtgtgagtctttattatttctactttatctttttcgtctcactcttggatgtggttttgcaaattcttgtctgtttcctaatactgtttttttggattttaagtggaattaaatgaattccagaagatttcattttctcatgtttgcatttttttttattccttaaatgtagtatcatgttataagaaggaagtctcttacaagatttaaggaaattattttatttactactctctactctttttcctcctaaaagttttccaaggattaagatccaaataaggcctttatatggggcccaatacaaagacgcgtattcttttggaacattttacttttcaaatttgtaattttttaagacaatagggtttaatctaaataagccttcacttttgttgaaataaattttgatttctgaagccaagattattattcttaaatatgatacatatgctgaatcaccagtctttgatattatggatttaaatgcaggcggtttgatattacacaaattcctgatgtctatgattcctgcaagtaagttacctgtcatcattctgctttggatgcttggtgcttttacatttttggggtgttaaagacaaagttgtccacatatttttctgtcattctattcacatgggcatatacaatttatgatgtcagcctgatattgtttaacgttttaaaatgcattcgctacaattattatacatctagataccatcttctttaggtctttaaattctattatatatctttagcctgtacaatctttactgctcttttgtacgaagtgaagaaaagaagcagtttagatcagatctttcctatgctgttgctaaaaattatttgggcctctttcttttttttttcttatcaattaaattatttgttgttttgaatggtcacttggcagatatgatcttctgcacaatgctcatcttaatctagacgggttggatgagctcttcaaagttgctcaggtatggaaacaaagctaacagccttcatcattcttctctctcagaggaaaaattcacttcacagcaaaaaaaaaaaaaaaaagaacagaaaaaactcgcaagttgcaacattgtatatgtaatatgtgcatatcaactaatggatgtgggaagtcaaaaaaaaaaaaaaactattgtttgtgctcagtatatagaaatttgtctgagccctcttcattgcatttcaatgcagcaactcgcggacggtgtaattccaaatgaatatggaatcaatccaaagcagaagctgaagattggctcaaaggtaccttcttgctgtcttttactttattcttattagcctgccaacaggatgttgggtttaatagatatgcttttgacatggacttgtactctatggttgaagaatttttttaagagtaacttgaataatgtttgaaatttgtaatcctgaaatattatttattgatgttgtatatataacaatttaaatgtttcttacatcttgatgttttggtaaagtaagtgtgtaatttgttttcatgccagtttgttctgtagaaacatgttttgacattgaaaagaaaaatttctgaaatttcccttatagatacttaaaatctaggccaagttgatgtctatttttacaaatgtgtttcaaaaatcttagtcataagcatcttggttgagtctttatattggtttctttccacaaaagtgaggagatgacataactgattgcacctgtagaaccagaaatatttgtttgtttacaggcaaaacatcattttatgttctaacagaattgtatgttctgcatatcagattgctcgccgtctgctgggtaaaatgttgattgatctgaggaatactcgtgaagaagcaataagtgttgctgagttgaagtgtagccaggaacaagattcaagacttgatactgagaaggaagatgcagaatatcaatccatgttcaatattaagaatgatgacatgaaaaaattaagcaccaatagcgaaatgctaaaggttaaaattaagaatgatgacatgagacgaactagcactactacaagtgaaatatcactggatcaggatgaagatgatgataaggaacccaaataccgtttggatccaaagtaaatatatgagtcttttaaatgcaattttgctgcgtctccaaaatatgattgtttgtttcatgtttttcttctctatattctttcaggtatgcaaatgtcaagacacctgaacggcatgtgcgcacacgcctatattttacatcagtgagtagagcaattctctctatcattcttctatgtttcgtatggaaaaagcaataatcattggctcaagtcttttcctcataacgtatacggtgctctgtaaatatctatagtgttgatatccaattagaattctatctgacttatccgtatacctaaattagttgctttacatattaattagctctgagttgtgcaattaattatctgtggtaattccaattaagattgttatttgacttttctctatagctaaataatctgccttacacattagttagctttaagtacatgaaaggcaatcctctcctctaacccgtaacttggatctgattttttcttgtctttagattcaatgccaagtcacttgtagaaaccaaattttactttaatttccacattctgtttatcctcttaatctttgttattattcgatgacaggaatcacatatccattctctgatgaatgttctccgttactgcaatttggatgaatctcttctagaagaggaaagccttgtttgtcacaatgctttggagcgcttacataatactaaggagcttgactacatgagttacatcgtactgaggatgtttgagaacacagaggtatgtaattttgaggtttatataatcattgttaacaaatgcctattatatctttcttataagatacatccacagaagcttgaaactgaactgttattaactagcttattattttaatatattgaacaaataagatctgtatttagatcaatatgacgaattatgttaacaaaaatttacatatttaataagcttgatcattaaaatcgaagttagatgatacagtgtgatagtagtagatttttaaactctgaattttttaacttaaaagtgataatcatatttttgtctcttggtgagatattgttgccattaagctgagtgcaattatgtgttttttaaattgaaacggcaggtagctttagaagacccgaaaaggtaccgtattgagatgacctttagtcgaggcgcagatttatcccccttggaggtagtcagttttaactgagcaaccaaccttgtcctacttttctaatttatcattatcagcttaatgaatgcgtttgtcttgttctgttccgattaatttagaaaaacgacagtgaagcagcttcattgcatcaagaacacacactaccaataatgggtccagagaggctgcaagaggtgggatcttatctgacattagagacattggagaaaatggttcgtccatttgcaatgccagctgaagactttccaccaccatcaaccccagctggcttctctggctacttttcaaagagtgcagcagtcctggagagactggtaaatctctggcctttccataagaatgttaataccagtggaaagtaacaaggcttcttctcccttttcaattttcaaagaccaacttatcttcatcttttcattctcgtaatttgaaatattccgattctttaaacaattcgaagttagtaattttgagtctcttctgagaaaattacctgaagagactcttactaatatcactggcagaacgaacaccgtgggaagttaccatggtgatcggaactgagttagttttgtggtttgggatttcttcattatattgtcgtgaatatatcaatttttgtcagttgttgacttcacaactcgccgcgtaattgctggtggttcgaaccaaaaaatctgttcgggacgttcaagattctttagttttaacttacaggtattatcgttgcagtatcatttgtttcaatgtttccaattttaatttataaattagaaatgtaatcttttttttattactatatctatatatttacattatttagtatttgtttacttacaatagttgtgtacatattataacaagaatgtctcatataaaagattaccacgctatttacctaactattgattatgtattatttactgtaatatgtatgtttaaaaatggttaactaactattatttaccaagttgtatgatcttagttccttttttaaaattgatctatggattgtgcatgaatgtaaaaaacgcttgattttgctcgactacttgggagttgggacagtctagagaaaagatttataaccaaatcaagagtttttacacaatgttttgcacaatttccataagagaatacttggactccctgctgttaacggaagataaaagctttctttatcttcaaaaatcccaaactgccatggatgaatgaacttgttcaaccaaaagcttgaaacctacaaaagattagagaaacagactaaacaaaaatatcgactatcaaagttagttaatcaaaatgaacttactaagtatttatactgaatcagcataattgaaaaccaacgaaaaaatcacgtccaattaaactaatcaaaatagaactagtaaccagacaaaactagagaaacaacagattgatcacaacataacatttgccaaataaaccaatttggtatttgcaactatcattatgtttgacatttttgtaacacaattataattattatgtaatgaaattgtttacgaaatgagacagtttcagcttaacattttggaccaaagcaacgtatgttataccataagtaacccaacatatattaaatagtaaatactctttaactgaaaaataaatcacaaacagtatggcctttttattttcagaagagatatcttaaatctaacataaagtttcagccaataaaaagaaatctaacataaagcgacacttaaaagtcaaaacagcaatttaaataccaataagaagtagaagaagaaaacgacaccaacttaaagtttgaaaaaaaaaaaaagagaaagagaaagacacgtttagagtggcatgtttttccaatttgtttcgtttaacttgtgtgtttgtgaagtcaattaagataaatagcactttttattttgctagtaaaaaatttgcacttgagtattatgataacatttattttaacagcgtattacttgtagccacgattttatggtgggtggaggggaacacattacaatacacaatacactttcccattgttcaacctaatccagtctcactaaatatgtacctaaaactcacctcattttcatgtgacccgcctatcattacctccaccggtatgtgccaacaatcttgtcatatttctataagacagcaaatgtggttttatgtcccacctcctatttgatatgcaagatttagtgggcctaacctcaaagaaattgcaatggccattatcaaaaaaattgtgaggactaatcacggtttttacttctacaatactaaatcatgtcttatgaactcttcataccattaaaaattctactaaattgttgagatggttggattcaatgacgtttgtctaattttactaatagagttttgacattgttaaaagttcaaatgacacaatttagtacatgtcaaacttcaaaagtataatttggtagatgtcaaaatttagggatacaattttgtaaatagacaattgttacgttagtaaaattgacctgaatttgacagaagttcttgaatctaataatctcaatagttcgagaagaattttgactacttgaaaatttgaggggcatgatgtgatatggtacatgtcaaagttgagggggcaaaaattttacagtgcgtcttgtaacactttttttaatcaattttttgtttttaaaattagaatagtgaaaatattttctaaaatcatattttataaaactatttttacttttcaattttttaattaagaatctaaatttttttatttaaaaaaaaatcactttcaaaaattttttaaataatttttttgaatcaatatcttagactccaaccccaacttagtccttggaaaccgaactcaaacccagccccagacttggacctacccccgatcccgacctccctagacccgacttaaataaaattaacaaataaaaataaaaatgatattcacagaattttttttttttaaaattgaaaaataaaaataacacatttttgtttttcaaaaaaacaaaaattttacttttatttttgttataaaaaatttataaataaaagtattatcaaacgccaccttaattagcttttttttcttaaccatctcatctttttcacaccttcctctaatattcctcaaaaacggctaacctgctctaaccttgaagcttcattttgatacctttcaccaaatcataatcagaacctttttaatatcattatatgttatgtttaacatgggttgaacttagctaatgatatgattttcaagctttgttggttcatttttttatgtgatatcaatcattaacgacatttgtcatacatctatagtaggtaatctactttctttttcctcccttatctcattttagagctttcatgaaagagatttgtaattttgtagtattaaaattgtgaataaagcttttgaaaaatggtggggattagtcacaaatcttattttaaagtaagaatcttgtaatgggaaaagctttattggttctatcttctaattaatcaactttttcttactttggaatcgggtagcttttgttggccatgttattgttctatatattgatttgattactcatactaaaaataaagaacccatatccatttaatttgcactcaaaatgcaattctaacttttacttgacactttctcaatatttatattggctaattagcatagattttgtaagggtaaaaactcaaatttcaacgtgtttgatataacatttgttttgttaaatgaaaattcagattatatatatatttttttaaataatacaaaataatatcataagctcaattttcattaatttttttaatataattaatatgaagtcaatttttagtaagaatagatgaaaaaaaaaaattataatcaacctaattgcctctgggtcattattatgaaaattgaatttatgatattatttt

SEQ ID NO: 15154 - DNA, 3110 bp, Cannabis sativa
cttcttaaatgagtgtttaggtacatcttttatctgtttcgacgtaataattatttagaattacttgtattttttttagaaaattccgaataatttacaatgtcgaatataaaatttaaatattttgttgcacacacgaatatattttcttatacgcatagtaaataattgtttgaattttattttcgacattgtaaactatatagaattttctaagagtttacaagtagtcttaataatagttacaagtaacaacctacgtaattatgagaaaaaaaaaatcaaactaatttttttttaaataccgaaacaaataagagatctaccagaacacttatttagaggtgtaatatataaatttcctataatttatactaactaacaagtagttatgttctatgcatgtattaaattttttaatccaattgtgatggttcaaaagatacagcagatttctcatcttcttctctaatcgcgttgatcatggctgcaacttggttcatggagggtctagcctcaggagaacggctaacacattgtatggctacttggagcaaactcactagcctttctatgctagcgcattccgagagcaacgccttgtcgaagacttcaactgtccattcttccctcacaacagactgaacccaatctgttaagtcaatgccattgtgctgcaccagattcccagtgagaagctcaagcaggatgacaccgaaaccataaacatcgtctttaaagaaggcgttcgatgatttggaagggctactgttttcaaccctcatgagaccatactcacttatacatggctccatgttcttgttgagcaatatgtttgatgatttcaagttaccatgggcaatcttgtcatctttgagttcttggtgcatgaaggctaatgcttctgctatgttggctgctatttcaagtctagtggcccaatcaaatgcataatccatattggttcctgaaaaagaatttgagttaagaagtttagagaaaaaaatttgaattaacaaaactagttaagggtcatcatgacaagtatttattaccatgaagaaacttgaatagatttccattttgctgaaattcataaaccaaaagcttctcttgtttggaagaatagaaagcaagagttggaagcacattaggatgtttcactttatctaacctctgcattctttgcttaaactcatgactagaaatgtcccaatctttaatccttttgacagctacaatttggttattaccaagaaggaccttatagagactaccactcttgcctcttccaatcatctcagctggagcccttagcaagtcctcaaatttaagtccatttacctctggactagtgagcaccaccagcactgaggatgaaacaaaaccactttgatcatcagctgaagtttctgatttagttaaaccaccaaaactagacttgtacatgctgtcatctccatcattatcaactgcaactactttctttggcaatgcattattaaccttgtctttctttcttttgtttcttttgcaaagcatgaaaatgattagagcaataccaatcaatcccaaaacaatatatcctacaaacatagtaactgaacttttataagaatcttttgacttctctgaaagggtatttgattgtgaaggtggacactcatttggcaatggatccccacatagataaggattaccaataaagctatttgctgtgaaatggccatgaacatctggtatactaccagtgaagttgttgtttgagacattgaatagcttcaggtttgagaaatcgaatcgcggtatctccccaccaagctggttattttcagcaaggaatacttgaagacctgaaatactagaaaaatctggcaaactaccagaaaatctgttgttggatatgtcaaattgtatcaagttatttaacatgacaagagaagctggaaggcttcctgaaagcttgttccgagttacatggaagtgagtgagttgtttgcaggacgaaatctgtgtagaaattactccatgaatgttgttgtactcaagatgaacaacaccaagtgaggctgcaattggtgccactccacaaagaatgccaatatcaagctctccttctagttttgagctgttgaggtacaacttttttatgacactattctttgtcccacaaactacaccagaccagtggtcattgcaaggatcagatgtagtgttccaactcgaaagcgaaccgagttgagtagtgccattgttggatagctttgaaagaaagttaagcagtgatttcttaacctcatcttcaacagaagttgtggtatgaagaaggagaaacagagaaaagaagatgatcaccacccagataggaattctgttctttgttgatgatgccattatgggttaatttttttttatgtgggaaaagttggtgaagtaaataaaggatatagtattggaatggttgagattatggacaaggagaaaaatcccaatactttgtgtgaacttgttaaggccagttggctgattctaacaatggagattttttggatttgccgctataataaaagaataagccattttttgttgggggggccggcagcttatatagctggagttttttaatgtcacgttcgttagactccagcaaaaatacattaacaaatgatgttgacccttttgtttactctttcaaaattttattaaaatttttttagaaccgtactaaaaatatatattttttaaaaaaatgaaattaaataaaattaaacttcacggtcattacaaaaacaagtacacgatcgtaccaattgtaaaaaaaggtccacttaactacattatgggcaacaaaattatatattctgctaacaaaagtaaaattacaactagcataataccgtgagagtctattacaaaataagcgtggttctcaatctgtcaacgaaaatccagtcggttgagggaattgattactacccttgagtcactctttataataataaaattccagccatctttagcaacttccaaagctaaacagtaggttgccgcttctccgtacagagtatcagaaaactccaatcttactatatgcaccccacacaccacac

SEQ ID NO: 15155 - DNA, 4115 bp, Cannabis sativa
attttttcaaatttgtgtagaatgtcttaaataactataacgtatatgaccatgaaaaaaaaattaactaaaaaataattttaaataaatgtgtaccaatacatctcttttaaaagaatatgttgtaaaattttctaatatttttttatcacaaatttttttaaacataatttttaacttttcaaaaaactgtgtcaaatagacctccatgcttcaaattttgaacgagtttggatacacacaaatctttattaaataagaaagtattttagcctccttttgaaaaacaaaataaaataaagtactttagtactttagccaatacgaacgggccacgtaagaagatgtaagtccaattgcatgcaaagtgttacttgggtgatagagatgtctcccatcgttacttcagtccatgtgccaaaggaaccaactcactcgttgtctgtctcgtccaagttgggcccacggcccatttccaccgacatatcctatttattacacttattttttcttttaatttattttcatgtaagcaattgaattttatcaacataacagagtcactgcaatagtttgtagtaacatttcttctttttcagtgtacaatttgggtaagagcttgggctgggctgttgagtttcagggcatgcttgattattttttctcttttcctttttactatgttctttagtgtgatttttgtactagggttgaaaaaggaagcttgcagtctatttccaaccctattaaattcaccttccaactatctcaccatattattactattattaaaagaccagaaataaataaataagacaaatctcttttccaaaagttaataataagagagaatatgggaattgtaaatcaccgaaaatattaaaatggtgatgcttaatgtgcacatgatgagggcacgtgcttagctgatactttgggatcaccaattttatctgtcttgtcacgtgattcgaggtctttcccaccaatgccaagaaaaaaaaagaccatagtaattaaatgatagttgtggtagcactctcttatgtgttaatattgctttagttcaagtaagtatcgggttctatataatttaatataataacttttagagagtatcactagtcaatcacaacgcgatatatcgagaaaatactaaatactactggtgcttaatagtaatgctcatttctcactataagcgatcttcatagctccatttccctttcttttattaattgtaaaggaagacctccaccaatgtcattaacatcaactacatacattattattataataactataaacaattaaggtaattctttaacctgaaatatgttatggctctttcttatattttattattcgttttccaacatctttacagcagcatcatgctcttttaatcggagccgcttcagagctaagcagcctagccaatccccttgagccaaggcctctaaaccaataaatttggttaataaattagaagctaaggctttaatataatacagtatcggatcaaatcatcaaacacctaatataggggaaaaaaaaaaaaagataacaagtgatttgggatttaagaagataattcctccacttataactagaaacctttaattatatccatcaactttctttaatcgaacatattgtgtcccatttatttgtaggtaataatgtttcaaatacaaattactcttgttttacaaaaaaaaaaaaaacgaactcttattaatttcaacacgatggctactcttatttactatattcaatcataaaccacttcttttcgtaagatacaactataaagaacaatatcaaactccatagttcagtggtacatattactaaatattgaggaaatctcatttagaacaggattaaagttatataacttaaaaataattagtgttaagtggtgttaggattagtctgttaggattagtctgttattttcagttatagtcggttagttggttgtacccttagctaagcatattatatatatgccattccttcactctgtacataattcaatttactcaatataataaaaacagagttctttccctgattctcttgtaatatggtatcagatgcaaaattctgacctaaccttcaaaagaatcccaagcttttttcaacaatggtgcgcaccagagcaacttcatcagctaccatcactgacgacaatcctgtgatcgatgccacgaatccagttgctccaccaccatctcaacaatctgctggacatcgtgattcaccaccattaccagcttcaagatccaatgttcaagatcgccctgcttatgaagatatcagaagtccgtattacttaagcactgcagatcatccgggtcttgctcttgccactccgattctcaccgatcggaatttccaaccatggaaaagagattttatgatctccattggcgcacgcaataaaactccgtttcttgatggcagtctccctcaaccaaaccccgatgatgctctccttagttcttggacccgttgcaaccagatggtgatgtcctggattatgcattcggtttctccagaaattaaaagtagcatcatgtacctagaaacagctgccgctatgtggactgctttgaacaatcgtttcagccaaggaaaggccctcggatcttcgagttgaatgaatctttgatctatcttcaccaaggcgatgactcggttagcacctacttcaccaaattgactgcaatcctgggatgaaatcaaccagctccgtccacgcactccctgcacttgtgccgcagcagcccaacatcaactccaaatcgatcatgaccaggttcttcaattccttactggtttaaatgaatcatatcatgctgttagacaaatctttaatgtatgatcccctggccacctttaaacaaagtcttctctatgattgttcatcaagaaagacaacgcacactaggtactcgaaacaatgtgtctgttgctgctgcaacttctacacccgctgcaactactgatgcagcagctaatcttgcatcaagaaacaagaaaatgcgcccaatgtgttctcactgccaaaaacctgggcacttcaaggacaagtgctatttcattcacgggttccccccaggatatggcaatcgaaggcaacctgatgcctctactcgcaaacctgataaacatcaggcatcaaaacaaaccccacaggcttctcaagtctctgcaattctgaaaccagcacacctcaactcactactgatcaatgtcaacaattgatctcaatgctagcacaacaattaccacctgctgcttcaacatcaagtgacacccctgctgtcactaacttttcaggtaaaaatcatgacttcccttacaatttttggattatagatagcggagcaacccaccatgtaagtggtgttttttttttaaaccaactgataatagtatgaggtctttcacgtattgttaatttggctcgtgacctcggatcttacaaagaaaatagtggtgctaacatttcaacatcaaaattaatactttttaaagatataaaattccatgtgtgagggattcttttgttatattaattattaatataatatgtatatattaaaatgtaaaattatattattatgcgaataatatatattaagtgtggtaaatcaaatgtgtacttatgtatttaacttacactttatattatttgtctttttggataaaggacacgtagcataaaatgaggagtatctcgttaaacaatcactaattaagttccctcaattggctagggtcgcggagaaaccatacaaatatgggaaaagcaagcctgaaagctacttggagacttgtcccacagcatacctccatccaagacccgaaggccttatcatctctctgaaacccagaccaagctcaacatatgtccaggagacacctagaggacactcgaagagttgaacatggacagcaatcgctgagaggaagccagacgtctaccatgaagagagacctgaatcgttctagcgacggtcttccttcttcttcttcctcttcaatttcgaaaaacactaagcctttcttcacaaatattattcagccattagtgattgagt

SEQ ID NO: 15156 - DNA, 5733 bp, Cannabis sativa
cctcatctaaaggcggttcggctgcctctaaatcacaaggctcccataatggtagaagaactgaggctgctgcaaatgctgtgaatgctgcaaatcaatctggaagaacctcaaggccttcttctagtggaggcctctcaaggccttcttctagtggaggccctgcttgccctgcttatgatgaacaggtactattattaatgataagtttaggattaagaattttgcgtttgaaagatagtaaattgacaaaaatttcattaatgcagatcaccgaattgaaactatcagtcgatagcctcgagaaggagagggatttctactttgcaaagttaagggatatcgaaattctgtgtcaatgcccacaaattgaaaacctcactgtactgcttttcttaatccttttcatttttatgatttgatttctgtctatggtaagattttgaattgtgattcgaattgttgtgtaggttgttggtgctgttaagaagattctttatgccacagaagatagtgcatcagttgtggctgaagctcaagccatggtgtctgaaaataatggcaaggaagtggatttcttgagcccaattccagaggtttcagaggaaagaacaacaagttcagaaaatcaaaagagaaaaagtattgtcaacattgattttgagtctgctgggattacttcattgtctccaaggcaaaggatctcagatgttgctgatgttcatggcaatgtgtcaccccttatgacatactgattgatgatcatgatcatttttttaataagcaaaatatattctcattttctctgtgtttggatagactactaagacaaaggaaaatgtctcaatgatttttgtggcatatataatagtatgttgtctcttattaagaatgtataacaattaattcttttgcaatcttctctcttttgttacaaacttccctttttcttttccttctttataatgggttataacttataataatttaaaattacactttttacctaaactactaatatattcatcaaatttaattttggaatatccaagttctaaatatacataattgtaaattgtaaaatactaaatgtatattactgaaattactttatgtggaagccaaaaatcttttgttatcagcttagtctcacttattttaatttaataattaatattaaaaacagttaattattctcaaaactctacttaaggtgtgtttaaacagtctattaaggttgtaattcgattcacagaatgttatctgggacacgataggagtttgcgtgcctcaaaaggacacagaccactagagtataacacaagattgccttttcttgttaccatggggttgcgctattttatagaattacactcgtatatattgagctcgtaacggtactttgcaattcaagagtctctctaccgctaaagaataagcttgttcagcatagaaacatagataaagtcaatgacagaacaaacaatgaaactttacaataacattttcgtatttcctataatcttgtttgacaaaataattagtaattacactaaaaagttatatattttagtatttattatataatatttaaaataaaatgtttttagtaattacacaatgtagcaattctcataggtggcaatgaaaattggagagtgtaattggaattcttcaattatatctaattacacagttacagtataattacataatcagataaacatgtcaaactgtgtaattacctccaattacacataaatctaattacactgtggtttttcaaatgcacctttagtggtggtgcaccatattggatagaatttatgttgttttgtaaaatgacattaagaaaaataactttaccaaacaaccatttactattaatatcaagttttattttgaccataatggttgaatatccttcccatccggctaaaattaatcgtccatttaagactaagtaaacaacaagcaactaacaaagcaaaacaagtgaatataaatccttattaaccccaaagaaaagtatactcaaatattgtgttaattacaatcactcctaaacatggatacacaacccaacaaggtaaaaaattcctcttatacatttctttctaccaatgaaatcttattcctctaatctcataatttatgtaatctaaactcaacttgtgtatttacttatcaaaattgaaaattgtgtagactataaatgaactaggtgaagtgaaatcaaaggtggatagtgtggatcatcaatcttcagcaggacaaggccaagaaatgagacatgtccaagtgattcaccactcacatccttcggggaattcgagcaccaccaccaccacgagcggtgtcttggctggcgccgctgctgctgcaacggtttcaattcagtgtgcaaaagatgccttgtctggaaaataagacacaagtgacactaataacttgcttaaagtttcaaactttcattgtttttaatgaattttgttgtgactaatatcaaatattgtcataaagttttggtctttatatgatttatgttaattgatataatgggaaagtttgtaactttatctttgacaagtgaatattagtgagaaaaatatcttctttttattctttttcttttactaacaccaaaatgaatcttttattctttctccaacttctaatcagaatcctattctcatacaccttttatgccttaaaagagaacattgttctaatctaaacttatctcataatattcataaacaacaaaacattaaaagaaagaacattggcctctgttcaaaccttgatacaaaggtcaaaaagctttaccctttatttgttatcatcattcttgtgtagaagatttggtcttgttttgatctgtgcttttttgttgaactagttttgaagatgggtttatcgatttctcggttcatgagaatgtttttcgccaagaaagaaatgagaattctaatggtgggacttgatgcagctggaaaaacaaccatattatacaagcttaaacttggagaagttgttacaaccattcctacaattggtaactatgtattactcttttgattgttctaatctaatgattattggtaactagtaataagcttaatcatttatgttaaacaacaattaagcttattactagttcactaatcgagttatgactaaaggtgtaacttgtacaaatctttctatttttcaattcgatttgatccattagttcgtagagctatttactcaatcgctacttctaacagggcgacaaatagtcaattttgaaggccttttctgcactatattaaaatcttcaaacctatcaaaacatgctgtttacttttaatagaaatgaacaacttgtgtactaattcgggtttttttcgattagggttcaatgttgaaactgttgaatacaaaaatgtgagctttacagtttgggatgtaggaggacaagataaggtaagaaggtttgaacctttcaagtactatttatctaacaaactcagctatggacaattctgttgttaatgtaacaaaatcaattcattgttacagattagaccactatggagacattactttcagaacactcaaggtcttatctttgtagtggatagtaatgacagggaaaggatttcagaagctaaagatgagcttcacagaatgcttaatgaggtaataatatcaatcatttacatatgtattttgacaaagttcaaggaaattttatgcttcaatttttttgcaggacgagttgcgctatgcaacgctgttagtgtttgccaacaagcaagacctcccgaacgccatgagcgtttctgaaatcactgataaactaggcttgcattcaatgcgccagagacgctggtatgaaaacaacattgaaacacacctttagaatgagcatttctatctaaatccatgtcatgtttcccaagtgaataaaaatgttagtagtgagtgaaaataatgaaacaagtgaataaactgcgggtgtaggacaaacatgatagggggcttaaggggttgtgtgccccttgaatacatcgggtttggggggaacatcccccgctctctcactttgattcaccacccttcgagtgaactacgagtgtaggacaagaatgatagggggttcggggggatgtgccccctgaaatgaaacacacatttaaaatgagtatttctatctaaatctaagtcatgtttcccaacttgaataaaaaaaagttagtagtgagttaaagtaatgaaacaagtgagtgaactgcgtatgtaggacaagtaagaatgatagggaattcagggggatgtgtatgccccttgaaataatatgtcagaggagttcgggggatatcctgtttcccccggtctctcactctgattcaccacccctagagattgttaaggggtatgagcctgaaaacaatccttcttgtctaaacttcgttgctcatctctttgacttctagtgaaagaaatcaagatgagttgagttgcggacacttttcagtttctttggtcaattaggtcttttcatagcattataatgttaatgatatttttaatgaatttcaacaggtacattcaagcagcttgtgcaacagctgggcaaggactctatgaaggtcttgactggctatcaagtaacatttcaaccaaagcataacaacaaaactcatgtaatctcttcttaatatactcaaacaaacaaacaaacaaactatcatatgtctataattatgcactgtaacataaaacaatagtaagtgatcaatcaaacaagaccagagaaacacacactaataaaaattgtaactttcttgtactataatcaatcatcaatcatttccattcattcccactagtaaaaatccaatcttttataaatggggttatttaatattattgaagctatgattatccccactttaaaattctgacatgattgttctgttatgaaaaatgtgatatttagctgtatatgatatggtggttggtttttggggagaaagctttattacataatttttgatagacttgactgactgacaagttaaagactctaaaaaccaggtgctcttattttgtgatatgatttataggtgagttcattgatgtctatagattcagtttatgaactttgtccctttttattattgctgctcattaatcttttcaactaaaacttttgtcatcaatcaatattctttttcttctttccagaaagaaacttgtcaccaagtcctaatttttgaaaaaatataaataaaaaactctttttttttattttaatttttatgttgttatcaacaaagatggtgagccttcacttgaaaaattaatatcaaaaatttaatatgagacagaaaatcttgactagtaaactagattcatgtatgtccccacttacttacaaaaattaaaatcaaagtgttttatgagttgggttgggtttggtttgtgcatttatttgaaattaatatggtttattttttatcaatccaaaataaaagtaagtgtgatacacatttgttggggtgaaattattaatataacccttgtttttgttatggttaaaagataatgagtgccattggaaatttccttaaaaaatataatgaacataagaaaaatgtataaatgaataaaaatagatgagtgaccatacaaataaataaaagatttaatatagatgttttagaaatatgacttaagtat

SEQ ID NO: 15157 - DNA, 8808 bp, Cannabis sativa
  modified_base (7145)..(7149): a, c, t, g, unknown or other
gagagagagagagagagaggaggacatatggatacataccgagaaaggaggatggagaagacgcttgtccaagctcgcgtgaaagagatgccagagaaagggacggagaagatggtagatcgaggatggaaacgggccagagtttcaatgtttgctccattggaaagaagaagaagaagaagaagaaagaaagaagggtggcgacggtagggtttttttgagaataaaatggagagaggaggttttctttcaaaagaagaataaaagaaatagaaaaagaaaagataaagaaaagaaatatagatttattattattattattttatttttataattttaaactattttttaaataataaataatacgtggaccactaacaatttttcacgtgtagtgtatacgtggactgtccaatgtggcacttaatagaagtctttggacggaaatatagaaaacaaaacataatgtgagtttattaagttttactgtcaaaaaataagttaatgagtttaagtgttacaaatcgtaaaatttaaataattttacttctaatatccatatatatattttaattttttttttgaaaggaacagaaagagcctaactctatttgacatatatatattttttgatttaagtatttatatattataatgcatatcttgggactccacccaatacctttaacacatacttttatggttacctgagtaagtatttgacttatattttactacattaaaaaaaaataacttaaatataacacacgaccctagtattgtgatgctcttagtcccaattttaattgagttgagagtgtttatagtattttcttgagaaaaaatggcctattttgcataattattcgaaaaacatgagctatagatctttgatttgttttccttggttctgttactgtttccaccctaaaaaaaaaaatctttgatttgttttttgaactttttttttttctggtgaatatattccgttgtctatagtactatctcaaataattttgacaatattttctttcacaatagatatttaatgctcgtaagaatataatatattatacaaattatgacgagtgattcaattcaaaccatgattcttgaaaactgcattgtgaattcgcactgactatttcactcattttttttttttgtttatcgtatgcttttattttggcatcatttattttaaaagtattttggtatcatttaatatttaaatgagattcaaaaaacaaccaaatataagactatttttaatgtaagattcaaaatttgtgttaaatttatcaccaaaaataaattatatttagcctactattaaaaattatactccaatacacaagaagtaaaaaaatataatattattattgatcatcatttaatattttattaaagtatataaatatcattatttttttattttttcattacttaaataataaaaatatggcaaataaagaaaataaaattatgtgaaagtgaaatgaattaataattaatagtactataataaataacaaagtagaatttattgtgatctaattatcttttattcctataagtgtgctaagatataaatagtgcttgcattcagttctccatatataaatggcttttgctttattaggaaatgacaggtgcttcatatataaattaaaaaaatttaccatgacattttgctacttcaacttagattcaaaatcccacttctcttttttctgtatacatgacaatgtttaacccccattttacatagttctaattacagcaaaacaacataacaaaagaaattgtacaccaaagttccatcccaaaagaattcaaaacacttttttttaggggggtcttgttttcttggttgcttcttttaaaggctccctggatgctcagctactcattggcattgattttgacaagagtggacccatcacaagatgcctcttcacacaacaatgacaataacaatcacaaaagaagaaaggaattgggaaataaggtaaaaagaaaaatttaagatgtgaacattgagggaattttccattagtgctacttaattatagcataatggtaaattaaaatgtatgtgtgacaaattttgactattttttccaacattcgggagttaaagaatggtctctcttatagtctttgcaatagttgtacaccatgtggtaacgctggacccatctcatggtcctgtactgctgccgggtcaagccgccggaccgaaaaggcgaggcggaaactgggtgacacctggccggagcataggctgagcagccaccagccttgaaattggtgtactgagcaacaaatggttggtatttataatcagctttgtatttaccatcttctgtggcccatgatgaggcatcccatattgaaccatataaccacattggccttaatggaaaggtttcagcactcttcttagggtatctccttattggcacatcatcaacaagaaatctgcaataataataataataataattaaattcaaaaagtttggaataatagacaattagaacagtctaaaaagctcttattgcacctactataaatagtacttgtatatattaattaattttggtatactaaactattgtgtgttacttagatactagtggccatcaagtggaacatgtagacaagtttcttataaaatcaagatttgttaactttatccatttttgtacatttcttagatttttttttttcttttcgaaaagtgttcctattcatgtgatcaaattattctatttataattgcccttgtcaaaatcaattggctcctttattttagagaatgattaaaatagtaattattattattatcattactattggttaacttacattatttcctttggactccatagaatggcataatgatgaaaagctttagttggatcaaaccaaagatgaaacttcatttctcttccaataattttaccatcaccacttcctctaatgtatacatttgtttgaagtgtataaggcttcccaaatgttgttccaaggaactcaatgtccacttcatcatgaaaccccggatgagcttcattatttgatagctgccatatttcacccccaattcaatttaggcatgtaattaatccaatatttataaaactataataaataaatatatatttccaaaaactaaatatattttctcacatataaagatgttataactcctgctgtataaccaggttggagcttaatagaggcaccaaagtagccagatcgaaatggacgaaccgatttgaacccacttcctgaaatgcaaaagcaaaccaacctttttgttagaaaagtgatcttttaaatgcccattaagagattcattaaagaaaaaaactataaaaatgaaaaaaaaataaaatataatgacctgtagtactgtcaagccagattgttaatgcattctggtctgttctctggtgtgaaggaccccagagatttctaaagcctttataaaagctcattggcctgaatttactacttggccagtagccaggggaaggtggccaggctgcattgcttgatggagccataagagttagaaggaagattaggatgataaaagccattaaaagagaaaggagtttgtgatgagatgagatgtgagaaaagaatagagagagagtgatgaaactatatagagaaattggaatgattgtctgtgcttaaatgcaggggagagagtgtgtgagtgagagtatagaaatatgagtatggtcgtactgccttgaaataaatagaaaagattactgggtccctcttggagagttaattaataaggtaagaatggaaatgtacgagcggttaaaaactccaaaaataaatgggaaaaaaattactaagaaaaactaaactgatgtatcatagaaaaagagggaagatctcttaaagagaatttttttttttaattattgacattattttagtctttctttcatcacaactactttctttctcacccttaatgagaaaacctgttggctttgtttttcattggtgaaaaaacttgaaataggagttgtggtgcagaggaggtagatgtgtctctattaaatgtgttttttttttctttttctttctttcccctctttttgggtatatgttttgtctttgtgactccacaggaacttggacttctgttaaaaaggccttaactcttttatggccttatattgaaagctgcattttcatctttattatataaactattatggcattattgttggatttacccaatttgtatgatgttagttctcccacatccaatatttgcggataaaaatgtgaaaatattggaactaagggtcagattctgatatagtcaaatcttaaaaagaatgaaaactaaataaataaatagattggtttctaatgacatgtttgtatttgtgaacttcatcaatgtagtgggttatattgtctgtatatatgggacccttctttatttggtgatttgatattaccaagcaaaaaccttgtgactttgatcccatattgtgaagtgtttgtacggatgacacattattatataggcccaatgtttatataatttaaccaaggtagagtctctatatatttcacaacatatctttacttttcacataaagaatatcattcatatatctatattacatatatcatatatgtatgtataataaggatttatgtaaataaagttgcattaattatattcatttgaggtaaatgtatgattcattaaagtcaatgactactgctggatttctttctgctaccaattcagagagatagatatgttgtacttgagattgattttatgcatgccattggatcaccttatgtggtgctctacttctcgtttgattcttcttaatttatcttgaaatagaatatgcagcattgatgatataattacctgttttggacgggaatcttataactcagatttttctttgcagaaagataagacttctttgatttgaaaaagttcttttgtacacacacatatcaaaaccattaaaaaagaaaaaaagaaagagaaatccattagaattgtagtgatttgttttattttattcgttaataataaaatgtcaaatttgggctgtatataccacaataattatttataagttcatagttttagagcaatattggttgctcaacatggacgcaagaattggtgctgtctcaactccccaaccaaataatttggttgtcttttgtaagtaagatagagtgacccttccacaagatttattcaaactttttgatttgagggaccacatctccaaaacatagcaatctaaaacaaaatcttcattcaagtatattatatatatatatatatattattactacactatatatggaccccaaaaatacaaaaactaaggttcacaagctcagcatgatcaaccgctttgaattcacctcccaaaaacaaatttggtacaaaaaccaggaagatctacatgtgaaaaagaaaacatatacatatatagattcagaaagaaaaaaacaaaggaacgaactcgtctagctcatcactagatatttttctttttgttccattattattcatgagaatagattatttccacacttttatatgtgctgcattgactgatgaatatatgagatttcattttgtcatgtattgacaccaaaccttttatacatagatgcttaatgcagggttgtattttctgtattagagcctcttttcttttctatgacccaaaaaaatgcgaaagtcttaatgtatactctttgatctcactattttgtcggccaaagaaaagtggggtctctagggatatggcagtggggcctgcatggccgacaaatcaagaagttcacgtaaccctttattatttttcttattatataataatatatatattaatgtctaagtacgtatatatatctacctatctatatctatcaatctatttaacagctactttagaccaatgtacgtagtagatccacacaaaaatattgatgccctatatatcttttatctatgctttgttttgtttttgtttaccagcagacaagctaaattcaaagcgaaacatcaaaagtcttaataaataaggttagaaacttagaatagagacctagtagttgtcactactagaaaaataggtttagaagtcttttttagagcttacagtactcattttagcgaaatttactaccgacgctatttcggtaacacaacgactattattgaatattactaaaaaatttaaaactattaataacaaaaaaaaaaaaaaaaagtctaaaacaagataaaacaagcgatgcgacttagataatttctaatcattattatatttgtcattaatattttaattcgaattttatgagtcaagtgttttttagaataatagaatttaggattctagttctacaaatataattatctttactttagtttaaattttataatacatcatttggtatgtttaaattttatgtgacattttattcatccttaggtgttctaaaatatcattctaatataatttgtgaggcttacgccttgaggcttacgccttgagacttacgaaatttctaactagtaactaattataatatactaaatcactagttagtaactaattatagcatactaaattattaactagtaactagtaactagttttaattctactgaaattttaacagcataacgactttaattgaacgttttcaaaattttttaagctattaataacaacaaaatacaattcaaaacaatataaaataatcacaataacatttagcaatacaaaaatttatcacctatttgaatacagtacatgtattcacaaaacctacttcactatgaatgaatatttaagataaacaaactctattaagcattcataatttattaataataaaagtcaataaatttataccttgagctagctagaaatcgatcaacactaaataatccagattcttgtaaattgatctcacaacctacaacataaagatcaaaattaatttttttttttatttaactacttactagttatataatttatgagtaactagttactgactagttaatttattgctaactagttactaatgagtannnnnttagtaataaaaatacatgaatatgaatgaaaattagtaacttattaagtagttataactaactatttactagctactgaaaaactaaaaacacatgagtaaaaataaaaatagaaaacaatgatcaaaattatataattaatttctaaatttttgttcacgaactatttttttagaaattaatttctaaatttgtattttaatactctcctttctcattctaattgacaatatttataaaactataagtttaaaatattcaatataaacatatacaatacataaaagactctcctatatctcattctcattcacaatatatatacaataatacatattcaatacaatacaaagttcatgcatattcaataaaattattagagattaaatttataccttaatatccgttgagattcaatgttttaaacaccaaaatggtggtcaaagctacaactacaacaactactaactcttctcccagtttacattaaaaaatgaagaaaaacactataacaacatactagtttaggcgtgctatcgtgatttcttaatatcgtgtactccttatcaaagagtttatgaaaaatcgtgattaattaattttttcttaattaagctttaaacttgaataaataaatactttaaataattcaggatctcgtctttaaagttacagctgttttacaaaatatttagtcacaaaagttatcgcctagcatctatcaaaataaaatctgctgctccgaagatcaaacacttcaggtttaatcgcccaaatatgtacaatctttatctgctcgggctcattgctattcagccgtaactttgcctttacttacacatataaaaaatatctatgagtcgacagactcagtaagaaaatataatcataacataataaagataaactggattatacctaagcacccgttgttaggatatttttagcctattatttatgttatttttagaattaattatcttctttattatcacttttcgaaatagaattacgcttgtttttgttaatttcaggtttcgacacttagaatgtatcaattgacaaatcgtacaaaaagatggtctataaaatagagaaaattgtccaagaaaataaagttgaaacttcaagcttaaattagactttgttttgttcagattttggaggcattcaaaacataaaagttctagatctctcttttatcttttcagaatatctttaattgtccaattctgatctatatcgagagagttatggccaaaatactattagttaatgtatcagaaagctcactgcccaaataaaggggggtcatgcgtaggcatagggatcccatgtcacggccagccccttctaatccttaaaaaaaaataagttttcaacgtcttttatcattttttgcctttaaaagaagtggacttcaatagttttcaacaagcaaccaaggagtatgaattttggagagcaaaattgatcgcgaaggctttttcaacggagttttcaacatttttttcttctctatattcttcttccattctcaattaatatgtgtgaagttgctatgatgaacacaagtagctaaacagttcattagggtctagatggagattgtttgatattgatttgtggttttgatatgatttaattttccctcaatt

SEQ ID NO: 15158 - DNA, 11838 bp, Cannabis sativa
  modified_base (48)..(70): a, c, t, g, unknown or other
  modified_base (8933)..(8936): a, c, t, g, unknown or other
  modified_base (11559)..(11562): a, c, t, g, unknown or other
ttcatatcattttagaagttcataattaggttgttaaatcaacatacnnnnnnnnnnnnnnnnnnnnnnngtaaaataatttccaacacgcattgtgagaccgccactatgttcgtaccgctatgatagcatcaatagcacctaagagtaaaatttgcaatcatatcactcttaaccagtactatgcccatactgtcggaccgacacaatggttgtgcctctatgatagcgtcaattaatactctctgaggtgaatatcactcttaaccagtacgatgtctgtactgctgaaccgacacaatggttgtgccactatgatatcacccaaagcataaacaattgcaaacacaccatgcatatataatatattctatgctaatcttacctctttttggtgcttaggtgtggcgatcaacctaattagaacagcaacttgacgtattacagggccctatatcacaaccttcgtaaatttgatgagagacacgataaaacactttccaaggacttcaaaccaaaactagaattatccctatcgatgcataacatgataataccctaaatatcacaaatacgggaaaaaatagggtttccaaaattttcccaaccgaaagactagttccccaacaaaaattccgatttggtagggttcctggggaccaaccgattgatcggttcctacaagtcccactgaactggtcaccctgtttagtgaaagaaccaccgaaattgccgccaacttctcaattaaactccaaatttcacaaaaacttctagaatacatgtacaaactctaatgaaccaaattcaagcaataaacctcagttttaaacactgaacctcaaactttgccaaatcatcaccataacctaccaattcaacttaaatcaaccatcataaacctcatttaactcaaggacgtgaaatctagcaggttacacatccacaactcctaaattctcaaaatcattcaacaacttaactaaaccttaagaaaacaaggaatagctaggttagaatgatataccttagatttaaacacctagatactgttgtaattccttgaatcacaactaaaagtccttccctttcttgctagttcttgacaattcgaaatagagagagaggttctaggtttttctttttctatgcttatgtttatctaataaaaggatccactaactaaatagtttattaaacttaaataataatgttcacaaaagacaaaaatctctcctggcaaaaagacccttttgcccctaatcaaaaattcaaagattaaatgacaactaagggtagtttggtcattttttcaaccccgaccacttctgatacttccaatgcctaacaataatgcaacattaataatattcctaaccatataaaatgtgactctctaatggcaaaacatctcgttccactgctactaaacacaaaccgagaaaataaaaattcacatatataacgtcattgtacattctgaatttgaaaaaatctccacaaatgtgtaaatcataattaataattcaatctcataatcccttgattaattaataatccaacatattaaattcaggctctcattacaatagcacccacgtgttacgctcacacgtctattttacatttaaggccttactagggtttgtctcgattattgttaccaagtctaacctgattatgccttacctgcataacactactcatatatacataatccatacattatgttcttacagtggtttatcctgatgatgtttacgaggtctaaaccagttatgtcttatacacagaactcttcacatacatgcatacattcaataccttcaatatatactctaatatatgaagttttaggctaataaccctaacttgcataactaatcttttactcatacaacacattatagcacgctcaaaataatacatattgacgttaataaccctaattcaccctaattctcaacaacataattgcttaggacaatatccctaattcacaagttaaacgctttgggtaatgaccataattcatgacacatatagtaatatcttcatccataggaacacagacacagttcataaatcatatcccattactatccactataaaatcactagtcttctcagctgaaaccctgtctcaggatttcactaagtttggatcttgtgattgtgcttctttaatactttcccaaagagtaaattggagggtaatgttagccaactatcccacaacaaactcaatgctagctcgagtaatttcatctgccagttacttggagatctgcctcattgcattaatttggacttgacctttcctactttgggcatcagctacaacattagcctttccaggatgatcaagaatttctcagtcataatcctttaccagctcaagccaacgcctttgtctcacgtttaggtctttctgggtaaagaagtatttcagacttttatgatcactgtatatctcacatttctcgccatataagtaatgccgccaaatctttagcgtaaatactatagttgctagttcgatcgtgagtagggtaccactactcgtactcttttaactgctgagaagcctaagctattacctttccattttgcataagaacatagcctagacctagtcttgagggatcacagtaaacaacaaattttttccttatcagaaggaagagctagtactggagcggtaatcaagcgctactttaactcctgaaaacttttctcacaccgatcagtccaaacaaactttagattcttctcggtcaattccattaaaagtgtcgctatctttgagaaaccttcaacaaactgacaataatgtcctggattttgattgtcattcttctttcttcttcattcttggattgtagacaatatctaataaatggtccagcaaaccacactggaaacatattttggtttggcactcaccctgatggtgctttttgtatttgggacactctaggtatgatttgaatgtagacccacaaccttgacaaccacctctgattccctaaaactttctattacttccaaatgtttcaaaagcttcagccttctgtttgtaatctcggttgccactgtcgatccccttactgacattaccaaccacactaggattcgatgtcgtgacggcatccttagcagctttctctttaattacatgttgctcaacctctttagcaatcaaggctaactcaacaacaatcttatataatgtgtcatgatcggcagtaatcttcaagtcccaacttatagtggcattcagcccccttacttgtttttgtttccgagtgaagtccgttagcattaggtcaccagtgaacttggatagacaatcgaattctagggtatacttggccactgtcatcttcctttgagtcaatttcacgaattcttccatatgcaaagttcttatggtgatgttataaaatttctcttcaaacaggctcttgaactcttcccaagacatggcgctaatgtctcgggtctgccccataatatcccaccagacgtgggcatgatcttgtagcctaaatgttgtacgagagttcccgtcactcccatgttatccagaatgcaagttatagttctcatccactactctgccttaataatattagtacctcccaaaaacgctagaggttgcagcttgacaaaacgctcaaataccgaatctcaatgtggcaaaataaatcctgagttacccaccactagaacaagagctggtggtaacacttgttctgctagagctacatgagccggtttcctaaaccaatgcaactcatctccttgacgaagtatgatacttcgcattttgaggaacatttgctgctaatcggcaagtggattagcattattaacccctacattatcaccgagattctacggaggcacacacggtgttggtggattggttttgctattaccaggctccacatgctcgccctacggtctagttgattgattagggtctatttctctcaaatagccctaaaatcaacaacccgacgagtcatgcaccaaatccacacttacacacttattgggttaaccctaactcatacattctatgtttctttattaaaataaacatttatcaatttcaacattaatgattcctttcatatcacattcattctaaatgttcatatactgcctaaaaatgaaagcggtaaataaataattacataagaagttaagcatttactctcaacacttactgcaccatgagtcgagcttgtctctgatgatgattgtacatgttcagccggtctacaggaagtttaaaaaccttagcgctctgataccaaattataacgccctaataattaggccaaaagcattttttgataaacataacctaatcccgctaaaccaggattactaaaaataagagcagaatttaaactttaaattatttacgatatgaaagcataacttgtaactatttaaactttacaaaccattccaaaaagatttctcctattttgggatcccataaaaattttcacaaaatattacaagttatttttacatttaagcgacaaaactgagattacaaaatacatcaactagtagaccaagcccgggtggtctagtatggcgcaaacatgtacaatcaactgtcaagccctcaaactcatggctgataacaaaatgataaaccctttcctgcagaatagagcactcgtgagccaagcccagcaagacagaataataatacaacatgataattataataataattacattttatcccacacgccactgcgtatatattgtgccactgcactttttatcacattattcctatgtaatgatgtcactataattaatttctatatggcatagactcacgtgttacgctcacacatctattaatgtctatatagcatagacacaagtgctacgctcacacgtctattaatgtctatatagcatagacccacgtcttactctcacacatctattttacatttaaggccttaccaagatttgtctctgttatagttaccgagtctaacctgattatgccttaccggcataactcaactcatatatacataatccatacattatgttcttatagtggtttatcctgatgatgtctaccaggtctaacccagttatgtcttatacccataactcttgaaatatatgcatacattcaataccttcaatatatactctaatgtatgaagttttagggtaataaccctaacttgcataactaatcgtttactcatacaacgcattatagcatgctcaaaataatacatattgagggtaattaccctaattcaccgtatatatatatgtatctttagggtggtaaccctaattctcaacaacttaactacttaggaaaatatccctaattcacaacacaagcgcttaaggtaatgaccctaattcacaacacatattattttagagtaataaccctagttcatgcgctcctttgattaacaatattatatattacttgacattattgctttcttatcctcatatattctagggtaataaccctagaccacattattagtaaacttagggtaataaccctaatctcgatttctcgcataacatatacaaatacaacatacatgagcgccactgcgctattctctatgtgctagtttaatatcttacctggtaatccaagtatatggagattcaaaatcctcgtgtgttcctaagcaagcactggtaatcttagtcacacgatcttgagatttcacaaatagggttaatcctaaatccaatttcacataaacacataaattgcattctaattacagattaacatgtagagctcaaaacgagctttccaatagtagtaagaccgttccaaatggagtcctgagtcaaaagttatggtcgagatttcacaaatagggttaatgccaaatccaatttcacataaacacataatttgcattctaattatagattaacatgtagagctcaaaacgagctttctaatggtactaacaacgtcccaaatggatcccgaatcaaaagttatggtcaaaataagtcttaacacattctgccctaaaaaaacctctacccggccgtggcactcaaagaccatgccgcggctcttgggttaaaaactcaaaaaaaaaaataacttttaggtgcccaaaaatgcaccaaattcaacccaaaaatactacaacttaccaacaagcttctcaatcaaattgaggtgtttttccaagcattatacaccagaaattcattcataaactcaagctcaaaacttaattacacatgtccaatattaacaatgaattttaagcataaaacaaagctttacatcaagtacaagaacatgagattcaagtttaaagcacccataccatagttatacttttattcaaagcttgaaacctcaagcatacatgcttcaatgaaaaacctagaatttcatgattaaaacctagaaattcaaactctattatactccctaaaatcatacaaaaataacctaggagcaaacaacatacaccataagctcaaatacacaaaaatcatcacatctcacctcaattcatatcaacatgcatatataaactcaaagaatgtcatgaataaggttcaaagcttcaaaaaatgagaataaacataagcaaaaaaaggagattagaaagcttaccaaaaattcctcaagcttcaaccaaaagaatcacataaaacccataccaattcaagcctttttctcattaaaatagtgttgaactaaatcatagagagagagagagagagagagagaaaaagagggcagttgggagagaataacccaaaaaataaaatctatttttgctaaaaattactttttattcaaaatcaattaattggtcaaaaggccaaaatgcccctagggccaaatataatcataaccatataataagggtagagttgtcatttcaacaacacatatataacacaataatttagatttttccattcatcacataaatgccatacataagtccaaaaaatgttttttagccccgaacccagtttggtccaaaataatcggttgtgactgtatcgcgtgtggttgtcagaaaacacctgcagttagacaaaataaacatactatataataataatattgtaacaccctgatacttaggtgctacagtgatttttcaattacagtgcaatctttgctaatcaaagaaattttcttaaaaatcgtgtcaaattaaaaatttatatttaattactaaactttataaacttttacacatttatatacaaaagttgggatcccttatttacttttagaaaatattaaaaatataattaattaggtcgcacagcaactacaaaataaaaccccaaatgtcctgagaccgaacactccaggtcgcaccgccatgacatgtacaacatcatcctagctcgaagctcactcctattcacccttcgccgttcctttacctacacatgaaagtagaactgtgagtcgacagactcattaggaaaaccatataacaaataatataatactgacttttatccaaccgcccatacacctatttacaaggcttaacaaatgagcaagaacgttctttactagggtacaaccactataccacatacacttcgtaccgacattgtacgagtgttggtagggtttgtttcgtaccctgagtaccactaagtgttataccacacacaccttgtacattctcctacttgtgctggtaacaccgtaacgtactattaaacattttacactgtaccaatgcactctgtacaacttccgtacaagtgttggtagtgtactaagcataacaagcatgcatatatattttacacatagatacattcgcatatatatatatcatatgttctacgctattcttgtctcatttctgaatttaagtgagttggccggcctgaacgaaaaacctcatgccggatggatgccctaatcacataacataatcgggtaaataaaaagccaaaaccctaatccgggaaacccaaacctccaacttaaggttctgctattgataactaaagctacaataccctcagcaacaaggaatcacccaaccaaggctctgaaatggacacgaatcgacgaaatggattgtttgggaaacctatcccagaaccggttaaccgattttataggacctggcaaacatgttaaccggtttgcaccaggtttccccaaacaatccaaaacctgcacaaaacgtgtccaaacctcactaaactttccataacacctagaataacatcaaccaacataatccaagcaatagaaccaagaaattcacacaaaatcaaaaagttccatggataaaccaagcttgagttttctaactcaaacttgtgcatccaccacaccacaaccctaaaccagttgcaagaattcaattctaacttaaattgaacttagaaactgaatcatgaacaaatctgaccctaacagccccaaattcacagatttacatattcaaaccaaaatcaaagcttcaataacataaggattagagttctagggttacctttgcttaaaaccactaaaatttagctaacatttcttcaatttacaccagaaatatcccaggtcttggctggttcttgtggtggtcgagcaaggacgtaagagaaagggaaattcttgatttttttctattttcttccaaaatgaataaagcttaattgattaatctcgtgttgaaataaaattggctaggtgtcaagccctaaaacagacacctatcccctttaccaaattactaaaatacccttggtgcaaaagcataagccaaattaagcctaggggtaaaatggtcaaaaaccataacccgctcaaacccggtattctaactatcttaaatatttatcccactaagaaaaaggttctagacttaccnnnntgactcaaatggccatccatcgcattttctgttgttgctaagcaaaaattttaaaaatagcataattcatatataactcaaataacacctctagagtttaataaaatctccaaaattgagaaattataattctagtacccacttttaataatgggatccacaattatataaattcataattattataaaaataaaattaataattaacgataatttactttactaatccgtattctaaaatgcggtcattacaattatcccttcgttaaaaggattttgtcctcaaaatctaacttgaatagctctggatattgagtcttcatgtcagactctaactctcaggtggcttcctccaccttgttgttcctccagggaactttgaccaaggctatggtcttgtttcgaagaaccttctccttcctatcgaggatctaaactagttgttcctcgtaggacaagtctgactgcagttcaagggcttcataactcaagacatgagtcggatttgaaacatatttcctcaacattgaaatatgaaatacatcacaaacagccgataatgctggtggtaaggctagccgatacgctttctcgagtttctgaaacgggccaatgaacctagggcttaacttgcacctctttccaaagcacctaatacactttaccaaagaagcccgtaggaaaaaaatttcccctggctgaaaatgtaatgtctctacgctttggattactataactcttctacctacttggagaagcaagcatctgagccttgatcttgtctatagcttcattgatctttttgaactaattctggacccaaatacttcctttgtctagttttgtcccagtggattggggagcaacattttctaccatacaacacttcataaggagccatccctattgtacttcggtagctgttgttatgggagaattcaatcaaaggcaagtacttactccatcaaccgtcaaagtccatgacaccagcttgtaataatcttttagtatctaaattgttctctctgactacccatcaatcttagggtgaaaatttgtaccgaacattagctttctgcccataactatctgaagacttatctagaattttgatgtaaactttggatctctgtctgaaataatggattcaggagctccatggagacgaactatctccttcacatataatttagtgtattgatccactatataggtgatctttactggtagaaaatgagctgacttcgtgaaacggtccactatgacccatatttaatcaaacattctcgtggttctaggcaaaccaaccacgaagtccatcgcaatatcctcccacttccatttaggatgggctaatggttgcaataaccctacggcctctgatagctttaatttgctgccaggttaaacactttgatacgtactctaccacatctcttttcatcccataccaccaaaaataggatttcaaatcatgatacattttggtggttcccgaatgcaacgaataaggtgcagtgtgggcttcatcaaggattttcttcttaagctcaccattttgaggaacacaaactcgagctttatatagtaacattccattatttgagattgaaaagtccttaggtcgaccggccaatacctcatctcaaattttgactagctcaggatcttccaactgcacccttctgattctttctaataaatccgattgaagtgtcagatcgtgtaacttttccactacaaactcaattttcgcattaaccctttctgaggctacttgaggagctatcatcgcgatgttgaaaacctgcccgggagctcttctacttaaagcatgtttcacatcattggctttctcggggtgatataaaatctcgcagtcgtaatctttgaccaattccacccaccgtctctgcctcatatttaaaactttctgggtgaagaagtacttgagactcttatgatctgtgtaaatctcgcatttttcaccataaaggtaatgaccccatatttatagagaaaatactacagcagcaagctataaatcatgtgttggatagcgttgctcagaatccttcagttgacgggaggcataggctatcactctatcagcttgcatcagaacacatcccaaacactgtctagatgcatcacagtaaacaaaaaacttttcgcgatatgatggcaaagctagcattggtgccgttatcaattgttatttcaactcctgaaaaacttgcctcacacttgtctgactatatgaatcattgattcttcttagttaactcggttactggcatagaaatcttagactttgacaaaatgtcgataatgtcctgctaaactgagaaaactttgcacttccatcacagattttggccttcgccaatttttcactgattcaatctttcccaggtcaaccatgattccatcttttccaataatgtgccctagaaaagacacctatgacaaccaaaattcacattttttggattttgcatacaacttatgatctttgagtcattgtaataccatttggagatgtttctcatgctcctcttctggttgagagtacacaaggatgtcatcgataaacattataacacagttatcgaggaaatcnnnnaatactctattcatgagatccataaagggtggaagagcatttttcaatccgaatgacattaccgaaaactcatagtgcctatatctagttcaaaacgcagtctttcgtatatcctcttcctgaattctcagctgatgataacccgatcgtaggtctatctttaataacatagtcttcccctaaagctgatcaacaaatcatcaattctaagcaatgggtacttgctcttgatcgtcagcttattcaattcccgataatcaatacacattctgaggg

SEQ ID NO: 15159 - DNA, 4979 bp, Cannabis sativa
  modified_base (951)..(956): a, c, t, g, unknown or other
  modified_base (1058)..(1063): a, c, t, g, unknown or other
aactttaaacctaataattaataccaaataatacaaattaaagaaaataatgattttctccatcctcctactcccattacaaataaaatctacttctactttcatatcatatttcacatcattcctaaaccttttatccatcctactcttctccaatccctctaacataactaagaataactaactccaaccaaatattgttgaacatgtatactttttttttattattattatctctcaacatttttcaatttaaaatatatgaaaaataaaataaaaaaaaaagaagaaaagatatattttttgtgtcctcccatgataaacaaaaactaatgtttttttttttttgggtaaaaaataaagatactttgggtaaacttttgtaaagtttaatgttttctatgttgtggtttatatataaagaagaagcatggtcttaattagtgctacctcacgtccactttatcacgtgcttaaactttaagacatgtcagttgtgtataatctgtgtttgactgagccaaagcttagagaatcaaactataattaatatacttaattcaactccatttaaattttcgaagttactagttccaacttcttgttatatgattctaagcaaaaatgacaataataataaaaaaaaaaaaatgcaaagttgatagaaagatatatatttaataaaatgataaacgaatttacactatttatttgaaaattttaaggataatttaatttctttaaaaattgttattaaatttatttttaatatatatttttacattaaaagtttctattgaaactacaaaacactgcacttctagtgacaactttttagtcacaacataaattttttgtgacatttagtcaaaactaaaacatagtatttaattacaaattgtcactaatttagttttagtcacaacaaatattgtgactaaaaacacattnnnnnncaacaaattgtaatttttatgactaatacttataaccacggaccttttagtcataacacaacaataataataatttatatttagtcacaaattttgttgtgnnnnnnagtaagattttttgtagtgttaatgaaatttcttaatttaatagaattttttaaaaatataaaaatattttgttagagttaattttataaatattaatactatttattttaaattaatttaaatatatataaatatcaatatattatttgtaacattatattattattattttttattatttttaatattgagagtatgttcaattttaatattttcaaattttatatttattttcctcaaattttgaagactttaaatattatttttttaaaaaaaaataaaaattaataagtagtttcctttaatttataaaattttaaaaatacatataacaaaaataaaaactaaaaatataactaaacgtatatataatgcatgtaatgataacttagtatatatattggaagaatcattggtccttattttatatatttatttatttattttgaaggggatcatttgatccttattataagtattctattacaaaataaggttaaaatgtattttatttccatcctatgcaaaattttaatggaaacatattattttgagagggagataatattatataagaataggtcaattttgattaaaacgggctaagcctaaacttaggagtccttagccaaagaatctattttttaaaaaatatattttaataaataccaaaaaaaaaaaaaactacaaaattacgattctacgaaattttaaattttttaaccgtttgtaatttttttaccaaaaaatacagactataaatatatttatgttattttcttgttttttttttattgtaattttgttatttgtaagttgttttcatgttaattttatgttttcttaccaccatcaaattgtaattaaggaaataaaaagggtaaaattgttgttttttatttttgtaaaaatacaaaaaaaaaaaatatttgaccataaaatatcaaaattttaccaaatatattttgtatagattttacttttcttaattttttcaataaaaggtctaaagtcgagttaggacccaataaaagtgaaaatcattgattctcatcattttcttttggattacatcttattataagggaaaattatggtatacgttcccaatagtttgtgtttgatgtagataaatcttcaatcttgaaaattggcagttttagtcattaaggttacgttttttgtaagttcgttagtcttttttcaaactgttctgttcgatactaatataatgccacatgtcaattttttgttggtccaaattataattttaattaaaaaattctaaaaaaataactagctttaatagagaaaggtataatcacaaaaacttcaaaaaaattatttagtggagtttgaatatcttagatattcatccataggaaattaggctctacgattaattatgttgtcggatgggtggaatatgcatgttagatgagtttgaatatcttaaattttcatccgtagtgaagtatgttctgcaaatacatgtactgtagccggatgggtggataatgtttgtattattaatgttatttttttttgtattgtattgtattttgtgttttaattcttattttttcatgtttttaaaaattttcggaacgtctgattacagtcgttatgctgttgaaatttaggtagaattatgataaatttcattaaaaatgtataaatattagagaaaaatgttagattagagtaaaaatgtataagtattttttttcatatttaaaatttatatatttgtgaatattttgattttaataaatatatatttgttagtttaattgaatatgctaagtattagattttattttaataaagttaggtattgtttatgtttttgaaatataagctatatatgtataatttgattattatttttttgtgaaaattatttatttttagtgatattacagtgtgcgtagctaaaaaatttcatgaaatgtctttagtatattttgaattgaaattttaattaataaatattcataaatttttatagcattttaaattcaatattaatatgtttaatttgttactaggaaaaatttagtttgagtaaagaattttttttagtgtaagtttaatagtttagaaaaaaaaaattaatatagtttattataatcttagtatagtttaggtaatgtttaatttaaattttaaatttacaatatttatttgatattggaataattaaaaactttgaattttttgtgttgatgtgtttgcaatatggtaggatattatttgcaagtcttacgtgcttattcattaattatattttaaaatgtgacggtatattattaaatatttctttggaacaatactagatgatatttgaagctgagatcttagaatttaaagagtgtatttcattttataaacactttttttatttcatagttaatgatgatagaattagaattgagtataaaattttgtaaacctaaacaagtacactatatatattgtatttatatgtgttgtgaataatttttttttatacattgatgattatgattttgatatgatgttaattatgtgaataaaagataaaattaataaaaccatttctatatagaaactacactagaataaattagtgttatataaaataatatataataaaaatgtaagattattaaaattttaaaataatacaaaaaatgggttattatattataggatagaatttaaaattgttgataaacgacggttttaaactatgccctatagtataggcgacaattttaaattgtatcctatatattgctcgttaattttacgacggtcgaataggtaataattataaaaatcaatgaaaaactatttttttagtaatgaagaatatatatatatataaatatatatagttaataatagtaatccagatgtgttaacaacttgaattaaatttgattactttagttaaaacaaaaagaaattcctaagacaaccaaaaagtggaatttgataagtttgaggtttagaagcttaatgaagacttaaagcactaatcaatttcaattacacgttgtggaccttaattgagtggaatcaaaggcaataaaagttgaaagtgattctatatgttataaaaaggatctatctgctttacaatatttgctttttattatttttattttctcttaaaaaattacttggtattgtatagaaacaagggttgtctttttcatgatccattttttttagtaatagacacatttttaatgtatatatatatttagctatacaataatgaataatgtataacttatcctaattatataattaggatgatatcacttatacttgaaaatattaatgacaggaaattcctacccttgcccaaagttaagaagaaaaaattactgtttgttctaaataaaaaagacttggtgcagcaccatatacacaaaacctatcactaataattaataaaggcgtgtaaatgataaaaacgaacactaataatgtgtaattcgtgtggtcatagatttgaattaagcttccccgttaaaaattggtgtcttatgttaaaccaattaaagtttgacacatcaactaatctaatttatgttaaatatattaattacttttgttaactcaataataaatttaatttttttataaataaaaaattaactgacgtgtcaaattttaattagtttaacacaatataagacattttttttaaaccaaagatcttgattcataaacatagtaagtgattttacacataaaaaaaaagttccaaattagaatcccctctcccggagtagtggaaagaaaataatgtctaatccatgtcatatacttacagggcccgtttgttacgcatgactggattggattagacaggttaatttgtccaatctagtatttgggcatgttagaagtctggat

SEQ ID NO: 15160 - DNA, 8592 bp, Cannabis sativa
ttttaaccgaaggcaccgaaggcggttttttcggtggttttttcggtttcggttttttcggtgtcggttttttcggtgttcagatggtcggtttattcggtttggtcgatttcttagattttttgctcacccctaccaagagcatcaaagatcgattgaactttgttcacatatgaattccttttttgaatgtaagcaaattgacccttcaattgtagtagaagaactttggtttgagacgtgaacttttgcttaagagcacaccatatgttgaaaaaggtggtgaagttggcgactgaagcaagaaaacttttagacattggcgattgcaaccatgaaagtaagagctaatctttgcgacgccattgttgatactcgggaacaggtgcaccaataaaaaagttttgaggtggggagatacctataaacgaaatctcgttaaggtcacgacgaatgactgcaggaaccacctgcaatttcaaagcaagaaaatttagagaaatctggcttgattgtgagtgaggaaatgagtgaatgagagaagggattccattgagaagaagtaggagcagtgacaagatcagatgttgaagacgacatggacgtgggtcgacgtaagtcaagatagaagttcctcacgagacattctctcctccttcctttctagggttttgtctagttttcttcaccctctcggccagggaggccaccgggcttttccttagttaagggacattttttctcgcatgggtgcactttgtaagtatagatatggaggattggtggttgtttgttccgtgggtgctggcgtcggtgggaggtggttcggttgtatgggtgtgctctgaggccttaggtgccatgattgggatctcgtaccaagttactttgatcctttgattctcgttgtggttgcttaaggtctcaataagggttatgttggaaaaaggaggaggtcgttggcgtgtgggaccttggtccaattgggtttgtggtgttggttttagccattcctaccctcttttggtggtctagtggtggaactttgattttggcctgtgacagtcagtagtcccgtgatctgtaaggggaaataccgggtaagctgtgcagttccacattgcctggggaaggtcaagtgggatgattatgagactgtgtaggcatgggactacaaaattgaagagggcttaaatggattggttggtactacctatatcaacaaggtgcatcttatttttcggtagcccatcacgaaagaactccacaattaagcgtgcttgacctgtgataatgttaggatgggtgacctcttgggaagttttctcaagaagcgtgtgagtgaggacaaagcacgctggaaaacactcgtgttggtatgtagggtcagtcgtcaatcaatgaagcagccagagtgacgtactcgtgtataaagagccattattccgtgggtgtaagggccaaatgaattcttgaataaataaaaaaaaaaaaaagatggaaaatgataattaggtggagagagagaaaaaactgcctagagaaataattggaaaatttctatctcaatggcaagaaatttctcaatttaaagaattcaatttactttcaaacctatgtccaaaaaaaaaaaaaaaaaagaaattacactcaaaccaatgggaacacaaataataaaaaataaagttaatgattggtttaatttggtacaagtattataaaataaataaattagtaaaagaaaataaacaaataaaactcaaaaaatggttgaatattttgattcagtgtgtgtggccactgacttgactgacacttccatttttatttaatattcaaatttaaatgaattaattatgtgcacttgttctgcaagatatttcccagttggatcttttgtttttttgtttttgattttcgatacctggtttaatataccgttgttttttctcaaaaaatttgttctgcaataataaccagaataatatggacccttcaaatcacattaatttgcattaataaacgtataaaaccatttatttaatataaataaaataaacctctcaaaaaataaatatatatttaatactgcttttcaataatatttatttagcaataaaaaattatattatttttttttgtaagggaaaaaaaattatattattggtttgtgttggataaatttttagttagtgaaaaatatatatttatttggcatcaaatattttgaaatctaactattttatattaattaaatttgcattaaaattttaaaatataaagtacattaatattattattttattttttcttagcaaagtacataaaagattatttacgagatagatatattcccatatatattcccaaaaaaaatctcacttggtctttgctgacttgttacagaggaggagtccaacgtgaataactcttcttttccatactgtttcacaaaaagtttaatttttttttaacaaaataaataaattattttgtttggtataattatggtaatatttatatgtacaaaaggagggtcctattatggtaataatattatatgtacaccctttatatatgacagaaagcattagaacattagataatatttgtattaagaagaaagagtttacttggattgttgttatcaacctcaaatttgactcggctgccaaagacttcaactttttgattgagtgagttcccactttgggttcaaattcaggtgaattcaaaccccctccactaattcattttctttcctctcttttctcagtagattctattattataaagaatagtagaccaaaggggaaccctttatagtgctatgtccctattataattaagtgagacccaattctttttttttttttttggatactttatataaagggtctgattctattgagttattttcacaccacagcaatggggagcaatgggaagagagttttggtcacttgtagcgaggacgagatttcaattagcatagccttcaatttggcaagaacaggctgcaggtttcattcttctttctaaatttgctgtctaatttatattggttttttttaatgggtattaatatatttgtttaaatgagaggtttgtattgatatatatagaaatggggttgtttgattttatgtatttaggctggttttgatgggaaatgagaggtttcttgagagtattgcccagaagatagtttgtgtgaaaggggcttggccagtggaggtggttgggttggatatggaagaagagaaggaggctttgtttgttgaagctgtggacaaggcttgtaaaactttgggccatttggatgcttttgtgcattccttttcttatgaaggtatgaaaatcttatgtaatttttgtaaaaaatatttaggtggggagcatgatgtgggcactagtggtatgtgtcatatcatgaaattctcatatcataccattaatgttattgctacaatttaatattggaattcatatattttaattgtgcaaaatttctaatcacccataagagtttgagcaatgctattaggaactagtaagttacatcttacaattggttaacgatattttctaaaagttattttcttaagttatatgagacaagtgatgccttttagcatttctcaaagggttttaggatttagggctaattactcgtattgggacacttcttagtggtggtggtggttgttgatggctaacactaatgctttttttttacactttgattggttgaatggggagggtgtatggagttagaatggactatgaggcaggttagtacttgttttaatgctatttattttacttttcaatacattgcggaggtcttttcttcttttcatttgaagaaattattatttcgtatggaacatgagaacagaaaaacttttaataaagaagagaatgtaaaggaaaacaaatcatttaatgatgcaggtgggagttgttacaataaaatgcccctacaagtgagcaaaaatagtactgtcaccttataaataccctatatatcatagtatagagcaacaatcttttaagcaagaatagcagccacactgcctctattttagtcctcttttgcaggttgtcgaccaattaacaagtgccacatcaactccctttaagggggttgtctagcattaatcattattgatgtcttaatgagttgtttttctattaaacactgaaagctaggagagcctctgctctgtcctgtgttatgtgcaaatctacaaatctaattataaaatgagtccatataagtgatttgattagttagtgagcttgatattgttgacttttaaagctcatttgaagagaatataataagatgcagaagttggtcccttaaaaccttgagtaatattgtttaattagtggtggtttaacacaattacaaagtggttcacagtcattgggtttctaagttttgaggaaatttaaataagaaaaaaaaaagtcatggggcttctgtcatttgactcattttcaatatcctactttgttccattcattgggttttttctaaagattaaagaattagacatatattagtctagaaactagccatatcatagggatggctatttaaaaacatgcataaaaaacattgagatttgtagttcacttccaagatgaaaatttgtattcatatttggtgaaaaaaaatatgtatagtaatgaaaagagaaacatggaaccataaaactatttaaaaagtctctctaaacagaattttcccactgtcttctgtctgattatttgaaacaggaaaagcacagaaccatttagaattacccgaaagcgagttccaaaagatagtgaagataaacttcatggctccatggcatctgttaaatgcagttggaagaaaaatgagggataacaagttaggaggttccatagtgttattgacctcactagctggtggcgaaagaggcatttatccaggagctgcagcctatgcttcatgtgctgctggacttcagcaattagccagggtaagtaacacttacactcctttgaatccaaacacataacagttatttattacttcattgcaatgaaattgagtttaaataggcgtcaattcatcgctcttttatggtggttactttagtagttagctagagtgagtaaccacttacactcctttgaatccaaacacatgacagacagtgttacttcttgtaaataactctgagacgctttaccaaaatcgagtttaaatgggcttcaattcttcagtctttgaactgccatcttttacatttaaggtagttacttcaacagttggtcagggtaactattccttaatactcttttgaatccaaacacatgacagacacattgctactcctttaatccaataactttaccacagaatcagatgactttttctttatattagtaacgaatatctgttttacacgatccatcgctacaatgttcggtgtttatttttcaggcatcagctatggagattgggagatataaaatcagggtgaatgcaatagccagaggtttacacattgaagatgaatacttaaaatcagtagggaaagaaagagcagagaagcttgtgaaagagggtgcaccactagagagatggctagacccgaaaactgatgtggtttcaaccattatttatttgatcagtgatggatcaaggtacatgacaggcactaccatttttgttgatggagcacaatctttaacaaggcctaggatgcgttcctatatgtgatttttttttatttcttctaattttattttctctgctgtattcttttttgttcttacagctatattatattttccttcaacaaaacaaataaaaaaaagtgaaaattaatataagctgctattcattgacatgaatttgatacagcaattttagcttattagaaggttttgtgattttgtaggtggtaataaaattttcataaatatttattttttactttggctttttgattattgtggtgggctttttctaataatcatttctgttttgaaattcttattattaacagtcaaataatattgagaattaatgtgcatatttgtcaaagatatatacccatgttttcaaagtttatgatgattctcacagaatattttctgtaaccatctgtttaattttcaaactatctttttggtaagaaagaaaggaaaaaagttgtcaatctaaatgagattataaaaatactaaatacaatttgtcttgaaagttagggcattttcaggtgttatgaacaatcaatgacattaaaaaaagaaaagaaaaggaaaaaaacttgtcaacaaaaatgataagcaattacaaagggtgagagtaacccaagtacaataaagatgagtactaatccttaattaatgtttatttatacacacaaaatcatgtgatatataacaattggtcttggattttattcatttgaggagaaatttgttcgtataatttagtttatgactttgaattatatttaaattctctttcaacaaaaaaatatatataaatatacatttaatatatataaatacaatacccttaatcgtaattacaatagatagtattaagaaaatttaagtttttacgataataatgcctcactatagccgacaatttagaaccgacgataaaggaattaccgactgttctaaattgtcggctataatgctagttattactgatagttttaaacagtcaggaaataggcataccaactattgtccaccgacgcttattccacccagttttgtgtcagtcgaataggcgccaatcatagagaccgacgacaatacaattatttgactgtttaaaaagttgagaaattccctttttttagtagtgcatgttgattaaagatattaattcatattgatctagtcatgtttaatcaaattatatacaatatttttactaaatttttatctacatatgtgatccgaataaaaatcacatgtcactaatataatgcttagtaaatcatatttgctaattctgcattaaagattctatacttcaatacactactcacatattttattcatatagtatgatcttaatttttttgtacttcattctaatatcatactctccatataactataaaattttctaatatttattaattatatttttataattaatatttttatttataatatattcgtatttcatatattctttaatatattatccataaatatttatttttagagcatcaacccttaacacactaactatatatattggagccaaaaaacaaaggaatacacaacacaaacagagaaaacaaatggaactgatcgagaccccaaaatatcctctccatctccccttggtactaacaattgacaaccatcctagccgagagaaaaggatgagaaaaagaaaggagaagctctaaatattttaggagggagacagtgaattagagagaaaaattgtgtataataattaatttaacttttaaaaagataattttagaccaattttattattggtttcttatgagataaaattaaatgatatttgagctagtaacatttggtgttgatttattcataagataacatctctattagctaaattgattactgttccacttccaggtataaatttacttgtgttataatagattgaatatataattagttaggtaggaaattttatcaacctaggctaacttaaatttatggttaacttcaataattctgattttaggtacgtttttgtacacacaaggctaaatcgtttggataattaatcatctagaacagaaaaattactattatttggttgaaacttgaaataaattcctgatgacatctataacatatattaataattattatatgcaaactatatattttaataaaataaagaaatattcgtggcaagagtacggaatgatgaaacttgtaaacctcttaaaaattcaattatttttttgtaattatttcacaaatacataaaaacaataaaaaaactacaaaaatacagttatacggaattttaaatatttttacaattttttttattttatttataaaaaatacagtccttttatattgtattcttgttaatttgttgttgatcttttgttatctgcatgctattttattgttgtatgaatgtaattttcctgttactttaatttatatagtttaagaaatcgtaaaaatataaaaaaaaaaaaatttaaaacgttaaaatgtaattttttttttataaaaaattatattttatgtaattatctcttattttttcagtagaaaatgttagaaaaattatattttccgtcaatacggctctaatattgtcttaaatttgtaactagacttagtttttaagtttgctgaaaagaaaatttagaaataagttgatactacacattcctatctagactcgaccaataattaagaatctgcgtgttgcacataaagcactaacagaatctataatgatgaaatattatatagttttactaatattaaatactttattatatcactaattaaaaaaatttgttaaatttataccgattacaatctcaaaatttt

SEQ ID NO: 15161 - DNA, 9350 bp, Cannabis sativa
  modified_base (4957)..(4957): a, c, t, g, unknown or other
tgtcatatttttgttagtttaaaatgtattagtttaagaataaaatattttagttttttaagtatagaaaattaaatttcccttttaaaatgatacaaaataattttctaaattgatttttttgtcaaaataaaaatttactccatctatagttattatgacaaaactagatacatctgcatatgtctgagttaaacattgtcttcaagttagttatgttaaaaaaaatattaaaaattgagcttatgatactattttgttctattttaaaaaaatacagtctaatttgtctttttacaaaatagagagttcaattggtaacttttacaaaatataaagttcaaaatgatattaactaggagtgtttgcggtgtgggtggtacgagttgtaatccttttttcaaaccaaaccgcatatgcgatttttgtaagttctcaaacagcaaccgcattgcgagatcttaaaactgtaaaaatcacaccgcaaaaatgcagtgtggtgcagtgcggtttgagcagtttacactatcatcattatcgaacattataataaaaatttaaatttaatctataaagtcttaacaatacaaaaaaaattattaaagttttaatatcataacatatatattaatcatcaagtcattatattaaattatttctaaaaaaaatataatatatacatatgttatattttattttttcatgaaaaaagaataaaaattatattatatacatattggtaaatttgttatatatagtacgatgcagtttaaattgcaattattaaattcaaaaccgtaaactgcactgcaccattatgaaggatttcaaactctatttttttatatggagtgagatagtttgataaacacccttagcgttagccctttatttattattattattattattaggaaaacatacattaatacaacaaagttcattatatagctttaaaaaaaaaatcaacaaaaatagggttacgttatgttacaataaaatggaaaaaaaaaaacttaataactaaggatgaagtaaaatttgacaaaatttactaaacttaactacatgcatgatgaccctttacgtggcaagatctaataatttgttgtttttttttatttatttaaaaaaaaaaatcacttaataatttctcataaaccaaaaattttgttatagacacactttatataaaatagatatatttgtcacatgcaatataattcattaacaatcatagttacgtatacaattattttaggctatatttaaaaattttactattatgtccctaaatttttttattccgttcaaaataatccatgaactatacctaatattataaaatagttatcaaattttatcacattaattaacaaagtgatgatgtgattatttaaataatttccatatcattgcagcatgtataatttaaaatttgtattttaaaaaaatatcatactaaaaacgattaaaaaatgatcatactaaaatcagttcaagattaaaaaaagttaagtaaaactaaattaaaaatatttttttttttcaaattaattacaaacacagcgcttatgtgacaattatctaaacagtcacgttatcattctgtttaccacatataacaaaacttaataaaataaccacttcacaatattgtgaatagttcatagactatttttaactagcaacaaaattcaagaagcacgataatgtataggtcattagagcgtcacatttacactcgaaaattcacccacccgacaaactcacccgacccaaaaacccaaaacccgtcaacacccaccctatgcgcacccctattctcgaactaagggaagcaaaaatactaaataaccattattttattataatatagcatttccttaataagaatcaagctaaaggaggttgtgcttcactttttggtgtgagatacaaacgaattctcctaaatgctctatcataaacaatatttcacttgtttttgtcaaatgatctgcaaaccgctaccaattatttggctcgtgctgcttatgtattccaagattgtaattatagtatgagttttgtctctctctctactgatttgcaataataaaagtttctaaactttattcaaaaaaaaaaatcaagctattttaatatctattactgtttttatagttttctgtagttaagaaaaagaggtgggagtcaagaaaattgatatggggtcaacactacaggccattaaaaccagattcaaatgaaaaaaacacaagtagataatacaacatgccaccctaaagagagtttcatttttttaatccgaaaaaaaaagactgtcggctcgatcaactgcatctaatttataaagggtatgagatataaacctcttactgatccttgtatcgcttctcgacttcctccaaggcttgaatatctttgtggtacttgcaaatgcggtgaaggcacctgcaaccgaaacccggaaacagaacttagtaaagcattggatttcaaaggaagagttttctcaagatgatggcagtagaatgaatgcatttttaacattaccaataaagaatgacagcagcagcgcagagaattacattcctttgagctttgtaggtctgaaaatcataaagaccgcgttaagagtaatcgaaattaaataaacttttgaggattgaagtagtaaggtttaaactaagttattgattgattcaccaaataagaaacataagtttctgaggataaagagaagagcaacacactaagaaaggccaaaacaaacaagcaaactatacatatatcataaacgaatataaaaattaacttaagtgagctaaataacatatccgtaaaacaaaaactgataaagactaccaactcttaaggtaaagataaatctagattttccgcctaaccgaacaatatttggagaccaaaaaactatatcaattgctaggtaggtacctaggagactcgacctgaatcttgttggagcaaactaaatgtctgaccatttgagcaacccttgttgggtgattctcacaaaatagatgtgaagaattgtattcaatctcttaagagagaggagaaacaaaaaaggggcttaaagaaagtgaggatgccaactggcagttgttatatttagttatttctctctttgctacttttataatgaacacacattaacaaaaataaaggcacaaaacatcagaaacacagtgataggaacacttacagagcagaataataggaaaaataaaaagaagctaaccaaaaaatcgcagtttttttaaaaagaaaatagttccaatacaagaaactctccgagaaccgtgaacaaaatattaactctacaggtttcaagagcctggtctctcctcaactcacttccgaaatcccaatactcctccccaacatgtgtccttcctatttatactcatcaaccaccaaaactacaactaaagtacataactttctcctctaaacaaccaagggccgactttccatgagaaaacgtatacaagattagtcctcacaatcctaagagttttgtcagtaaggaaggattgtaatttattggtattatggaagaaagaggaagttatggaatgtctctgttttgggtgtcttagctgtttattaatttggataattaaaacaaaagattttattttcaaatcagtgtattttgaagtaattgatatgacagtgatctcctttaatcaataatggagtgcatttttaatacccaaataaaaggtcaaccaaaataatcttattgtaattacaatacatttctaccaaaccaaataggtagttctacacaaaactaagataagttcaaatcataaatttgttatcgcatcaaatcaaaccttttatatttattttcccttattaaacacttctccacaatctcaaagagtccctttttgagttctctggcaaaataaccttcacgaaaacttttatagtaaaatgactattcaaatatttttattagcaaaatgatcttgtagggtcgcagaaacgaccatgaattacactttgtgaccattatggtcgcaaaacaatcatagatttactctgaacggttattttacaaattttagtatttcagttttggcaaatttcactccctgttctaccaaatcaactattaattccttctaaaaccttaatttttccattaaaaaattaggcaaaaacattctctatttctccctaagcaaacaacaacattcttaaggcatagtagttcagttcaagatttacaaaaccaaaaattcaaacttcaattcaattcaatcaaacaaaaattaagtaaactcacagttttctcaaatcgatctctctcagtagccgtacaaatgtcagatgtacacgtcaagcgatgctcgttcttccagtagatatctacactcaatacaaagaaagtaaaaaaccaaacagatctatctatcaataaattttaaaattttcttggatgccaaacagaacagaataaaaccaaaaattacataccgaggagctgaaaaccggcgaagggaacgatgaagaggcaaggttggagtatgagagagatcaaagagacgaagcgattcttgagaagcttaggtgaaggaagagttaagagaatagctaagagtgcttcggctgccactacgtaggtgagtatcatccattgaagcgccattggttccgatcgtcggagtcggagctggaattccgattcgaaatcttcttcttcgattggatttggatttgggatttttggatttgatctgagttttgagagtgaatattcttgacttaatatgcaagaaaagttctaaacggacccatttttgcaaatattgaatttttcaaccacatattacacgtgtcatataccattttatttaagagaagagaaatgttcaaggtgaattacttcatatataattttttaatttttttnttttaaatttacagtttgagttgctttggtggtttttatgtgaattgctatgtgaaatttagttgcaatttaagttactctattagttgctatgtgagtttcaatgtccgtaaaaatgcaaaaaaagaaattactttaaaatgtaaaaatgaaaaaaaaaaattaaggcactagtggtgcttagtaccttcctcggtgttatatcgctattggtgcaattaagtatcaaatttcatataatttagagtatctccaatgattaaatgttggagggtgctttcttatgtgaattgcttatttggcaaaacacaagaatgttgtatcgtttgaagtaaatatgtgatatcataaaaaaattggttgatgtcactacatcgcattgatgttatctctttttaaaaaaaaaataaaaaattaaaggtaaataaatagtgtgccaatatctataattaaaacaaataatatattaaataataatgtgtgggatcaaaattatagtatttttgaacggtaaaaaatatataatgtttttataagtaagagtgtaaaaaataatgtggaagaaagataaaataaaatattatatttttggataatatggagatttttagcacttttttttaaaaaaaaaaaaacattgttattgggcaccagtggtgcctagtacctctagatatgtggtcttacggttagctagggatactcctgaaaagttattatattaaaatatatgatacctaatacttaattggaccaatagcgatattgacacatatgagtgtgctaaacattattggcgccttttagcacttctctttaaaaaatggtaccattggagatgctcttagtaatacctttttaggatataataataaccaatcgtagggtgtcacctctagatgatgctaggcactactggtacccaatagcaatactcttatgagaatatatcatatataaaataagaaatgttgaaggacactttaatgtgtcaagcaccacaagagatgacatatcattattggtgcaatttaatatcgttattaccatatgagttaggtgttggacaccttaagatgtctagtgttgttactatgcaccatgatacctaccacaagagtttaaatagtttgttgcatgagagatttttttattttatacgtgtgtgaaataaattgcttgaatctttttttttttgtcgtgttaagtttttgtgactttttcaaaattgtccaaaaatgtcctaaataactacaatatagacgattttgaaaaaaattagactataaatttttttcaaatgtcgaaacagatagaaagtgcatcgatggaccattttagagggtgcattgtaaaatttttctatactatttataaatgagaattgttgagaaacactttaatgtgtcaagtgtcagtaaaataagtaatactcgatattgaattgcacttagaattttaacaccttattaacatattaggtacatggatgtcttttaccatttaaataaaatacttttcttttattatcatgattggattggtctaactagtatattatatgagacttacagtataccaaaatgcactccaattttttttataaaaaaggacaaaatttattgtagtagtatttataaaatagtccattcaatctaacttaattagcagtgtagatatacgtacttgtacggatttgatgttaattgatatgtaaaaggaattaatctaattcaaattcacacataacattttaatataaaaaaatagtaatttaaaaatttaatacatataatacaaatatatttcaaaatttaataaatcaaccatatatttcattcttatatataatttattttcttttttacatacaatataaaataaaattaaacatttatttttacatgcactttttaaaattggattagattcaaaatataaaatctgcacttagtgcatatcaaatgcactatgagtaaaatagtgctgatcaaatgttatgttgtgggtatgccaacgacaactctacgagatgcctttcagaataatggttgctctagcaacgttcccacattctcccttatagatctcatagaagactttttgtgcctttttcttgttcattcacctaagaatccctatagatttttagatagttcacttgcaagttgcaattctacaagtaaagtttcattaacttgaacctagagcctagtaagtaaaccaaatgctcaaaacaagatactaactataatatggtaaaataaagaatagagaattgtagtaataataacaataataatttaaacatagagcaaatttatttggaatgcatctttagagtggaccttaaagaatcctaatacattcattaagtatagtacaaccattttgcagtatttgttttacttttttttagaacattttttcagtaccatccttgttcggaatagactaaggaaggtccattcgacgccaatttcccaccaatggacccatctgctcgatctttccataccacccgagcaacccaccagtgtgtacaaagaggatctttctcccttcccacttctttggattctcactcatgtctttcaaaagcccataagcagcttttccactaaaaagtaaaaaagaaaatattgtttcattttatcttctcactgccaaaatagaaaatgtcaaaaaagaaggatttatacaaacctataaacgggatcaagtacaacgccagtcgcttcagcaatgtccttgactaatttaagctcttctgaagtactaattgcatatcccaaacctttggcctgaccgaaaataagattgaaacgagtcagtcactgaatgaatgaatgtgcaataattgataaacataatcaaacaacaacaaattggagaagacacattgttagaattgtatgatgtatgaattgactttgagataaatcttacaattctaacatggtatcagttgccaaaacaaaatcctaacaagtatccgatccaaatccaataaccggtctaaaaagacgacctaaacgagccgcttgtaattcagggatagtgagccaaaaaatatcactgatgcaaaaagtcaagccaaaagagtcgtttgtgattcggtgagccaaaaagtgtcgcttgtaatcgagctgtccaaaattggtgagcaaaaaataactaccatcttgagagagatgttagagaatcccacattcataatgtgtggaaagataacactatatataagatgcatgggctacttcttccattgtcaattaattttaagatggaacctcatgcatcttataattctaacaacagaaagcaatactcgaaacaaatatcaatatacagagagactcacatcttgtatgttgacaatatcacgtgaggcaacatcagcttcaaggctatcgattaggccttgcacaatttcatacaagtaatcgggttcgtagtagatagagaaagcatgaacctgaagcacatattggattttagttagattagagtagaatatggtcactacatcaagaaagtaaatcaacaaaaaagaggcatacttttgcattgagtgagctcatccacgatcccaatgagagaccagcaactgtaccaccactgatagaaataaaatgcgattagaattcaatcctcattttagagaatctcacattgttaatgtgtggaaagatattagagcatatacaagatttatgagctacacctctcaatgccaattgattttaagatgaaaccccacccatgcgccttatcttaaattctaaaatggaatctatacaaaaataaaaaacctctaacgactatcctattcccaaaaaaaagaccatcgaaaaaaatagctctaaaaaaagagcctatcttgaggggcatatataagattcattggttactgctctcatgagatggaaaccatacactttatcttaaattctaacactttatactcagataactaaaaaaaaagcctatcttgaggggtatatataagattcattggctactgctctcatgagatggaagtcatacaccttatcctaaattttaacacctcatactctgataacaaagaatatctaggactaagtctttattaacagatttgatccaagtaagagaagtccaattgtagatcatgtcactgctcattcatgtaacataggagttaatatgcttgaacttctcaaataatttgggttcaggttgtgcaaattataagtttatacctgccacaagctacaacaatgtcgtcaaattttacatcagcattctcaattaggagttgctgctcaatctctcgaatcgcttcaatatagcccctaaaatagagtacagacaaattattggaattgttggaaatttttacaaagtt

SEQ ID NO: 15162 - DNA, 6969 bp, Cannabis sativa
tgtggactcctcatcaactgagcctacctgaaaaatagttaaaagaaaaaaaaaaaaagagagaagaataaagggactgaatattcggcaatgaaaagggtaataactatgaagttcttagttacaccagagattcatccaggtctcccacttcttgatgtagtctatttcaagctagtagtttgaacaaaaacaccaatcaaatatcttttacctcctcatcaacaagtttgtcaccatcatcactgaaatcgtcatcgctgccagcctcaggttggtcatcaacctcttcatcactgccatcactgccataaactgaattctcctccttgagctgaatatcaaaataacaatcaatatccagaatgggataaattacccttctaccactaatacaacttaaatttacaaaaatgaacattttccccaacactagttctttcaatcagatcagtacacaaaatcatcagagtgtataaactacggaattaaactctagggttctagtatacctccttggaaggtccatcagacatccttggtgagctgcagcaagaagaataatacctactaccagtttcagttccatcaacccttgactcgtcaatgcttccagcatgactggtgccaccatcactgggccaagcagtaatcccgtatagcccaaactgaagattaactggttctcccttgccagtctgatctacattgcccaacaaaggtttcccattaccatcaactgcttcaataggccaagtcctagccactgtaccatcaatattaacaagagtcataagatgcctcgatgaaccttgcctttgaatcagttgaaacattcctttagaactcaaggagtttgctgcacattggtttctatattcctcatctaccatagaaactgtatttgtcatggggtcatagagttgttcaccagcttcacgccttcgaagacaactaaatactgttgcatggatagctgctacgctcttatcaacattggtattgtttattttgggtacaagatgcttgtcagcccgcttgcacaggtattcctgaattgttctaatgttacgtatgtactttacatatttgtttttggctgggtccaaagtcatatacttagcacgaactgcaaaccgttccaagtgcttatcttcatttgtgatgtaaatcatgaatggaacgattgagggatgtttcttcatcagtcccatctggggatcaagaaaaattcatttaatatgaaaaaaaaaaaaaaaaaaccggcatcctttcaaaaagagaaaaagtggaaatgtttgataatgtgtaacttaggtatttatttaccacaaaattaaggctcaagtggacaccctcaacaaccacagattctttcctctcttcccaagctgtaatcaagcgatcaagactgtcaattaccatctcactttgagctttgaagccttcaacagccatctgctttggactgagcaaatcagtagtaccagagccaacctccaatttatgagcctcagacatcccagcagtagagccattagctgcttcgtctttagaaagtgaatgtgtcgtaccagctaactttttggctttcctcttagcctttgcttctgcaacagccacaggatccaagaactcccctgcatgataggttgaagaccatagtagaggattttgcttctcatctacaaagcttctcatcatatgccgaatggagtcggtagatatcactgttgtaattcctaacctgctaccctgcaagacaagaaaagtgttgacaatgtaattaatggagtgcatagtaaaatagcaaggaactaggaaattcaaacttccgaactttcaccaattaaaaaacatataatgccccactagttaatgcaagcatcataactaacaactagggtctacgaaaaccgataacactgtaaaaaaggtaagtaaaagtgaaataccagcaaggcagataaagtagatttgccgcagccactagtgccacataacaagacagttatagattccttcctttctcgaattctgcaggagaaaaatatcacaaaggactgtaaatactgcaaagcagagtatagcagggaaagggggaatacaaattgtagaactgctttcaaagttaacaatgacaattatttttaaataaataaaaacacaatctaaaaagaagcaaactaacgactcccataaatattaacagatagtctgatttccaaaaacatattctaatcaagagtaataagggtggacatgctaatcataaaagtaggaagaagctctcatagttcacgaagcataatctacaaaaataaaaattactattgttttgtaaaacaattggccctgaaaatctaaccacctgagaacataaatgtcaaaacatagttattcaatatatggccatttcttgagattaaaaaagtccctaaacaaaatccaactcaactatgtgacaaaagacttaggcatatactataagtacatagtactgctaaggtttagaaacccattctataactgattttctcttgctttgaaacagacattgtgtttcatctcaaaaacaccttacatgtgaagaaacttttaactgttcaagggagtaagcaacagaacctcggaaaattaatcacagcagcttaactattatctggaagcatgagacacccaaaatactgggaatccttctaaaataattgcttatagtgaaatctgcttttaaaggtctaagcatagaagttataaattaagggactttttaagaaatcattgataataataataataggtgaaaggatatggggccttctgacctgcatgccaatactaggtctgccctctggttaggaccaacatacttatactcagccaaggcattgcaaacaacatttagaaaggtttctctcataacaacaatagttgtgcgtcttttgtacaattcgaatggtacactcctacttttatcatctttcccagaaactaattgcttgacaacctctgttttctccaagaaactgtctctatgaaaagcatttcccttctcgtcctggtcaattgaagcattggaacctgccttatcttgcccttctagaagtcttaacaactcaaaaactctttggctaatctgccagggaaaccatctcaagtgtaagtaaatactctttacggattttcagaaaaataaatgaaccagctacgctgaggaagcatgagaagtcaccaaccaccagaagataataacaataacaagagaaaaatatctaaaatatttgaatgtgttcatcagtcaaaaatttgaagtttcaaagttaaaaagatttgaaatataaaatcaataagacaaacaaaataggtacacaaagttgcgagggagagagccaattaaaaacgtttgttcatgcaaagtgaatgaaatctatggatccaagttgcaatcacatggggaaccctgctctcaaggtggtaatgtaaaggaccgtaccccacctcaataacaggtagggtcggtccagattaagagcttacattgtaacagtatcagaatcaagaatattgtaaactaaatgatataaaaaaggtgaggaattgagagttgaaatggtccgaatgaagaaaatagatgtaggaaaaggactgttgaagacaagaaagacggaaggtaagtggttcgtgtacaacaaaattcaaaaatttccccaataaaacgaagtttaacaggtcaagtttgaaggtgacaggaaaacgcaccgtgtgtaaacatatatatatatatatatacatatatgtgtgtaagactacttccgtgccgtgagaaggacattttactctgtgattagagaataaaacattggatagcaaaacaaacgcaccgaccgcaaagtaaataggataaacctatgttgactctgaaaaagaattacttagcaacataatcattaagactttgaatagtgaaattcagaacattcccagaaaacgatccatgcaaatccagatctgaaaaccacaaaagccttgaaaagcaaaaacaaaacaaacaaatcaagaaacgcagaatttggtagcaaacttatgccgtataaaacctagtttttcaatccaaaacaacaaaaacacacaaggtcagatgatcattacttgaaaaccgaaaagaaataggcgatcaaggaatttaccttaaatgcatgccgagctttgcaacccatgagttgaagagtactttgcagaacgggacgcgtataacgaaacgactctttccctttctccctcttttcttcttcgtccaccacaactatgtacagtactttcgtcacctccgccatctctacacacctaaaaacaaaaacaaaatcccatgaatattcaaacagaacaagaatggcaaaattatgagcaatttctcggaaaggtcaaaatttccgagaaaggtaaggaaaagcaagagggaatttcaaaacaaaatgataaattggagaaataaagtagttaagaacaatgtgggttagaaacacaaaagcttgaactccattaaaggtttagcaaatcgaacctttgaaaaaaaaaacaacaacagcgggttgcagagggagagagagcaacctggaagaagaggaggtggtttaagtttcagattgagatggagcaggctagggttggggaggcgttatgattgttggtcgccatgcttgaagaaggaaacgatgtcaggtacagccattctttctctctgtcacctgggttccacgcatcgcacagggcgaccctccacgagtccttttcatacacaatgtgtctctctctaaatcaaataactaaaacaaaaaactctctctctctctctctatctatcttattctttattatgtatgtttctctctctagatcggacgtaagattacgaatttcgccttggcttgtcgtgagaatatcaactcttgtgtacaagtgttttagacggggtcaatttatagcggggggacttggtagtagaaacgtggggcctttcgcaattgaaattaagaaacggaccctattgacataaagttgattcaaacttcttttctttaatggtaagttggttttcttttgagagagaaagagtattatattaatttagatcaaattagacaacagttggagataaaaaaacaaaatgtctgccaaagaacattcactatctactgtaagagcaaacttaaccaaaatataaacatgagtattaacatatttgaaaacatgagtaatatgtactcgtggaaaatcagacactagaaagttaacatcattcaaaataacattaaaagttgaagaaaataaatgagaagattgcaatctttgaaccaccatgagtgaatcagtttaaatgtaatttgctgaggaattgagagataggagtcaaaacttaaagctaagctaatgcttccatttcttcaaattaaaaaaagccctaaagtggcttagataaagctgcaacaataacactagaagagtctcttaagagtgcaccgacaccaataacacctttagactcgttactagcagcatctgtgttaagtttgagtctttccgaaagtggagctaaccatttgggctttgaagtaagacgagaaggagcacttgaagccatggttgctgctgatggatgtgtctcaagcctttgagtagtagtacgagcagcttgatatttatgcagatgtgatgtcgcaaacaataaaattgcatcagcttttgttgtaattttttccatggtattcaacatttcttttaaaccagatgcaccaacagatgacaataaactgctcaaaatgtgttgttggaaggcttgctaaaagtaagggtaaaaatcatttggttatggtcagtttttacaattttataaccgaatagttggttacggattttattttacgaatatcataaccgaccgtttagaaatcataacggtataaaactgatcatacagtttttggcagtttttagcgattttttagtttgacgattttggactgtttttggcaatttttttgtttaaccatttttttgtttcaaaaaccaaaatcgattgccatgttaaaaaaactgtaaccaaaaccgaccgccaaattcggtgatgacgtggaaccaaaaattcggttacggtctggtcagttcgatggccgattttaatttttcagtttttataaatacccatagctgagagatgtagaaggaaatcttcacaagtggtaaaacaagcaagtttaaatcaatttgtaagttcaagagacgccacacttcttttgctcttttgtgaaaaaataaggcatgatttgttgtttcagtatgagatctgcagagaggacataaagaatcagcagcaatgtgtcttcgatgtagctctacggcaacaggaagtgccatgtaaaaagctttccataaaaatttgaatctctgatggaagattcagcttccaaaaagttttccaccaacgttcaatggaggtagagctacacgtatcctcctattcagcaaggcttatagcaaagtgatagcctgattttacagtgtagcatcctgtgaatgaattgtaccatatcattgtttcatctgatggaaataaattcagtgggatgctaagaattctgtcaacatcagcttggcaaaaatttgattgcaaggccaccaagtcccacagcctattctggtttattaaatgaaaaactaccaaacttggattagaaccttcaaacaaaaaaggtgtaaaacaagtgtgccctaggatccaaaggtcgaatttacagaagatgttgttacaagttcctactctctatcttaaccccttaaacaataactccttaccccaaacaatacttctccaagtcaaggatgggaaaataccaagatcaacaataggaaattgaccattcaaaaaatacatgtgttgaagaatctttcctagaagggagtgtggaaattcca

SEQ ID NO: 15163 - DNA, 15473 bp, Cannabis sativa
  modified_base (55)..(59): a, c, t, g, unknown or other
ttctttatataaaatatctatataatttttgtttttaaatatatataataatatnnnnnaattaataaaaaatattctgttaattaataggatattcgattaaaattaaggtacaaataaaaaagtattgttaaactaaaattctgttatatgtttctaatccaaacaccactgattggttatcaagtttttttttcttccttccataacatctctgctgtgttcagcagaaaaatacaagtccagctgtatacatgtatatattataagggcacgtgtttgactgtttccttccattaaatctttgcctaatgtatgtattaggatacataaaaagagccctttttcttgaatgttcaaaagcaaggtaatcacattggtctgccaacttgaatgaactcctatatcaaaggctgctgctgctgctttattttttttcaggtcagctctaaccaggaatgcttattgaagctaatagtataagactatggcaaaatttgaatggctcaaactcaaatagtagctttacctccttggttctgtaagcacaatatggtcatgtcacttttaaactaacggtacctatcaattcaattcaattcaattcaattaacttaaacagaagctatctagcaaaactttcagcatttcatattgttcaattgaatctatctttcaattacacgccttttgtttttaaactcgccacaatctttgtctatgcctctgtcatttacactctgcctatcatctccctgtcttccaaatcctccaccacctctactccccttagaactctgcctatcgctgcctctgcctctacgctcatcaaaatcttctcgctgttttccaaatccaccacctctgcctctactccccttgaaattctgtctatcaccccctctggttttacgttcatcataaccatctcgcttctctccatatcctccgcttctacttcccttgaaactctgctgatcaccccccctgtcactcattcttggtccgttgttcttacctctaaatcctttaggacctttactgtgatacccttctgatgatccatcaaaatcatcatcgtcatcttcgaacgagtcctttctactattcttcatctcactggatctaaactttgtgtctttggtgaaattatagttgctttgacctcttgaacctttaccattgctatatgaatcagcttttcctctgaatctacttctaccactgtgtaaatcatcatcttctgattcagatccataatcatcaaagccagaagtttttctcctaccaaaatcagtagttttacctccccttgatttagtattataacttcggttatcatccacatcagagtacagcccagcctcgtcttccgaaccaaagctgagacccttggatggacccatcgaacctctacctctacctcttggtctagaatcagcaacgtggctggatttccacttgggattagctgacagctcgttatcagaatctaaatcaagatcatctgaatcatcagatccagagaatgatcttctacggctgaacttacctttgttgtcataagaagaggatcttatctgatgacgtgcgtgaattactttgttagactctagactatcttctgatccagagtaaccttcaatatcagaaaagtcatttgaagaaaccttacgcactgaacttttattagtatctatctcatagtggtcaacgtcatcttcttcatcatcaaaatcatcaaatcctataccaggtctactagtatcagcatcagaatattcttcactacggacccttggctctctactagctttgttaaaattatcttcagcccttcgaaaatttcctccctcacctaggttatctaagggcgaacctttacccatgactgaagagtctgcatgctcaaaagcagcaacatctgctccgtctgattcatcatcatcaaagtcaaaattccatgcattagaaacctctgaccgattagctgtcttatcaaacctcatattagagccattctgcctttcttgcattttgttctctaaaaattcatcatgtgggcgtttgcaatcacagtgaaaacattcagtatttctcctatagtttaagaagttacacctgacagataacagaatcaacagtaagcaaatttggtaatactaaaacagaataatgaactgcatctcggtagagcgacacataagaatcggaaagaggccaagagctaatgtaaatcaataagttaaattgaaagccaagagtaaacaacagttcatgagcagattttggttaccaaatccatgttgaaaaaataagaaataaaagggagaaaaaggtaaagaagtgccctaaaagggaggaaaaaagtttgagaattaaatcttactgagggcattcccattctcctggaagcagctgtctctttggacgttttgcatcacattgcaggcatgcagtgttcctcgcaaaattcatgaagtcacacctgataacaaattcaatcattcttaagaaaccgaagaaggcaaaactctggaaatttggtgctcacaaaaaaactaacaaatgaaaaaatctttaaccctgtactctaatcacagtcacgagaatcacacatcaatcattatcaatatattgcaatttagcaaagtaatcaatttcagcaaaacaacaaagtaataaatgaaaagaggaaaaagtatgaagcatattagatcaattttaagcagaacatgccagataccccagccaacattatctggtaacaccagagaaggttatgatgcatcactaagtacattcctagatctattccccaggcattatgcttgttactcatgtccctaacattgtaagtagagtgatgtgttgatacgctagagagtattgcagaaataagtagtcaaaaaggttttcagaggggaaaaaggtttcaagggaaatgttgaacaaaataaaacacaaatgcacccactgcaatagtccaagtcgagtacatatcacaaaaaaccaaagaattggccataacaaaaaaaaagtgtgataaaagaaacatacttcgggcacagccagtccccttttttcatctcaatgtcatctcggccgacccgtttttttggaggtggaggaggctgctttacttttggtggaggctttttaaatatcggaggaggaagattgggatcaattggtacagaactcaacttgacaacctcatgaagcaacttacgtactacagtcttcacagatttctgtttcagaagagactgattcactgctgatccatttgtaggatcaaaaccataagccaataaaacacgcattatatcaatagtacgcgcctcatcctctttcaatgtgagaagatatgctctttcacatgagttcctcaaactgcaggaactacaaacctggtaaatgaatgaatgtggtcacaaaaaaatgctgttcaacaagtgattacacagaaatgaacatggtgcaatgaaaattacatacaacataaacaacaagaagatatttatgcttacatcagttcagtcaataaaaagaacactgtctgacagtattatttgaatttaggcatagaaaaacaaataggaacataagctaggatctgagcgaacaaaacagcaaaaaacatttcatggttgccagaaacacatagacataatagtaactatccaagaagtagatggagagaaaaaagtgagggggagaactaggcaagaaagataacagtggttatatgaaaagttgaaacaaaaatctgcataagcaacaagtcatgaagtaatactcacatctccttcatcaaaatgcacatatttcctcaatagttttgcagagaaaaccaccttcttgtctgcacttgggcaaccaaaacccaccaaaatttgaatatcctgtctcgacaacgacctgaaattaatttcgtctcagcaccattgatattagctggccagttattacaacaatgtcaccagcagaaatgagaaaagacattctactatacaatagcagaaattactacatgtgtgtatcagaagagatataaacaaagtaatttcagaacaaaaaacaaaattgtgaaagaaaaaatcttaatgtagacacaacctatcaatttggaacgaacccagttgagaaatgaagctacaaacctcatgatatcgaatcgatcctttccgaaatttaggcaggcggtctgaacaagcttaaaattcttaaaatccaggccacccgtatccgttggagcatcctgcggagactcgaagcccaattcttggatcattttgtcctcatcttttctcctatgatcaaagtagttctgttgtactaacctgtccatcaattcgatccattctggccatgggtgcaccagttccacctcatttttaactcccaacgacctatcagactggcgcgaatcatatccgggaaccggtggcgacgcggctgaatatgaaacgaccaagtcggaacttgtggaatttgaatttgaatttgaaatatcaccattgatggaagattccggctgttggaccttcttggattcccgccaagtgcgaattcgctggagtgtttcgtccttctcagaacggtctttctcgatggcgtcgatttggtcgaagacaaagctcaatcgagctgagagtgacgacgaagaggaagggttcgggtcggatgacgatgaaggtgacggggttgaagagaagggctttactgttgtggcggtgaaaaggtgaaatgtagaagaacgtgaaattttaggagttggtgatgagatagagaggcgtcggagaatgaggaatgaaaatggagtaaatgccattagagagtgttagagactaggtttgagctaaaacccccatgaaagagaagcttaaaccctagagtgggctgactttctcagaagaaaaagagattcaaggggttaagtaagtaagaaaggactcttcttttattgttttttcttttttaaattaaagcgtttgcaatgataaacgaaaggagcaggaggtcgttacaataaaatatcaactggtatagagtttttctcaattacattacttgtcaaaacttatttggctacaagatagcaagctgaattacacacaaacgaacaacctttaatgttcgaaccaaatttacatcactttttggtacactatttgagcacattttttattaaatgagctatattttagcttttcaccacttatttacacatctattggagatgctctaactgtacaaaactagaaatctcccacctaagaagtttaccgagtaaaacattaagaatcactctcaattacgacaaaatcatttgacaaggcaacggtcatctccaacgcatgtttacgggcaacaacccaacaaagaaatgacaaaaacaagtctacgagtcacgacccaaataatatttggccacatttgaaatcatgatgtcctccctctcaaccgccacattgcaaataattttgatcaatcaaggttgaggaggggaccaactagtagcaaggagcttactagcatcccgtgaaaaaagagattgggcatattcattaaagcaagataagacagaattaataagttaaaaaataccgtaggttaagttgttatagaacttattgtttcatgctttccaaatagcgtctttagtaaaagtctgtggccctcgagtccgaaagctcatttatgttcctggaagctctggtacttaaactgacgtggagacttcgttcaaagaggagttggttaagttagttatttataactaacttaacaacctcgcttcttgcagccaccgacttcagaatcttgatcctaaggctataaataccaccttgactttgtcatttggacaacacgagatttagtactcagcttagaggagattgagagtttgagagagaagattgggaggtagagagagagattgggtttggatcttgtaagaagaatcttttgtagatgaagaagatttttggttgtaaagtgtgagagttgtaacactttatgaagagtcaacatagaatctcgtctcgactgtattgtaaatattcttgctcaatcaataaagaaggattacggtagtattccaaaactggagtagagtcatagatcacttcgatatatcgaatttgaaccagtatatatcttggtattatttctttattttctacatttagtgttttctagttttaacactctatttgcccatgttttattttcgattattgctcttgttgttaatcttgtcattgttaactgtttaattatttaaaatttccatcatcttaattctacaccattagtcttaattttctcacaaagagaaatgggagaaactattggcaaggggaaaattgaaagagaagaaacgagagtgaaatataagcgatgacataggcactaaaattgtgtactaacattataacaaatttttaaccaaatcagtaccacgtagtttaagatttaagtacactattattatttatgttagttaataatgtaagaaataggaaggaaataaacaagcttatgtattcgtatttactttacactagtttattagcaaaagtctgaatagattctaaatccgaatcaaaataatcagactagaagcaaaaatgtgatacgtttacttctcattttttattaaggaccaggtaatgattattattacatatttggacccaaataatgaaaagaaaaaatggaaacgtacattacgtatgtctaacatgagaccctttgatatttacatgtatattatatacaacaaaatataatcattgaagagcatatggttggtaaccactggtacggtcccattggactgcggcaagctgagttgtggcaattaaaaccactcgaccatacattttgggtagagacctttatcagcagcaacggccgcaaggccttgaagttccttctggactttagacctctcgtaaaacaccgagcaagcaagcgaagtgcacttaacaccgctttccaaaagccagtccccacctccacagtgtcgacatatctgcatttactcaaaacagatacagattagattataacaaatataatcataagagatatatgcaaaagaaagctagaaagctagagaccgtggtccccaaatactccagtcggttttttttttctcagaaaaggagaagaaaagaaaaaaaaaatgttgaaattcttcagcattaatcatggtgttagtcccaaacaatttacatctctttgcttggatgacaatttaatgcaactgctttagttggagatctctagtaattgattaagttggtcaaaaaacttacagcagcaaggtgttgcatctctctctccaattttgaagttcttccaaccacagctgtcactgcagcacttccatttcgggagcattgaaggcaaagatgggtcgatgcctctaccaactcaccacacaatacacagtgttttgagagatagtaataatcgattctggttttctggggatttggagcatgaaggggacgtttagaaactgcttccctaactggacggggcatttccaagaaccacttgttcaagtctgctccaacaagtccaaacacccgctgcagagctgggattatttgtttcttaatgtaatacagatcatttaatcgatagggagaatcgacagccaaaagttccaatggatccactaccatgtcaaccaggcgagccccaggctctccatgtatcacaacataaggaattctgtctccataacgtggctctgcccttggatcagttctcattgctttagtggccactattgctgatggtgggagtgatgaagaatcccttgaactgtaggagcctaaacgaacttcctttgcaaaaacaaaatcttgaagagacacccttcctgataagatccgcctccattgacgcagcaaatatactttaacctgtgatcagtagaagaagatgaaaagcaagaccatggaacctataatgatcctgtaaaatacagtttagcaacatttgagggcattatgtaaaggtcacagctacagagagaagccaaaattgttaaaaaaaaatcaatcaacttgtaagatggtcatgattaacacatctccccgaagaaaattcccaaagccattaccccagtacaagctttggtttcaagaaaataattaggcaacagtgaaattttccaaagcacggttacctcaaaaatgtcctgatgttcaaagaacagcctcagagactgctccatcattttggaaacagccacacaagtatccctgcgaactgtctcaatacctttagcatcaaacacgggttcaacattcttaggactttcataactgtaaccaacatatcgcttcttcgtaagaaggaagcatggatgataaaccttttccattttcagagtaactggatttggattcatagcagtgacttctgaggcgatctcattcccaattcggtgggcatcttcaacagatcgcccttttaggaggacaaacaaactgcacaaaaggaaaccagtcaacctaaagagttctcaaacaaataggaaagaatgagaaaggttctgatcggtgaccatgatagacaatatgccaaatcctaaaacactttagctctccattctacaaactattcccaatgatgacctgccacagcccacagaataaagaaacaagaggaaattccaaaggaaaatccttgagaatggctcttgtctttaccccatttgtaaactagaaaaggggttacctgtcagtgtcaccataaatgacttcagccttccatttttcctgtgcatttacataggatatagccttttctaaggtacttcgaccacactgaacaatgctgtctgcaagctctgcacaaggcattcggccactaaatccggcagcagtatacccatatgttacatttgctattagtttcaatgccagttgtcttgaattaaatatctaggaagaaaagaaaaagcaccaactggtcaatttaacaatcatgcttgtttatctcaaagagcacaatctgagccttcgtagaacaacagtcccatcataaaggaattcgtatctcataaaacaaattgggatacaggcaaatcagacctagatgttaacgtgaaacagaaacaataaaataaacatgaattcaagatttcatgattcctcactaaacatttttggtcaatttaaaaagccaaggatgattcagataatcataatactacaaaagcagtatgacggactgatattaagaattgaagaccagcagtgaagtgaatgtaaacacacatgatagcagaccaaatttgattgaaaaaataaaaaacataccctttgaagaacttgttgtgaaggagacagctttttcattgcttgtttcaccataattctagtggacaatatttcctccagcaagcggggtagcacacctttacgaatctgaatacatcaagaatgtacctttacatatctgtatacatcaataaatgtacttaatgcaatctccctcgctcctctctcatcatgggcttttgtgtttttgttcttaattggaagaactcgtacagttttttattatagctatagcatgagaatgcaccattaatttttatcttcttaatttatgggtgaactacaaaatatgtatgatgcaacaaaacaacttccataaacatacacaagtgcatgcaaaagtagaaggaaagaaatggtcaagtgcataaaatcaaccctgatgaggttttcccgcataatctctagtatgcagatcctctggagccaaaaaaaatatatcccttcattacctaattacctattattaagtaaacatatgcaagaatcatttaagacagaaattggaaaaacaacctttgttggtacatacataacaccatttggagtaagcagtatctgattttttaaatcttgtagaatatgtggatctggcaaaaacggactgacaccaagtgtatttgcctttgatggcgcaatgtttccaaggcatgtagaatagcacaggttgtatgcaataatcattgatggataaagagattgaaaatccaaaacaactacaggatctgcataaaaaccagattctggttccattacaagaggaaggcactccattgcaggttgggaggcaacctagacaagacaagtttgaggtgtcagacattgttcattcagtcagcatatcaaatagctcatatcatctcacaaaagtcaaaactcatggttcaataaaatatcgagagaaaatgtacaatctgccactttcagaagacaatgaaagatgatgcagtacaaacctgatgactcccaggagaaatagcaagataattttgtgtatgtgccaatctcaaatacattgactcaacacgatattgcgaaccacgagataaaactgagaaaaagtcaatgccaaatacacgagcgagctctgacgttctatttatctgcaacagcacagtacatatctaatcaaaatgcaagacgcaatacattcatccctaaaatacaattatgtcaaaccaaaacaggtataaagtatcaatttttcctttttttaaaggaaaaaaaacatgccatggctacaaacatgacaaatattattatttatttattttaacttacttatcaagcctctcacaaggtacgacagaagtaattcaaaataaatccaaataaataaaactaagataaagccatttttccccagcaaaccaccattagtcttctaccatcaattaattcagacctaaagcttcatctatgaagaagtaccctttctaggtctcgttatatacaatcacaagtcacttcacacagttgttactcccctctaaacaactggcaaagcatttcacaacgtaatagaaaatctgtagacatcaccaatcaataatactatcataccatatcaagttgactcattatctcaaggtttaactttgctctgtctttcacatattcaatacagcgatatcttgctcggccaggaccactggaaaaccattttgtcagcacattataattaatatatgggatctttcgtctcaacacagcatcaacaacagcttcgattgtgtacatattaagcttaacttcaccacgcatcaatcgccaaacattaaggacaattctgccaccaatatgaacaccactagcatgagtccgtccccattcatcctcaattatagcatcttccagtacagcagaatcagaaagagctgactcatgattaaagttctcaagtgatttttcctcaaaaatccctaaatctccagcagccatcttacttttagatggtatccgagatatgctgttaagtaaacctataccaaggtgtgaagctcgttctgctaaaaatccaattgaaccaccttgaacatcccaccccattaaaatatccgggtcaagcaaacatacaaactttataaagtgattaaacaagtacttttcctcattaaaagtcagcacactgcatccagaaattccatcaagattcctacaagtagtgttgaatagatgtgattagattctaatcattatgattcttacaatatttttggagtgtataaatatatttatagaattatatattattaatcaaaattgtgttgttccggacaatcagtccaaaatgcttgtaacccgttcgaaatggtagttatgcctgaatacctacaataaataaataaataaagaggatagagagatcaccagaaaataaatcaattaaatacatattaaaaagaatcagatgtgtgaagccctaggcagtgtttatcaaaagcaaaaatgaaaaaataaataaataaataaataataacaataataataataaaagaggaatggtatgtacacacataattcacacaaagagtacacacacttatgtggcaagtaacttcaaccaattatttttatttaagatgggtcccacttatcaaaagtaacttgccacatgggtgtgtgtcatgtttgtgtgtaaattacatatatcattactcataataaaaaccgccagaaactacatcatttgaacaacattaaaatgctagctgccactgcttgatatgtgtactcctcgtgccatgcagtgagacatgagaatgtaaagacaagtaaaagaaatccatacctccaaccattttcatttttgcagtgcaaaagcacatggacttcgacttcaaaatcactatcattctgaacagcaagagctattacactgacggcatcaaattgaggatcaggtcgaagatctcccctagaggcagcttgaatctatgattgaacgatattcaagatgtcaaacacttgaacaaatcataattctcaacacataaggatcaggaaatggcaactaaaaggaaatgatgagtcgtctaacatttatgcagtaattttgcagaagaagaatttaaattgatatctattttattttattttatgttgcaataagtttcaatatgattagcagaattaaacaaacctctacacttaacagtgtcagctgctgcccaccaccaagacttgcagggtctctaaatccaatctgactaaggggagtgggctttgatctcccatctggccctgatatctgagaaacatcttgtgagcaactagaatattgtttaagtttattagaatctcctttcctcagcatcggtgatgtatcctcattacaaggaatgttccttgtcaaatcagggtctttatggttctcttgtgacccttgtgcctgaatatgtagttgatgagatacatagccagattcacaagaagccttattgcaatcatcagatgaagaacttggtgaatcaattagagcagtagaacttcctgtagtttattattattatcacaaaaagtttctaattttataaaatctagaccaaggaacgcatggaaatacattacctgtcttagatgaaacctttgttaataatgtattgccttctacagaagtacctagatgtccaaaacaaaagaattgatttagattccaaaatcaatgtgcaaaaaataaaatttatagcaactacttttgttaccagatgccagccatctcataacattttcagctgaaggaggtgaaaccagaggtgtcagcagatacaaaaatgagccatcattttgataatgaatggggacaccaacaggagcttcttgttgagaagtagagtcacaaactttcatgcttttgttctgaatttctgtcttttctttcaagtcttccatgaaaaatgggagacaatcatccaaagctgttccttataataagatggaaatttatttgtgagcactgattttaaaagacacttatttttttgtaataaaaaataaaaacaaaaaccaatatcaaagcagttgtacaacttgatgattatttaatttaatttcaatgataatattcataaaatgccaacatcaaaaatctcataaaactcgcctaatctaattatcaaaagtgctttgactcaattagaggtgaagcatatcaagtaaactataaaatttaatataaacaccaaagaaataaggacaaagaggtagaaatggtttttgggcgctccaaattctcaatgagaatatctttcaaactatctagctaaagaaagagaaatagtttataaccgacaccatcctagttaggcaaacaatgcatttaagtaaataacaataacctgatgttccaccttgagaatccttatctggacaaggaagataagaggtaacaggacaagaaaaagtttttcttgagtgatctatccattcagtagcacgaggtttcttgcataaggtcaagctaattaagtcctcgtcttgtggattgctcttaatgaccatggaaacatcctttccagggttttgtccactgtttaaaaaacatatgttagatctattcctaaccactggttttatggatgacattttattggcccactccccaaaaggttggccttcaatgccacttttcatatctaataatttctcatgcccaacagtatgaaaacagcttgaagcagtaggcaaagtgttttccttatcaggcttcaacacctgaatattacagtcttgatcattttcacaatttccagtagcatcttcagcaggaatcccatgctcagcaagtgaagaacttatatgcacatcaggacctctgtctaagaagtccctggatcgagtgatcatactgctgctatcatcatcacctttatgagaaccaaaatttatatcatctaatgtactaggatttatgaagctatcatcaattgcctttacatcataaaactcacgatgcagtgattctggaccagtaaatgatggacacaagttaagaggctcaagaggcctcttgttaggctcaccaatttgaaaatccaaacgtgtaggaacaatattgatatcttctttttctttcttttctaaagaaaccttttctaccccaagagaacagaactcaactggctcaacacgatagtgtcgttttctcctcattaagtctcttacagagcattcaaccaatgatgtaccctccttaatgccagaaacatcatccctcacatttttcattgaagaatcctcatgttgtcccatcttaaattcagctgaggaactttcagtgacaggaactttggcttcactgcaggaatagacagtgtctctatcaatgtttgatttttggtttatcgaaaaaggtaaagagccccagaataattttttccttttatgtttatgagtaaaacttgagtgagcatcatccttttcctgttttccaataaaagaatcctccaatatcatctggtgttcacaagtctcatcaaatttactcttagaatccatttcagatatattttcagatgatccagcacagggagtatctaacatgtcatccccagcaccatccagttgaggaataattttttcagatgaaattctgcgagtatggttatattcaggtgagtcctttacgtcaactgaatcatcaatcgaatcaagaatgtcttggcactccttttgggattcactctcatagtccatattagctttctccaacacctcttcaatggtagttgcaggaaacaatgaacttaacatggtcacacaaagaagttcatcgttggcgtttatatcgtcagctgcctgagaagtggcaagacacttaagaagaaccaaggcttccttatctgcagcctaaatatatatatgtacataaatcttagtaacaaatagtagaaattttttctctaaacagccaccaaccacaaaatcaaacaacacccaaaactatataatatgaaacatgtactgcattattagttcccgaaaatcaaatctgaaccacagttaggaactgttagaatattagctgtatattaggtataaaagaattagggtaacttgtatttagtagtttcctattttgttggtagtttcctattt

SEQ ID NO: 15164 - DNA, 5954 bp, Cannabis sativa
  modified_base (724)..(724): a, c, t, g, unknown or other
  modified_base (2392)..(2403): a, c, t, g, unknown or other
  modified_base (2528)..(2529): a, c, t, g, unknown or other
  modified_base (4569)..(4570): a, c, t, g, unknown or other
agagagagagagagagagaggacatgtataaaagactcatgatgcaaaaccatgaaacagtttcccacagagagtttttccatcacaaggcaaaaaacacgaacaatattataaactatatgcagccttcaaatcttttaggaaaaaacttttcaagccatctaagaaacctgactttttaaaagaaaggtaatgtatcaagatgtctcgaacttgatcgaaggtgataaaaaaacagtggaattacttaaaacaccttttacttcttaaccaagctatacacaacttgttgaggaatccctcaaatggagtttacacaatcaatccatggagtttcaaaaatcctaatggcttaacaccaatacactacaaccaccacccaagtcaatgctacaccttaagatgcatatcatcaatgaagcagcaacctacactgagcatcaatgatggtaggaacacacaaaagaaattgatagggtaactcttaacattaaagaacgtatatcatccatcaactaaagccctcagatctcatagctaatatggtcattaaaacagaatatgggaatttttcattacgagccttgctataccatccagccacccagagagagagagataataaatatatatatatatgtatatggatatgaggaatgctaaaaggcaaaaccggatgggagtgctgttaaatgtggctatcaaaatgagagagagagagagngagagagagagagagagggaggggacagaagtaacaaagctcattatgcaaaacctgaaactgcttcccaaaatgaatttatacatcacagggcaaaatacatataaagcaaatgaaaccaaaaaaaaacaacttttcttaacaatgaatcgtcttatttgacgaactcgatctttaccaaaaaaaacaaagccttttttcatgaatttcgttaaaaaagaaacacatccagatgtttccaacgttaaaaaataccaagatggggggaaacttttatcataaaaatatcgaagcctttttttaatgaatttcattaaaaaaagaaacacatcaagatgtttccaacgttaaaaaataccacaataggtggaaagtttaatcagaaaaatatcatgaacgtatatttaaaaccacctcccacttactatagctctatacacagattgagattagttcaacaacatatataaagtaaaaccactacagtaacaatgttgggaccaacatattcatatttagagagttacagatgtaacaaggcttacaatgcaatacgacgtaactgcttcccaaaatgaaattttccattccaaaatagggccaaaaaacatgtaagtgcgaaaaaaaacatgataacatattattattttccaaagcaaaatatattgcatagataaacacacatccaaccaattaaaatgaaacaataaaaaataaaaccatctcaaaaatataaacataacctcagaaacctagaaataccatgaaccaacaaaaccaataaaaatcaacaacaacaacaccgacaatataaaccacaaaatatattttttaaaaaataaattaatgcaggccatcctctcaaccacaaaagactaacattagaaaaaataaaagttaatgaatgcttttagttgggaatgatgcttcatcgtagttacatcagcgtggatgcaactaagaagatggatcatccacagctgaagggtaaaattcaataaaataatgtttaacttttctagtgtggttctttaaaacaactcagctgtatttcagtaagtcgtttaattaaaatctaacatgtaatttatattgaagtttgattgttactacaaaagttttcacttgatatccctcatctccattacaaccaccaaccgatattcgctgcaaccactttacaatgcagtaatcatttaaattttacaatgcacatcaacatcattcaagaccaacataagcaacaagaacaatataataaagtgttctgtggcttacggcagagaaaataaaaatgtcatcatcaggaattgaaaatattatatatataaattggcagctaatatagcaagcaaggaagtcaacaaagacaaccacatataaacaagaatacaatgcaaacagattaaactcacaataaaatgaatgcacaacaaaacatactgcagagtaaacatactgatcagctagtgagacaaccaaaagataattataaaataaaatggaaaaatgaacttgaatattacaatgagtaaatataatcagcctaaggaaagccctcagatctcatagctaattaatctggtcaaaaacagtataacacaagaattttcaaatcagccttactacaaccgttcaacccacccaacaagagagagagagagagannnnnnnnnnnngagagagagagagagagaaatatatatatagacataagagcattgctgaaggacaccatgaggtgccctaaaaagggaggatagatagatagatagatagatagataaatatatatatatatatnnagagagagagagagagagaaggacagatgtaataaggctcataatgaaaaactatgaaactgtttcccacaatagagttttcccatcacagggcaaacctataaaaccacattcacaagtatctcaacaaataaagtcccaagttcttgtcaatctctaaattttatagctatatatgtagattcaagtcaacattttcatgaacgtaggccactatccacagcaagggtagaacatcatatgcatcatcatagtataaatgcaacattcataataaatataataatttgacctcaaagaagccgaatatggtgaaagcatactaagatgtccaaacatctcattatcaagcagaaacaaagtttgatcaatagagataaaaatattaataaactcttttcctcaataaaatatatatactatattaattgaccataaaatattttttaccatttctaaattatgaaaatatatacaaacaaaattacttcgaaaactctggaaataaaaaagaaataacaaagaaaataattacacaaagaaatcgtagctttatctaccttaatagtaatgcaaaaaattacaaaattgtagactaaacaagtacataagctaagttacacaagataaacagaagataatattaacaaccaaggttcacattatcaaaaaggttactgggaaagaatggaattcttgcgcaaaaaaacaccaatgagagtagatgttagaaaataaagcactaactctgcataataatctaatcaaatcattcagaaggggttaagttcattaccactacgccatcaacattcactaaaaccaccataaagagcactcgaatcagcttctctacattgttctttaaaaggttaacaacaacaataataagagaggataaatgttatgagtgtgcttgaaatcaatcaaaatagaaaaggaacaacggcttgtaatgaatgtcggctttggtggaagcagagagataaaaccaaactgatgtctcatgcatataactgtcatcatcagccaaaaaaaggtcacaacttaggaagcgaaaaagatgaaagcaagaattctctacaagcgggttcaagttacttgataccttccaacgtgtcatatgctattggtgcaattaagcatagaaccccataaaatttaatgctttaatggaatatcgctatctaattgcaaggcggtggtggtgccagacaacattagtgcctaaagcaatgctcgagcagaaaagatgggagctcaaaaagaaatcaatgcatgtctcattacaaaaagaagattctcatcattggcagaaacaaataaacgtatgaaaaatataatggatattatataaatatttgaaaaagtttaagaagaaaaatccctgaacagatactagatagtgatacagccctcagttctcttaaaaacaacttttcaaagtcattttaaagcagagatttttttgaattttcaagcatataaccgtgattttcattaaaaccagtttgcatcatcaacaaccactagagcgagagagagagagagagagagaatgcaaagaaaaaaaaaaaaaaaaacagaacttgtcaccaagtaatgatggaaaggtttatgatgaaaaatcatgaaattatttgatttgaaactactaatattttcatcattgggctgatgaaattacaatcttgtaattacaaaaagagcaagagacaaataacttctggccaattactagtctttgattagaaaatactgttcacttgtgtctttgttatatatccagtaaaaatttatcataataggactcttcaacaaaatatgtaacaaaaaaacaatgacacaaaaagattaattatttaaactaataactcagtctgaaacaaaacaaacagaatcaaaacatggctaattacaatattaaatataaaatacaaagccctcagatctcatagctataaaagttcattaacaataaagccattgacttttcatcaaggctaactacatcttcaataaccgagagagagagagagnnagagagagagagagataaaaagaagaagaagaagaaaagagaagagaagttgttgctgttgttgatgatgatgatgatgatgatgatgatgatgagagaatctggcaaaaaagatgtagaagcagatgatgaaaagccaaggaattgtttccaacaataagtttttccatcacagggcagaaaacaaaggaagaaattacttgtaaactacactaaaaaagtaacacaataaaatataaggacaacactttaaacagataaatgcttttagagatcaatatttgaaatgcactaagaaccaactacatcttcaagtattgaacaccgccacgctacaaccaccatcgtcagcattcatcaccaccaacagcaaacgcagatcattaccactacaactaacacaagaaaatcagactattaacagaaaaatattgtgtaatgcttaagaatgtctaatgagcactaggaccaatttcagtttaaaaatattagatagggtgccataatgctcataatgttttggcagcaataaaattggatttatgaagatggtgagtacatcgaggatggtgggaacaggaaagatgaagactcaaacaagaaatcaatgcactatcaataaataaataacagttctcatcaacagacagaaactgagatggatcacattaggtaaaggaattaaaaaaaataaagcaaaacagacctactatattagtcatttgggaaatagccctcagatcttttggataaacaactggtcaaagtcaaatcaaaatcagagattttttacacacaagcatataacttactcattcaaaccagattgcatcttcatcaacctacagagagagagagagagagagagagagagagagcataaaatgaaatgaaatggaatggaaaaaagatcatctttataggtttgtgatgaaaaatcatggaactattagaaaccaccaatgtttacatcattgggctaatgaaattacaatccttctattaaaacttgaaaaaccagatagaattactagacattttatcacttcaaaccttcaatgatataaatacagcctagaaaacatctatcatcatatatttatgaatcgttaacaagaatatgtgaagtaagaaaaatgtaaataggacacaaaaattaattgatgaaatgtataactcattgtaaaacaaaacaaaaaatcaacagaaacgaaacacgaaaaaagaaagggaatgacttttctctgtcattaaaaaacataagtgtagttagagtgccctcagatctcatagctaaaaacgatcattaacaatataaccaatgacttttcgtcaaggccaatccacatcttcaataacctcgtaagagagagagagagagaga

SEQ ID NO: 15165 - DNA, 7086 bp, Cannabis sativa
tttttggcattgaaagatgtggagaagtgagtgttgtgtggaccaagttgaaagtgaaccagaaccagaagagtactggactaggaggacaagtagtcaaaataagcagtgggaattgagcacaacaagaagagcttcatgtgatcatatcatagacccaattaaaacagttgaaattgacacatatcgaccttactctaataataactcaaacaccaacatactaccccaccacagatcacaaaatcactatcaccaaaggccaaagagttattcctattgttactccactcctcctccagcccaactccaataccaataccaacaattcataactccaacaccatcaccttcaaagcctagaaatcttcacagcttgaccaacactatcagccctcgttgtacatacaacacaccaacaacaccctacaactacatggctgcaacggcctcagctaaggcacgttcgcgttctcaaagtgcaccgaggcaaaggggctgctctactactgtgaccccagaagcagggccatcagctagaaaacgactatcatttgctgttgctgatgaggcgaatggaagccaccgcaccagcaacagcaatagcaactaccagcagcagagatcgagtgtttcatctcgttgctcggacagcgagacttctcctctcagaggcaatgagttaaggcagcagagaaggtgggttaggtagtagactaagagatgtgtccttggtttctgcaatgaattgtaatggcttgaaaaaaatgtatggaatgtttctgttgctactgcactaacattccctttttctataatcattatatcattggtaagataatcataataataataacaattaagaaaaagtaaccaaaatgcagatatataaaaagaaaaagtaagtagtaaccatgtggttgccgggtccccaaaatcttcttcttctgcaaatatcccaatcttattaatattatacaaatgtggaccaacactttatgcacaatgctcaagatatctcttttctaaaacaacaccctttaatgaatacaacttggtttttaagttagcatataggttgttcccatggctagattaatcattaaaattaacaattgttgcttaacatgatacatttcatgagatttgacattttatcatatgtatatatacaaatatatatataaatggtaatcagtagaaagttgagactattattaagtcaaatgcatacatagttttttcttgtctaaagaaacacagacaaagtaagtaagcctcaaagtacagtccacacagtaatgctttggcactagctttaacttaaagccattaaccattgcaagaaagaacaaacatagcaatatacacaatcttggcaacagaaaggggacagagtattctaatataaagacagcaaagaaaaataactctacttaaatacacaatctcttgctaaaaagtaacttgcttgatcaaaatcacaaaccaaataaggaccctttgttttgttttgttctattgtttattcaaactttaaagcaaagcaatctcagctttcacctttgaaattccaagacctgggctactacaaccactgctatcagataatgaagtgactgttttttgaagaaccccagatggtgaagaaacagcagtagccggtggactacccgaatctccattcccgaccgcgaatggcgaagatggatcagatgcagcactagttgttgttgttgtggcagtcaatgagcttgatctcaaaacctcagccaatggaccacctggtggtgaacctgcaggagcccaagatgaatcaggggtcaaccagtttgacacatgtggtttagtacccatctcatcattgatggagccataaccccccattgatagagtgagtgaagaaggtgacagcctcccttgtgatgtaatagaactttggttaacactactacaactactatgagtcatgtttgtctttgaccatgcatcaatgaaacttcttggggtctcagaattggtctgttgctggtgatgattattattattattatccaaagacacatcctcagggttgagaaacatagcacactctctttcctgttcaacttctcctcctgtaccaaaactcccataagaattcagattcagaaatggctcctcttcaccatgttggttaaagatagaagaactattgttgttgtcacagaaagaagactttgaagaagattgcatcagatgaagccatcttggatcagatgcagccatagttacatcttcacctttcatcatccactccatactccttcaaatattcaaaaatcacataaattacaaaccaaaacaagtgaaaaaaaatcacaagtaaagaaaagaagaactcaaaccaaccttgcttccttatctgatggcatagattcaaaagctggtttgtcaataaaaacaggagaaggatggtaagggagagcagtagtagaagatccaaggaagtgattttgatgacattgaggatgattagtaatactagaattagtagtagaagttgctaaacttgcagaagatgaaactgaaagagtatgttgctgttgctgctgttgttgttgttgattgttatcaagacgagtcctcttactattgttgttgttgttgttgttgttgttgagttgaacttccacatgctttcttgaacggggacgacctctatgcatgtgacgctcacagtacttttggtctggtgccacatcacgagaacatctccattttttaccatcagttcttttacatctccctggctcagcatctgttccatttgaaaatctcaacttgtattcacttcccccaactgtaaaataaattagtaaacagaaaaaaaaggttttaacacaaacccaggaaatcccaaatctcaaaatatgctaatgacattgattgaacaaagaaagaaagaaagaaagaaagagaaattacatgggtaatggattgggatagctgaaccagacatagttctgttaaatggaagaagaagatcaagtggaacaggtacagatgccaccatgtacttgaatatcatagcttgtctttccaactctcttaactgtgcattagtgaaaggaaaacccacagacgccgccatgaatccacctagaagaaagtgaagaaagaaaaataagcctaaaatatcaaatacccaaaatcccaaatgtcacagagattcataaaaacatttcctttctccactcagtaaactcagctcagaaaagggtcaataaatatctatccactcaacataaagatacaatctttaatttggggggagttttgtatttgtacagagatattaaaaaacagaaaagtctttgggtttggatatttataaagaaaatcaaacctggggatcttaaggcggtggtgtaagagacaggagccgcagcagaaggagcagaaggagtagcagtggtaataatattagaagaagaagaacaatatatattgttattgtgattagtcataggtggtgttgttggtgttgtgttagaagtagtagtagaagaagtaattgtaggaccattattattattattaagatgatcaaaaatcccaagttgggaagattgaaatggacggttgtgattagtttgatcaagcatcatcatcatcttcatcatcatcatcatcctcatcgacttattaggcaatgattctctactctgtatctctacacccaacccaagaacgtgactactatttgtacaagttttaatatttattattataataataataataattgttgttgttgttgttgtcttcttccttgtttgtgaagccaaagttatccattattaattatcttacattaaaacccgtaataacaatgataaaaacaagtaaagactcaaactttataactaaaaccaactcactttccttatttgggattcagacataaacccaaaaacccaaaacacaccccaaatctacagacaaactttttgattctccaaacataataaaaatgatttctttttaggtgggttttctcagattttaggacacgttaaaacccatatcttagtttttatttttaattttttgagtctctgttgtttttggagtaagtgagtgaatatgggtttgatatgggatttttatgataagagtgatgggtttgccgccatactcaaacctctttgctttgcttccatgcttccaacattcgcacgccatactaaaagacaagttatactaaaaaagcaaccattttttcatttaaaactttatgtatttttatttttctctttcatagttattatatatctccttttctgcatggaaaaagaaataacaaaatttctattgtcatttattaatattggaaataaataaagagacatttcaaactaaataaataaacaaagagtgtcccataaaatatttattattatttcatttgggcactcccaccataccaaaagtaaatataaattaggaaaagataaaagcataagtggccggccaatgttgattttttatttttcactttattttattttatgtgtcatttaataaagtcattaaactcctctcaatatcactggaatttaattattattttgtaaaaaattggttatatttctttaagaaattattctatacattttttttaaatttatagtttgggttgctccggtgagttttttaatagtttatatgtggattgttatataaatttttagttgcgatttatgttacttcgttaatttctatgggattttcatgtaaaattctgtaaaagtataaaaataaattattttaaagtattaaaatgaaaaaactcttatttcttttactcaatgatatattttttttttaaaaaaaaaaaaaaaatagttatatttattttataggatgaggtatagtagggcatttttttaacttttttatgtactaccacgatggcacttttaaataatttagtgttaaaattagaatttaaactaaattgtatgcatatttatttatttttatatttatgaagaatatatattttttttttgagagaatggaaaaaaataaagatgaaaaatataatatttaaactttgattttgacattgtaaattattaaaaatatttatttattgtaactatgatatgtgttttgaaaatttttgttgtagagagaacaaattgttagtttaatttttttatgatcgtatatattgtagttatttagagctatttgtaaatttttagaaaattcttaatagtttatagtaccgaaaaataaagtttaaacaattactcaattttttttttctgctaaaaagacaaaaacattttatccaaaagacgataagatgttagtgaacacatggggactcacctctcaaaaattaaggaagcttttacaatagtgatctaaaccccatctagccagagcatgaaccgaataattctgagatctaggcacccaaaaaggtagaacagaagtaacagacaacagacctaagaacttagaaaataacatggacaaactccagtgaagagctatagaagactcaacagcaacaaccaccctttggcaatcagtgacaaggtcagcatcattgattcccaatctcatcaacatctctaaaacacaaaaggccgcaaacaattcaccatgaagcacaaaaaggaatggtaactaagaagcaaacaaagccaggataccattaaagtcatcctaaaccaccactccaacaacacctaaactcccttgttgggattaaactcatttaacctatcaagtgagtaggtccatctatatgctcattagatgaatctgaagaaagttgttgttatttataactgttggctttaataccaacttaaaggggaccccaccaataattataaataaatgtgtctctactcttttaaaggagttttgagttttaatatccgttctctaatctccaagctcatactttagattcagtttagagagagagtccaagatcataatgagtgtgtgtggagggatgtaaaagggagtatcactcttgaagtgaattccctcaatgtgacatttctttgtaatactttactatgttaagttgtaatcttgggctcattctattgtgtactactgattattcctattgaataaagatccatcattcattcattatcaagctaagttttctttgtctatttttcaattaagttcaagttttgattttgtgattagttttagttttgaattgtgtttcttggacattgttactgctataacaaactgttttgagggtgaggattcaccacaaatggtgtcagagctcaaggtttagagttcaagaatcacattcaaccaatcaagacttatcttcaacatttcaagaatcaaactcgaactttcaagaataagattcaagaaatcaagaactggtttgaatggcttcagcaaggtttgaggtggacaagttcagtggttcaaatgatttcagcctatggagaatcaaaatgaaggcatttttagttcacaaagggatctatgaggcacttgatgatgaagccatgaaattaattgaagacaacaagaagaaacttgagattgaagctaaagcacatagtgtcatcctcctcggtcttggtgatgaggttttaagagaagttctagatgaagacaaggccttgggtgtttggaacaagttggcatcaatctacatgaggaaatcgcttgcaaacaagttgtatctcaagaagaagttgtacacacttcgaatgggtaagttaaaggaattgagaaagcatctagataattataacagaatcattcttgatgaataatcttagggtgaaaattaatgatgaagaccaagctataatcctgttgagttcacttcccaagatgtatgagcactttattgatacaatcttgtatagtaaagaaactctgactatgacaaaagaaactctgactatgacagaggttaaggctgcattgaattctaaagaaattcagaagaaggaaaatgagaccagtggggatggattactcattgttaagggaaaatttcccaagagggaatacaagggaaat

SEQ ID NO: 15166 - DNA, 6723 bp, Cannabis sativa
  modified_base (6682)..(6691): a, c, t, g, unknown or other
aacaaagaaaataacaaggtcaaaatatgatttttaatcttcattgatcatcaataacattacattgaaattatatttatatttatggtataaaaccctaacatgatgattaagtgataaattttttatatattgatttttttctttgtcttggtttttgtcaccaccgaatacccactgctttgtcactatcattttgttaattataatgttgttgttttctacagccgaccagtcgactggcgtgagtttcgcttaggtttcagtgatgaaccttagatttttattgtatgggggcttaattggtaaaaaatatttgtgcctactttaaataaacgttataattactctatttatattattttgtgaggtttaattgttataaaaatatttacctaaaaatatttatgctgaaggacattttatttgtacccttgaaaaaaatgaacaatgacacataaattaaactatgattttattatgctaatctttagattgttaagttggtgatactaatggtatatagattaatgcttagtataccaatattaacataattaaatgatgcttgagttagtagtctaatagttattcatattaatagttatgagtgttgtaatcataatatctaattatgctatagcagcggtctatagcctagaggaaaccccgagccttagctcctatttatattatattgctatatatataatttgatagattaatcactccaaatatagcttctatttttatacttttccttgctgagtcctctaattcatagattctctattgtgcaagtaaaagaaagagaaagacttaacaaccatgcgttagaaagctttgtgagatgatgtacatatttagtcaacttaatcttggtcgttgggcttcttggaaggctatttattagaagtctatttttccgcatttgccaattttagagtcttatggttatgtataaacttttgcaattgtattttgggatctcgagtcttctaaactttagaaaaaagtttatttcactagaagtttttttttatgacaatttttaagtataaacatacttttaatatttaaaataccttgtttatcaagcttagcacatttccaataattcaagtagcgactcttagttattagggcgttacataataaatttttcgatgattccttgccccaccttgcccttgtcggaaatttgaataagaacaaggccttaacaaggaggcatggatggttggggtggggacttgggaatgcccttgcccgacgatgattccttgccccaccttgcccttgtcgaccctatgtgcatcgctactcatttccaaacataggtgagtagggaagtgaaaaaaaacatcttaatatgattaagcatataaataaggggtaatgaaatggatggatttatagatggaagagttgaaaatgatagtcaaatagttttaggtaaggaagaattgagttgatgaaaccacaaccagccacatcggaccaagtggtcacgctaactaccagacatccttagatctcgtctcccactactgtatcacatatcttttattttgataataatctttatttaccaaatttacttctaatactctcatatggtattttatttatttatttattcttttttttaaataaaataaattaatgaaaattatagtaattgcaaagatattatagaatatactattattataataaatattaggatatttgcctaaaaaccatcaaatctgatatttacttatttgtcaaaacaaacatatctgatatttatcaaaaacgttaaatagtaaagttcacagtttacacacgagtctgaccaaggtaaaccaatccaaaatgagaaaaacccaacagaaagcaagcaaagaaagtaactcaaaacccacgtggagctcaactgagctatccacctgtccccagacgctttttagagtctgcacgtgggaaaattccgcacgtgcgaacactcctacgtggctggaagtgatacgtggcgaacgcagatacatggggatagtaggggaagatgtcgaggaatgaggtgtctcgacacgtgtcaatcaaagacagcctgtgggctttactccttctaaccagtaattctttttctttctttttttttttccttctttctctttctctctctaacttcacttcactacttacttcttctccctctctctctctctctctctttgttcctcttctttctctctctactagagccatgatttcgggaagttattctggttcgagctcttcgggttgttattcggcttcttcttcttccgaaaattcttcaccgccggcggccacagcggcgggaaagttattttgcggcggagcagatcggatggtagaggaggaacttgaggccgcggaggcgttggctgatttggcacatttgggtatgcgagggagttgtggtggcggtgaatcagtggggattaggagtagcaaagggaagcgagtcaagagccagtcgcctccggtggtgtttggtgtggacctggctgactcggccactaagtgctcggatcttgttcaggttagtttttcatagttaatcattcttttgattttgtatttattttcttttaatgtttttttttttattttgactttggttactgtattggatatcataacattttatccaaaaaaataaatatataaatagttggttctgttaaaatttactgtttttgaaattacaaaactcctgataaccgaaatttgaatgttataaactatgaagttcggcaattaggacttgtaaatctccctttttggttgtaatgtttttattttcttgagaattggaaggtgaatttttttactcaatttaaggtgaatttgaagttattcattttttgctttatgttgttaaattgaataagttaggctcattaagtggaagcaactgattatccaatttgcgtactctatgttggattggcaacatgtttgtgcatattaattggatccggaaaatactcaggataaagacaacatcgtaacagagaatgcacccatgggaccaacgtcactggcattgaactagaaatttaagtttcgaacacaaatttgtgatattaagttgcataaattaggtttaggttagtttggtaataagctgaactagagttcaaagaaatatgcatattgatgatcatgtatctaaaaatgagtaatactgcatttaagaaatattagttgaagtttcaagatatggattggtatgatgatgatggcggatcattgatgctactctaatgctgggttactctgggacacagttatgactttgggctatttaatttgaggcttcttctcccttcctttgctgtgcttggttcttcttttggattttctgctgaattgttgagaattttcacttgacatctgaatacccggatgcctgatctggttattgtgctctgtaatgtctgaaaatacttctctatgggtctgtcaccaagtcacaccatcttctgcaggagttgaaaaatatttttgtttgtagcaggatggaaaagtaagtcatcagcaacatgaaaaggtatgtggaaatgtactaactgagccatggaagactgaagatgatcacagagaaaaaaatatgaaggttgaaaaagacactgatttaccgaacacaagtcctataggcacttcaagatactcgtcgatgggatgcagcaagtcaagacgcaatttgacggaggtactacatgttatagacttattttattcctctagattagctgtgcatttcttttttctttttaaatgttttaacccctagagtagctggtcatattaaagtcgtgtttggtccctatgtaggcagaaaaggaagcacgcagaatacgcagggttttagctaacagagagtcagctaggcaaacgattcgccgaaggcaggtaatagtttacgctagctgcacttgctgattttggcttttggttccacccttttatgctcaatgtttcaattggaaaatgttgtcttgtatacaagtcctttctttgtctaggtttcagtctgtagattagataacagataatttatctttttatgtggttctttttttcaatcattgagcagctattgtttggattggttcttctctaagtgatatatacataatacatgtgaaacagaagccctatcgattagtactcacagaagaaatcaattatggggactaacaatcctatctggggactaatatagttagatcctctttattgcaaaaccaatcatgctggtgacatggaggtgtatgcatctatacatggaggaacaataacatgttattctcaatttctcactggtggttaaaaggttatatcttcaagcaacatgcacaatgcattatttcaaagctggaatgatgaaaaaacctgtctcacaataaataaatttcactctctttctgaggatactacaattattcataaggcgctttgcgcttgccatgtcaagattgtttgaacaactacttcaattaaatcaaaagattttgatactaaattgcaccaagttcttgttacagagggatgtatttaagatgccttttcccttaaaagtgccttttctactaaatattgtttcaattttgtatacgatttgtttgtgtgtaaattatacaggccctttgtgaggagttgacaaaaaaagctgctaatttagcttcggagaatgacaccttaaagcgggtaggcagtaatcccattctctttctgtaaagcctctccttttccttcagtttttcatgcacacactaacacatcagttacacttgaaatttttgtcaacaacttcattttacattttcccaattaaataatactatgcttcctctctctttttttttttttgagttgagttgaacaacttaataagcaccgaatcattaacaccattgacattgagcggtttttatgtatcaggatatggagatggcattgaaagagtaccagtcattggaaatcacaaataaacaattaaaagatcaggtaagtaatttagtaattgataaattacttaatttccaaggaaattctatataattgttgtgcttcgcttacaacaggtggctaatgtggagaagaaaaacatggagaatactccaagtcgtcataaacctgcttgtcatcagttaaatccaccttcaacttcaccaccaaacagctcattattcttgtataaccatccaccatttacaccacttttctggcctcccacttctcaatctgaaaattttgttcaaccatctcatatgtcacaaaatgcaattgttatgccttcaaacatcacatttccagtggagggtaggcatgattcttgtgaactagaagacctccatactaatggaccgagaacccctttttatgttttgccatgtccttggttttatcctcatcctgatcagggaattgcagtccgatctcagccatcttttcctcagaaaattggacaagaggaaagttatattactaatcagtgcaatgctacatcctcaaaagccattcaccatattgagaatcaacattcctttctgcctgtcaaggtgaaaacagaaccttctggttgtggcgcactggaagccagaacaaatgatcttaatgaacacccagcagatgtttcgcaagaaacaattgatcaggaaacaggattccacgcaagtggaagtaaacctatggtggtttctactgccaagcacgagaaagagattcaacggaattttactactaataaaacatctgcagatgtttgtcatacactatcagctccaccaggaaaaagttgtgaaccaatcatctactcatgtaagaaatcagtggaggcagttgccgcagccgaggcaaggaagagaaggaaagaactcactaagctaaagagcatgaacggccgtcaatgtcggatgcactgttgagctctgtggcaaaaggtgatcttttcatctctgctttgactttaaggatcctttggatattgacccaaacagggcacgtaaaccatagcaatggatagtttaatcaaagaatctgacacaagcttcttactttatgttaagcacatgtccgaggcttttctccttttcttatatggctcttttggaaggcaactggaaattttgacggtccaattgtgtttcatgagtagctttccatgataaaatcatgaagactcgtacaaaagatactgtgagaatatgtacttacagaccaaggtttccctgaaaatttagtgggaaatgtgtatctttgtcaaaacagatgctctaattgtattttaagatttggaaagggcattataggaaaaattgggggggtgcctgggtgtaagaaatcagtttctacagatatttctctagcttttgttcttgtttgtaaatctggaaacagatatccccgtaataaaagtggaggttgctgtttttgtagtctcactttcttgtttacgacatgatatttcattttcatgtagataattctctgttttgtttactactgagagcacttaaggcttcagaagtaggttgaacattgggcgggtttactgggttttgagttcgcgggtttcaggtttacgggtttcgggttcgcgggtttcgagtttgcgggtttcgggttcaaaaaaatgaaaccnnnnnnnnnnccgaatagggcacgggttggcgggtttcggtt

SEQ ID NO: 15167 - DNA, 7414 bp, Cannabis sativa
  modified_base (639)..(643): a, c, t, g, unknown or other
tgatgatgatgatgaatttgttatagtataaactattcatgaattactatctttagtacgaatttgttttttataattgggtaccgtattatgaggcatcatttttattaagttactcctattattcataaccattttatgccactaaaaagcaccaaatgtgatagcatctttgactgattcaattttttcaaaaaccaagtgaagaagatcattaggaagatatgctcagtttgattctcaaaaaaaaaatcatattaattaatcgttcattctattattaattaacatatatatatatagtatataataattgtcatcacatcaataatttcctgaggctgaatccatatgaattaattggtggtattttccttttccttccatatgtgtgagtgtgttaaatctagggtttatcaattagaaagaaacttaattagaaaatttgtgtatctctatatatatttgacaaccaaatcctatttctattcaatataggttaatcttttaaaaaattaaaaattaagaaactataaaattaactctatgacaaatataatgtagttgttttattttgccttgtttggttaatatggaatcaaaataattgtatccttaaaaaaaaaaaaataaataaannnnnaaaaaaaaaataaaaaaataatacgtagttttttttttagtgcccgtgtagggtctgtggaagttatggaattttaactgttcttttcttctttcttgtttttcttttttctcactttcaaatttctttgaagataactgctcccgcctctctttttcttcttccctttcactgggtttctccttctctgttacaatccaactactttccatgcattctgttatggacaaccttaactctgttctttcactcactgatgaggaaagatctactctcactttgcctgataatgctgctttagactcacaaacatctcagcctgtttttgctcttttagcaagagttttgactactcaacatgtctacaaaccgggcttcatagatcaaatgtcggggcattggcaggggcgataccccgtcacgatcactgaatataagaatgaagagggtctctttcatatccgctttggttgcgagggtgataaacaacgggttctaaacaaagaaccatggcactttcaaaatcatttgattatccttttggcgccaaatgttctgcaaaatgtcacaaaggagaatatggttcatactccattttggattcaaatatatcgcctaccttttttaagtaagtcacggttccttgttgaaacactagggaatatcattggggaatttttaactgttcatgatgattccacaaatgagggatggggtccatttctgcggatccgagttaagcttctcgtcactaaaccacttatgagaggccaaatgatcaaacttccaaaaattaaagatgaattctgggttgactttcgctatgagcgtttgcctgaattttgcttcgaatgtggttgccttggccatccttttgaacgatgtgtggcgttcatggagcgaatggacagcggtaatgatgatgattttcagtacagtccatggatgaaaggatcaaagctaccaacaaatggttatgaccgatatcgtacagatttttccaaagccaatgcttggccacttttcactcggttggctcgaaactctttatcaccatccttaccaacaacccgaacccgtggccaacctcagccaagatttcttcttcctggggagtcttcatcctcacctttgacacaaaactcacattccaatctccccacttttcaccatcaccaaactgtgccgcaacaaattaacaccttatttcatacacctggtccaacacccactgttgctggtgctaatgccttaattgcttcccctcagcaatctccatcttacccccatacccctgcttcaactccctctcccgtggtctctacagcccctataatctccaccccaactactcactccatcaaccaatcaactccttcctctacactaaaacaacagaccaatccctccctttctattgttgatctttccactatctatatgccagatattgattacaactcccttcccaatcattctacctccaatatctttactacctatcctccaccaccctccttccacttacctacaccagtcacatcccacctcacttcccatatctcaaccacaccagcttacactactactactccacatgtcacggcctaccttggacaagaaaatatctcgccaaatgtctttccgaagcgacaaagtgagactatgccagttaggaaaatgctcaaacgaagccgatttctgaacggttcttcatcaactgcctcgggagatgattattttgtgactgatgtttctgcactttcggattctacagccacctttacttcaacagcggaggttgctatgcaaccccgcccatcgccatgaaaatcctaagctggaatgctcggggtttggggaacccgaacgcattcagacatttacgattgcttgttcaacaacaatcgccccatgttttgtttcttatggagacaaaactcagttctaattcggttactcgatttcgtaatagtcttcatttttctaatggtttagaggcccctagagttggtttgagtggcggcttaatgcttttatggaaagataatgtcaatgtcaagctctcccatattggacacactttttttgactgttttttgaattttgaagatggtccctcattccacttcacggccttttatggtgcacctgctacacaggacagaaatgcttcttggactcttttgaggagacttgctgatatttctcctcaccagccgtggctggtaattggtgattttaatgaggttctttccaatgctgataaagaaggaggcccgttatgaaatgaacgtttgatgaatgactttcgcgcttgtcttgaccattgcaatctgactgatacaccttatgagggagactccttcacctggattaaaaaccgtactgctgccacaactttaaaagaacgtcttgactgggttttcattaataatctctggaacaatgtgtttcgggttcccaaagttgttcatttggactattttcactcgaatcatagagcaattactgctgagattgcagctcatggtgcaccactgcagcagcccaaaagacgaagtcgattccgttttgagaagctttggttagctgatgctgaaagtagggatatcatctctcgataatgtgctcaataaccttgatgcttgtgccactactttacaaaaatggcacattgggaaatgtggccgaatgaagaaaagagtagccgaggcacaaacccgtgtgaatgatctcaacaatactttgaatcgatcgaatcatatcatggaagaactcaaaaactctaaatcgatacttgatgattttttagagcaggaggagatatattggcaacagcgatcacgggtggaatggatgagttcgggtgatcgtaacacaaaattctttcatgcaaaagcctcagcccgacaatctaataacagaataaaatttctcattactgatgctggccaaaaagttcattcacgttcagatctggtttatgtcattgaagagtatttcaagaatatttttcaagcttcaacaacagatgatgctacaatgtcctctgttctcgacacaatccccgtcacggtcactgctgaaatgaaccaaggacttacacatccatttactaaagcgaaagttgatgcaacgctgaaaagtatgagtccagataaaagccctggaattgacggtatgtccgccatgttctaccaacaacattgggatttagttggggacttagtctccaaggcagttttgggtgttcttaatgatggggctgacccaactcccttgaaccgtaccattataaccctgattccaaaaaaaaaaagcagcctcagaacatgaaagattaccgaccactcagcctatgcaatgttatttccaagctcattaccaaagttcttgttgcaaggtttaaagttgtgcttccacatgtcatttcagacactcaaagtgccttcttgccgaaccgcctcatcactgataatattttagtggcttttgaacttgtccatgcaattaagaacagaactacgggaaggaaagggattgtttctcttaaattggacatgagtaaggcctttgacagagtagaatggagctttattcacgcagtgatgaagaaaatgggctttgatgagcaatggatcaaccttatcatgacttgtctctcaatgaacactttctcttttaatgtttatggtgaagtctctggatctttgaccccaactcgcggtttacgccaaggctgccctttgtcatcatatttgttcctcatatgttctgaagggctctcgagattgttacaatttgaagaaaatgaaggacggttgaatgggtttaggctcactagaactgctgcaccaatttctcacttgctcttcgctgacgatagtctccttttctgtcatgcaaatgaaagttcatgtctagctatcaagaaagtcttggacatctatcaccgagcctcaggccaacttctcaaccacgacaagtcagtcatgtctttttctcccaacaccactttggcttcccaagtgttttttcatagacatctttcaatgcccatctgtgaatgccatgaaaaatatttgggtctaccatcttatactggtcgagacaagcaccatctgttcagtgacattaaggagaagatttggcgtctcatgcacaattggaatgagaaactcttttcagctggggggcgtgaagtgcttcttaaatctgtggtacaagctatccccacatatattatgagttgttttcgacttccagcctatgttggtaatcagctcgaatctatgattgctaatttttggtggggatccaatgaaaacggaacgaaaatacattggcgagcatggaacttattgtgtaagtctaaaatagagggtgggatgggtttccgttcttttgagcaatttaaccaagctttgttggctaagcaagcatggcggctgttggagaaaccagattcacttcttggcaaattactcaaaagtcgttacttcccacacaatgatttcttacatgctcctcatggacatagcccctccttaacttggcaaggcatcatttggggacgtgagttactccttaagggtttgcgttggaaaattggtgagggaagacaaattcgggttgcacttgatccttggatacctggcagtaatactttcactcccactctcttttctggtccagctgatgcattggtcagctgtttaatcacagatgaacgtgtgtggaatatacctctgctgcaacaatggttctcgcccttagatgtggatcgaattttgactctgccacttagttttttccagcattctgatgctcttgtttggcactacactactttaggtgtttatacggtacagtcggggtaccatctcgcaacttctctagctactgccagtgctaataattgctccagttcagtctctcaagcttcatggtggaagtatttttggtccttgcagctcccccaaaaagtcaagatcttcgcttggcgggttatccacaatgctctacctgttgcaacatctttggtaaggcgcaagatcatcacggactccacctgttcagtatgcaaatcggcgtgggaatcaattgggcatgctctatttgggtgcaagtatgcaaaagctgtgtggcgtcacatggatctagtttttgactggagtaaagattctgcaatgtacaagggtgactatttggttcatctctcatcaatctataaccaacaagagatggaacaaattatttgcacactttggtcaatctggacagaaagaaaccgagtggttcacggctcttctgcaaaaccagcagcaatacttgcctcttttgctgttaattatttatccaactttagatcaacaacaatgaaatatcatgctgcagccacctctgctcctcctctgcctacacacgcaccagctgctccaaaatgaactccaccaaatggttcagatctgaaactgaatgtggatgcagccctggatgctaaccgaaacattattggagttggggctgtcgttcgtaactcggctggtcatgtccttgctgctatggcaaaaccaattgttggtaattttgcatctcatataatggaagctaaggctatgtttcatagtcttaattgggtttttcaactgcaattaccaattgctattgtggagacagatgcgcttctggttgctaatgctttgcaatatggatccgatgcaatttctacatatcatgatattttgttagatgttactagtcttctttcctttttcccacaagtgaatgttgtccatgctaaacgctcagccaatttggttgctcacagtttagctaagttcgctttaggggtggaagagacttgctcttagttagaggatttacctctaccgttttactctgttattgtaaatgacattcctgtttaatttataataacaagtatcttttcctcaaaaaaaaaaaaaaaagaattgtatccttcataataaaatttttttgccttcttggcaactttatgatgaagccgctaattatttatgggaatatgagcatgcttctaacactggttgtaaaattgatatttgtgcttcagtaggtgatgaacaggtatcctctcctccgtctagatgctggaaaattaatactaatgctggtattagcaacactgcaaagaaacatagtctgagaatagtggtcaaggatgattgtgacaatataaaggtcggtttgattgttcccattgtgggaatagttccccctgaagttgctgaagctaaagccattttgactgctttctcctggttgcaggcgacaaagcttcctgtcactgttcttcaatcggattgtaagagttttgttgacaaaatttatacaactaattgtcatagttctgatattattaattgtatttcttttcttttcaataaaatttcaggtttgtaaaaaaaaaaaaaaaaaactataaagttatatttattaaatttaattaacctaattaaacaaaaaaaaaatattaccataagaatagatatttgatagatcgtgtaactaaaccactaatggattaaaagaatagatattttaacttaacaaaacaagccataatccaatttaatatagctttctacactttttttttgaaggaaaatggtcaactttattggaatgaactttcaaccattacaatagataaaagatcagcaggagcattactctcactgaaaatacgatctgaatacaaacaagagctacgagcaagacagt

SEQ ID NO: 15168 - DNA, 9080 bp, Cannabis sativa
  modified_base (5807)..(5813): a, c, t, g, unknown or other
ttaatacaatttttttagaaagttattcctataggatttttgaatgcgatttaagttactacattaattgcaataagaatttctatataaaattctataaaaaatactaaaaagaaaactatttagaagtgtaaaaattaaaaaaaaaattattagtatatttaaattatttttttaaaaaaaatttaataacttataccaatcaaaaattatgacgtgataatttaattcattaacaatcagtacgctacaaaaatttaagaattataacttacctattaaaacttagctatactgcaaattactctttggataagaagcaaggttggaaataatccccctagtgagaaagtgaacggttatgatcttttcacttcagttgaatcgaagttgaatcgaacggcccataagtttttattaagtttttattatttatttatttatttattttctcgtccatgtcaaatgctggtttctccctctttttttttttctatgtttcaagtttctagtaacctcaccctcataatatatatttttattttattttctaagacagttaacctatattcatacaaaaatatttttacacggataaacagatacagttcgtacttgtagatatatctttaattatatatgtttattgaatttgggtttcgctattgaagttcggtgatgccgacgattgagtatatacgccccgtaatttataagaaatttcatttgaattcgaactctagtttccaagattggcatggattgggattccttcgtgttcagtctagagtttttcatcgcgacacgaaatgtttggttcagaattcggtatcgttcccgtcgattaatgccttgaagatttcggataaattcgggctctggggaagtcacctgagaagtaataatggcggactgaggaggtttaggattttggcgagtggacaggacagcgactcgggagaaaagagtgaagcgaagtcgagcgagggccaaggtgtgaataataagccaccgaattcgggctccaatcggaggagggagaagcagcaggggaaaggtaactggtggtggtccaaaggcgggaagtggcggtggcagcccatggtccaggctcaggaaattgggattttgcttcttcaattggggattgtaatttttgttatgaggttgctccgacccgggattccgttgcccggttcagagccgaggacgccgaccacttttgtgagtgtcccttacagcgattttttgagtaaaataaatagtaaccaagttcagaaggtggaggttgacggagtacatattatgtttaagttaaaatccgaggctgctagtcaggaaggtgaagtgaacagtggtgttatggctggtagtaagttgcaggaatcggagtccttgattaggagtgtggctccaacaaagagggtgatttacacgacgactagaccgactgatattaaagccccatatgagagaatgcttgagaatgaggtggagtttggttcgccggataaacggtctggtggattcttgaattctgcattggtaagccgtctgttttggtttgtgcaattaaaatatgtttatagataagaacctcctagtttgtgttttggcctacaaaatccaattttgaataggtttaaagtttgtcacttgagttgatattttaatttattgctcagtttgctgtaactgaaatgaactgtgctttatttagtaatccggatagaggatggaatactatatttatgcaataaaggcctcatgcatgttgagtttcaactgtctctgcccttttgcagatagcgttgttttatgtggctgtgcttgcaggacttctccatcgctttcctgtaagcttttctcaggtatgagctagcatgccttttcttgtgtccttcaaactaatacctaaagcctacctggccaggaattttgaagagtggggcttcattctttttttcttctgttagatgttgtaattatcttaagagttttcatgcttgaggcataactttagatttttttttgttttttataaaaaaattggtacgcaatactaatacattttcttagccattttacaattttataaaattgtgccaaacttaaaacatgtgactataagaaaactttctttatttctttcttatttattattttttaacaaaattaaaagttacagctaactcagattataaatttgtggcataaacaattttttcaagtattatagatttgtgggaatattgatttttaaaagggctatgggatttacttgccgttttttaaaatttccctcaaattttagtggcacgcaagcctctaattggcctttactgggtacacgcctatgtgttctcacatatcgttaaatttatggttttgcacactcaacagcatactgctggtcagattaggaaccgcaaatctgggggagctggtggtacaaaagtctctgaacaaggggaagtaatcaccttcgctgatgtcgctggtgttgacgaagctaaggaggagctagaagaaatagtggtatcttggatattattacttgttataattatcagtacccaaagtatatgtatttattcttccattttcttccttgtttgctgtcccacccattcaggaaatatatttaaattctgatgtttattggctaggaatttcttcgaaatccagataggtatgtacgacttggtgcacgtcctcctcgtggggttcttctggtgagttttagctttagactgattagataattttggtggtatgatgctactagtggaaagtcacggtggtatacttgatttttttttttgcaaccatgtgttgtgtagtgaatagagaacatatacaattagtaagtttgattttgtttaccttacaggtgggtcttcctgggacaggtaagactcttcttgcaaaggctgtggctggggaggctgatgtcccttttataagttgttctgctagcgagttcgtcgaattgtatgttggcatgggtgcctctcgtgtgagagatctctttgcacgagcaaagaaggaagcaccatcgataatattcattgatgaggtcagaaccagaaaatgttatagggtacaatcagattccatctatgcagctctccactgacagacttgtgttttctatacacagatagatgcagtagctaaaagtcgtgatggtaagtttcgcattgtcagcaatgatgagagagaacagactttgaatcagttgcttacggtaagctcctggcatttttcccctctcatcaaatgtgtacaaatttttgatgtccaggtgagacagcatgttagaatttgtattgcaggagatggatggatttgatagtaattctgctgtaattgttcttggtgcaactaaccgctcagacgtcctagatcctgcacttcgccgaccagggagatttgaccgcgttgtcatggtttgtatcataggatgcttgatattgacatatgatgtgaagttttgtttttccttatctctaaagataacttgcctcacatactttttctttttccacttttaggtggagacacctgataggagtggaagagaagcaattttaaatgtgcatgtttctaagaaagagcttcctcttggtgaaaatgtcgacctcagtgacattgcatctatgactactgggtttacggggtatattttctctctttttgccatctgctcttcctgaagaaacaatatcagagaccctttttttttttggctgaactattgtaattcgataatattgattctttgattttattcattttcagggcagatcttgcaaatctagttaatgaagctgctttgttggctggaagacagaacaaagttatagtggagaaagttgattttattcaagcagtagagagatcaatagctgtaattttctttttgcaaatgtgtgtttgtgagtgtgtataactttgatgctgtgttgatttctttgttggtgttttaattttgtttgactccctccccttttatggtcaaaacttaaaactgcatgataattattttgagtatgttgcagtattgtcactttgagtttcatagctggttgatgatattaaccctctttttgctgacctcctcagactgcttattcatggttcataccttagaagtttttgttttctgaatttacccagccatttggttgtcaatctggttatgtagtttgatctatcagctgattaaataattttcagagcactagccattgccaattgttacattcattatcaaatgaaaaatgcatttattaattatgtttagattcagcgcatatgcttttctattggtttttacatgtgtgtgtttacaaatttagaatcattgatcactgagttactagaagaagaattgtaatagattgctcattacagggaatagaaaagaagactgccaggttgcagggaaatgagaaggctgtagttgctagacatgaagctggtcacgcagtagtagggaccgcagttgcaaatcttcttcctggacagccacgtgttgaggtaaaattttgtttaattttgctagcatgttgtctgtgaagcaagttgtatgaaatatgttataagctgggtcattgtatctgaaagtctccatgattcttagcttcaggcttagtttctttatttaagtgactatattgagtcctatcaggaaacctaggttgtagtttctaatcttgtcagaaaataatgatgggttctgggagaataaactgattaattgctgtggttatttaaactcttcagtttagtcatgaattgcatattttgtggtatagtaggaccattcaattttgaaattgagccatccattcaaccctctcagcttttaacttcatttttttgttctttttgtttatcagaaattaagcatattgccaaggtctggtggtgccttgggatttacttatattcccccaacacatgaagatagatatttactctttattgatgagttacatggtcgcttggttactcttcttggtggacgtgcggcggaagaagtcatctattcaggccgtgtgtcaacaggtgctcttgatgatatcagacgagcaactgacatggcatacaaggcagtggctgagtatggtcttaatcagacaattggccctgtgtccatagctactttatctggaggtggaatggacgagtctgggggaggtgttccttgggggagggatcaggtactgttattcttttcttttttcttcttctttttcttttttttaataaagtttgtatccttggatgttgtctttgacctgcttgctaaatataatgactcaacactgaacttaacaggggcatcttgtcgatttggttcaaagagaggtgaaattacttttgcaatctgctttggacgttgccctttctgtggtgcgtgcaaaccctactgttttggaggggcttggtgctcaattagaaggtaatgtactgctgtaaatgcaaattgcaattgttctgttttcaatccaatactagacaagaccaaagtgtgtgaaataaataaataactaggtgtttttgcagaaaactaaagctggtgggctttattgtagtagatagtgaggttcgagcttaaaaagtgaatttaacattgtctagttatagattagtggaaggcagaaagagtgggaagtagtagaatggaggttgaaaaatctatgctatcttctgcttcaaagccaaagattgttcagactttgaaaggacattaaaaaaaaaaagtaattttaatataaaattattattattattannnnnnntattattattattatttcaaaatgggcaaacccctactgtattttgagaatctgggcattgaaaagtaaccttcttatataaatgattaggaagcttctcttacaagtttgagtcttcattggtagaaattcttagaaggtcattagcctaactactctacactaaagagttggtagatggttcgtagaatatcatagttgataagcatgggatatcattattgttatggtttctaatttgtgtaagttacgtgcttttgggtaagtaatagtattaaggttttgttcacaacattacgtgtagaaaatgaattgttgacaaactttccatgtctatatctttccactctgctttggattagttaattctatagttgaaaattagtcagtacactaaaaagttcctcaggtaatggattatggatgttatcagtcaagtctagttgtatgctgtctttgccagatcattgattaagggctgggtgaattgagactaagatgtctgtaaaatgcttttcctgtctggctgtggttgtcaagtcatagtgttctgatagtgttttcttctgcagaaaaagagaaagtggaaggtgatgagctgcaacggtggttaaactcggtggtcgctcctacggagttgtcattattcattagaggcaagcaagagtctcttcttccctttcagagtgaaactgagattaaaacaatttcgtagctgctccccagttttacatgaaacatggagtaactcaacagctcttgtgtttgccgtgtcttcgcaataggcatcaactcacccatacacctgtatatctcggtatagcgaattttggctttcatttcttaacataaaaaacctttgcttttcatctcacaatttcccagcccaaccaaaagagtggtgggaagaattcgaagattggcatttgcaaagctctctcaagtgtttgatactttgtaggttgtttttttttttttgaattatgatgtacattaactgttacggaactcagcagatggatccggatgtatacaattgtaattgttattcagttgtatactatattattatttgtgaaatatatgactagctttaggtacaattaattttctgcttatgcatattggtcagtctttctgctcatgtaagagaaactgttaattaaaagttatatgaccagagacattgaaataggtttgaaagttgttttgcaaaaaaataataaataaacaataataataaaataaaataaataaaataaaatatttttacaataataatattaattaaattgtagctgtaggtaagttacttgctcacaaagaaacagtacttgccgcaataaaatggagaaattaaaaattcactcaagagaattataggtggtgtaaactcactcaagagaattataggtggtgtaaactgagaattttagaaactaaataagtgagagcttcaaaatttaaataaaaatttagaatgaacgccaatagagcttcgactcaagtttcgtcccctttgcatgaaggggtagtaggatttatataggctagagtttgggttcgagcatacctatgaccaattcgggttttattgtaaaagcgagcccgctaatggggtaaaatacatagatacatgactatgaggcctgctaaggatatcaagctcaggggacgacgattctgtacagatgaggggatcgtttggtgcaggacatgtgttgcacgaaggtcacgcctagcaaacaaaggtgtcaggggagccatcgacaaaaggggtgtatgcagtggtggtgcgcacactaccatgatctgagataggggacaatatctgtgtcagagaggcggacatgtcattttaagggagacatccgcttctcgtatcgcggtagacatccgactcttgtttcatggtaggcctttgagcgtcatcttgtggtaggtgtccaagaatatctcgcatggcctgtctccaggtgtgcccttatcttcattaggaggtcttcactcattttgtgtcccagaaggctagggaggctttcaagcccctcaacaacattatgtgcctgaggcgaagttctaggtcttcgttaggcttgggcttgttctaggtttggactagccttctaagagtgggatagctcaagtccaactttaagtggagattaccttcagattatgccacgtctatcttctggaaaaacaaataacatttaccccaagcttttgaacttaagagtggcagaagcttacaacattccttccggaagaccttggagtcatcaggcatgtggacaattctaaaattagtagaagcatttttctctttttgacattcggcagttgaagagtcaagaatttgcttgaagatcaactagcaccacatacgtgtctccacttcttgggttcgtgagtgccacatgctctgggaaggtgtgttttgcccgaaacgatggaatgacaaccatttaatgccagtgtggaccccgaggtgagtattaatgatgaaaaaatatctcaattctcataaaggaatttaataccatcccctcaattctctatccgttggatcgcaatttgtgctttttctagggagatcttacccttgattttgaagcacgtggattgccacttttgcctatatataggcgcgagaaaattactttcaccattttttacattttcaaatttttgagcttttgccttcgaatttgaatgaaagctttttactagagaacgattcctagaaaaaatctcagaaaattcgagcttcatcctttggtgaatgaacgatctctttgacattcttatccacctcttactacgaatttgagcgagggagtttccaggagcgccgcccctgaatccttttgtgagccacccctagtcatttgaaacaactgacgttcaagtaggttatgactagattctttatggggctttcaatttctaggcccaccaccctcaccttcctctgtacccgcatcacattacgagtaagtatttctaaatcttggaacttcttaactctataccgtgataggaatttatattcgaatattaatttgagaaaccactgtttgaatacgaaaactaggaggattgaataggtagtgtttggagctaggcccacatcttatgcggagcccatatgctattgcaaacttacttcggcaatattttcgcaacaattcaaattgcacccttccaactcatcctgcagtcatataagctcctaaagggataaagataaaactgcaaaattgc

SEQ ID NO: 15169 - DNA, 2685 bp, Cannabis sativa
agtacgtttaaaaatcacgtaatgcgcctaagatagttagggtgttacagatattctaccatgtgtgttgtcataggcctgacaggtggcaaaagagagaggatgacttagttatcatgagggttattttcgagatttgtcataggatgagcagtagtgggaattataatatttctttagcaattcgtaccaatcttcaccccataatcattctgcaaaggggaatttagcttagccaccctaactgtcctttttgtacgagacgggaatcagccaatgggatcgttgggcaagtggtccccgcatcagtgtcaccaaacatatttctcttctttggctattctctgtgaagatttttgaaatgagtcataagctcttcaagaacagttattatccgattaagtatcaccgatgtccttgtgtcaaaaaatctcctaactatggaggagtgtttaatccacgagccataaagagggaaggctttacccacaggaagaaaagcgaatgccttggattttttacaagaaccaaaatcatgaaaagttaaaatatataaaaggaagcttacaatatttaaattgtatccactcatttctatttctttcaatactcagatggaatcctgctggaatttgttgcaagagaaagacctcgacaagaagttttaagaatccaattttagcaataacaagctgagatggtttatcaaacttgatgaagtttctcacctcaactcctataactggagcattttgccaagtaaaacacggtgtaaggagaccatggtcctggacccatagtcttgctaatgacatatctaacccttgacacaaaccatcttcgggccactaacaaattaaggttaagaatctgacccctaagcatccaagaacttccttctaatacctcctctttgtccttagagaaattgaagaaaataccccacaaaccaagccccaaaagtcttcataatctagttgtcttttagtttctagatttttgagaggaatcgctttactctgccatggacaagggtttcttgccaaagcatttagcaagctagaatactattttgttacaacatcagtgttgattttaatatcaacttctagttccaaagtagtttctgtcaagaattggagtcgaagctacttaaaatattctttagtagcacccttttccaaaacctcaggaggagttttctttgttgagagaatcgttatccatgacagccgcaacggaacgcacagaaatgataaaagtcaatgttggctcaccaactccagagagaatcgttattgctactattgttcttaatgcatggtgaaagtgattcccgctctaaatagtaacttggcaacatcgatcacacttttttatgtctttaaatgtatcctttcttttttaccgaataataaacatatggtaaaagtatcacaatttcaaagaaactagaaaatattttgtgatatgagtattaggcctaaaaaatattatattgatgtacatttagtttttaaactgccacaccgcactatacagcattgtatatttgcggtgtagtttatgtagtttttaggtcatgtagtgcggttgcggtttcaaaaattataaaaataacatatatttttggtttgaaaagaatagctaaaactcacatcaccccagcactgcaaacacccctactgtttaaatttgtttattgcatttttttgcttaatttttattgaatcatcttaagaagcaaattctacataaaaataatgtgttatgaatgtatttaaatttatgaaaataaaagtgtaaaaatttaaattcataaagtttttgattattttaaacataaacgttttttattattttattttttgacttttagtcctcatttttatagggaaaccaaaaaaaaaaaaaaaaaaaatcttttatcccatttttttttaaaaaattgggataaaaaaaaaacacgatgaaaattaaaaaaaaatggaatttttttttttaatcccagttaagatatgaaaacttagataaaaagatcattttttatcccaaattttttaataataagtgggattaagaggtacttttttatcccaatttttataagattttttatctcacatgcatagagcctgatttttattttagcaaaattgggataaaaagcccttaaaaactaagataaaaggctccgcttcttcatgagttttgacacatttaataattgtgttttgtgtttaccttaactgttgtgttaacgtatttaataatcttgtcgtgttataatcgtgctgacatgatgtaacgtccccgcttcaagctttcattgggcccttacactcacggactattggctcttatacacgagtacggcactctggctgctttatggactgatgactggccctacagattaacacgagtgtttcccgcgtgctttgtcctcacttacacgcttcctgggaaaacttcccaggaggtcacccatcctaaagtatcttaaacactaagagataaacactatcgtaaagtatcttaaacacgagtgtttcccgcgtgtttaattatgagataagctagttttaccatttgtaacgtccccgcttcaagcctccatttgtaaaactagctacttttgtgatacttttgtgattacacaataacgtccccgcttcaagcctc

SEQ ID NO: 15170 - DNA, 5276 bp, Cannabis sativa
ccagaaagtgtgggccctaggcacgggccaatcacgcctatgcctagggccggccctgtgtgtatctatgaattctaaatcttatcaatagacatacatgtatatatacacttcgcttctaactgtagtattcatgttaactgatattgtttgctgtgtttttattttaattttcttctttagaaggaaaaaaaactatatgtatattacaatataacaaagaactctgtttagttaattaaataaattaataagattttttggaagcaagaactctctgctctagttcatacagttatatataatattagagttaattacacaattaattaatgataagaatcataagattagtgaagatggccaagaatagtttcgaactatatattaaaaattgataaaatttattagcttggctggcttgttttgtttgtaaaattttatgatgaaaaatatttgttaatagaaaaacaaatatttgaatcgattcctaattacatgaaattgatttgtttcgaaaaaatttactctaatctactatacctgatcaaaaagtcatctgaatattagcaccaaaccacctaacattttttttattattttattagtcattatttattttatttttattttttagatagaaaattagtatggtttggtttagtcaatttatagaaatatattttaatttctaatagtacagattaacttgttttaaagtatgacgctaatatggttcatttggaacgtcgtattaggtcctactgtattgtattatattgaattggattacatatcatatttttatataatactatgttaaattttaatttatactaaaatattatatacttaggtatctataaaagttgataccacatatagtcttacataaaaatattacataaaatacaatttaatataatactatacaatatggtgtaatacggcgtaccaaacgaactctaaattaactaatttttttttgttaccaaatacaatcaattacagttaaattttctttgacgattataatttacaatattatttttgctggctaatttacttgggagaggcaaatactaattcgattataaagatacttagatggcgtttggttagaaagaatgaaatggaatggaatgaaaagtaaaacacttctattcttttgtttagttttttttttaaagtattggaatgtcatttttattataactatgttttcacttcttgcaaccaaacaccacctaatggggtgtttgttatgtgagtttgagttggagagagtagtgttagagggagtagacttagagggaatatgaaaccatgcgtttaaggaaattaacattaccactattttaattttttttttttttgaaaaataccactttattaaattaaaagtgagacctatttgaaaatgcaaacttcttctcattcaaatttaatttaaattttacattccattcccatcaagtctaaatctcttaccaaacatccggttaaagttttctgtgtcggttcaaaattgacaattgcaaaatcattttttttatacctttagcattgattgtgcaatgacacaactaaaaaaaattcaattttgggcacaaaaaaccccaaatcagatctaagaaaaatcaaataatacaaaatattcttcaggattacacatgccttttgttacaggcacactactgtttcctcaaaaataaataaataaatattctttaggaatatggacaataaagtttattttgatgcctgttagctagagctgacagttagttaaaatgttagctctggttgttattggttagtcctagtcagcttgtgtgttcatagagttagttggattctgttatggttagtgtccaatgtatgtaaactctactgttacattgaatggaatgagataatctttgctatcttcatctttctctctctttattcttctcccctttctattctgttctttttgttttgatgttcatcaatggcaagaatttttaacatggtatcagagcactttccaccccttggggctaacatggcgatcgtgggaaacgatgttactagtacagtggcaaatggatcacaatctctcaacaggcaacgtgcgaatcaagatctagtgttcttcaatcacaacatctcgatccgtttgaatgatcacaacttcttgctgtggatgaggaaatctgcaattcaccaatattggacaaggtcagttcagtaacagaaattacatgcgtgctaatactcagcctcgaactctaatcaaaactttagaggtagaggtaattttaatatgaacaaaagttgtagatctggtataaatcataataacatgcctcaatgtcaactttgcttacattttggacatattgctcaagattgtttctatcactttgacaaggctttcttaggaccttctctaggtttgacaagttgtagtactcaaccttctactccagcacacataaaatcttgcaacattgggcaactctattgatgctagttggtacccagattctagagcgacaacccactacactccacaagttcagaatctggcaaactgttatgactatgatggtcaggatcagatgtatgttggtgatggcttaggtttttctatgaaacatattggtcaatcatatttctttcccaaactatcctctcatcctcttgcccttaataatttattgcatgtacctgaaataaccaaaaacttaattagtgtctcaaaatttgctcatgaatttcgtgaatgtgttatgttaggccaagttagatcattctactttgttgatggggaggcacaagaatggcctgtattcttttgaaccatctcaattctacattgtatcctcaaaaactgagcaacttgtgtcactccagcaactcaagcctaatactgcatccctgcatcaaaaagcacctttgttgtcaccctcaacaactctaaagctactgtatctagctgtgtaaaatgtaactctgatgttgaaaataatttcactctatagcataataggttagggcatccatctgagaaaaatgtacaaagagtcttgcaatcttgtaatattcctttaagtaataaaatttctcagttttttcaatatgtttagccgacttgttgtcttgggaaaattcacaaatttcccgttcctaaagctcctaatactgttatttcagaaccattacagttggtggtttctgatatatggggaccttctcacacaatttctttcaatggttgcacgtattacactcactttattgatgtgagtgtaatatttgctaaaaacaaaaccagatgcattcaaagtttttataaactttaaatctgaagtagaactcaaaattagtaaacccctaaaagctttgcaaactgactgggggtgaatttagaacattttctagttaccttacagattatggaatgcaccatagacacccctgccccactacacgccaacaaaatgatctagttgagcgaaaacataaacacatagttgagattggtcttgctttattagctcaagcttccctaccctcaagttttgtgatgaaggtttcagggttgtttacattcacaacaggttgcctactcgagtgttaggcaaaaaatttccccttgaaacccttttcaacatcaaaccagactacacatcatttaaaacatttggatgcaagtgctttccaaataaaagaccatataacaaacataaacttgaatttagatctgctccatgcacatttttaggctatagcctcaatcacaaaggctgcaaatgccttgacaaacatggcagactctatattttgcataattttctttcccctatgggcaatctagtgttcaaacaagccttaattcctctcagcaaacaacaacttcctttgtgttagctattatccctatgtgtcctcactttaaaccaccatacactatgacagatctactaaacaccaatacagagattgaccaatatgttttaactgacactaatgaaacatatatgcagccaaacaacaatactcttgatcttatgtctaacagttggcatccaagtcaaccatctgtgtttgatgtgaatcttcaggatcatgggctaatatgcctaatgagcaccctgcgtctaatgagcaatctatgcctgatgagcagcctatcttatatgatctcacactagttgttccaccaaagttgcatatgccttcaattctcagcagcactccactgcaagcagacgctgcagtgtgccaaaatgctcctgaacagcacatgcaacaaacacagtatgaaaaccaagtcgaagttaggtattcacaagacaaaaacttacttattagtttccatggttcccataacacttaagaagcattacaaaaaatacagtggaataatgccttggctgatgagatcttagccctaacaagaaacaaaacatacaccctagtaaaacttccaccaggcagaaaggctattcgatgtaaatggatttacaggattaaagaaaatcctgatagcactatcaacaagcacaagacaagattggttgccaaaggctttcaccaatagcctagtttcaattttactgaaacattcagtccagtggttaaaccaataactattagagagcaaagccccttctatcgccatggagatactgttgctaccatggaagccctgtcgttgctaccgcctaaagaaacaattaagagaacgattaagatatagagctttaaagagtgggagagagatcattaaaagtgagagatagcaagagagaaagagacagagagtgattatgagaaatagagagatctcagcaactgtggtctccgcaaatttgtgaggaggtacatggcacgatagtcgaggagggacaaggatggtgcgagtgaccttactgtggttgaacgatgatgactcatgagagagcctcagtctagtgtgagtgacatgattatgggcatggcgactttgttcgtccgagggcagctcagctcagctcatgagcttagagatatatatattaatatatatagcataccaaatttattgtggtcttcgcaactgtggaggaggtacatggcgcgatagtggaggagggacgaggatggtgtgagtgacctgactatggttgaacgatgatgactcatgaaagagcctcagtctagtgtgagtgacgtgactgtgggcgtggcaatttcgttcggttgggtgaagctcagctcagctcagagagagagagagagag

SEQ ID NO: 15171 - DNA, 10683 bp, Cannabis sativa
ttagaagttcatgtttaggatgtgaaaaacatacttgttattaaatctaggtcctgttaaaatatattccaacacgtactctaggccacggagtgacctccgctctggctgggatcacactacggaagcaccagtttcgcagccgatcattccactcccagcaccgcagttttgtctacaactaatactcaaagactagttggagacgacaccgaaatccaaaatctgcgagaggcactgaggctcatgctaggtcatattaacactttgcatcatgataaggaagacctccaagcagccataaatctcgcatttgacgaatagaggcatcaattcataaaatggaggaaccgagaggtagagattatgaaggctctacaggcatccattgatgatcgtactaggcaggccaccgtactgataagaagggcctactaggtcactaatcaacaatcgactactaaatctagtattcccttaggcagattagaagggtaagcagctgggcataccacacaaactcacaacggtttgccgtccaatccatggccacaggtccaaactgtgaaccaaacggtagacggtcagatcctgccaaaccattctttgggaggagttcacataccaatcactttagtacaactaaagtttcaagccaacctatcggccaaacaagtaagacaccaaggccacctggtacctcagtgtttgataggtcgggtgccacacatgacctcaggactgatctaaatcgcagtaatttttttttgttatttaatattaaactggatgtatataagtaaataaatattatatatatttctaaaaccttaaatttatttatgattataatacacgatcgttggtcggtttcggtttttttggttggttcgttactgatataaaaccgaccgttcaatggcagtttcaaccgttgttggtttttttgattttcgattaaaacggtttcagttttaacagtgttcggtaggtcggtttgaacaatttttttaattttctgaattttattctcagtcctaatgttcctgttatatatgggtggacaatcaaggaacatatgtagcgactaaccatgtcttccctggaaggtttaagcaaattgaaatagatcaacattttgtgagggattagatcttaaacaatgaaattttagtgagatatgttccatcagtagaccaaatggctgacattcttactaaatctcttccaaacgataggtttcattatctcaaggccaaactcaaagttgtaaacacccgtttcatgagggcatgataaccattaccgattagttagttaaatagttagttggttagtagttagaattctgttcgtatcttacctaattctgttagtaacagaattcaaatcttataaagactttggcctataaataatattttcccctctcatttcgatgctatgattttctagcatcaaacagatgttttcttcttttttctctttgttaacttgttcaatataaattgtttaacacacaacacaaaaactaagtaaaggtttatgagtttgtacactttcttggagccgactagtttccattctacccaatggtatatcaattggcatccaaattaattgaaaggctcaaaaaagaatggtgatagctcgatatatctttgaaaaattggccactgcaactaagagaaaaaggttagagagagaaagagttcttcttgcgctttgacatgctttcgggcctaacaatacgactttcacttgcatccttatgttgacttgtgttacccagcgttatattatataactattactgaagaaattccttacctttttttttatcctgtttaaggctttcaattctaagctaaccaattaaggttattgaggaacatatatttcatttgtcctaactcctgaagtggagaataaccaaataaaattgaccaaagctatctcttgtaaagtcaaagcattagtggacgattgtacccctgcttcactataatcagttatttatactgtgtggtctaatgagtaattacctaattaatgctagctaatattcattttttttctttgtacagattctagaattattgcgaaacgagataaaccggaaattaaaaattaattaaactggaaattgttaatgaaaaaggaatcaaagaaaactttatcgaagtctaactcaagcgtcttgaacttttgaaatgaattttaagcctaataatcaatagaagtaataataacaataatgcatgtttaccagcttgttaaaagcatgttgaaacatcaggtagagagcaagacatatttgtctatataaatcacactagcttgtgtttttttgtaaagtaccacgaatctcacaattcatcatcacttgctaataattctctgataatatatcttggttttggtaactccaatttatatatatatatatatatatttatatttatagtattaagaatacgagatcatggctttgaaccaagcttcgaaagggttattacttctcctatttactgcttctctattattagcaatgggtcaggccaagaccatcgtggttggaggcaccgaaggttggcgtttcggctttaactacacagattgggctatccaaaccactccattctacatcgaggacaaactcggttggtttcataattttgttttttcgatatattgcaattgatttattataactaagtagttaatacattattctacaagtacatatatatatatatatatatatttatatattaacatttttgttgtttacgtttgcagtgttcaagtacaatcctccaagtgagagtaataactcaatggcttacggtgtatacgaactgcaaaacatggggagctacttgagttgcaacttcagtagtgctgagctaatagcgaactcgacgcagggagggggcgacggctttgaggtttcgctgagcgaatggaagccttattactttgctagttacggggatgacggcagccactgcaacgatggccacatgaagttctctgccgtcccgtggcctcacaataataattaacctttactagtacctattctatgctatgctgctaccatctataatttatttttatgtaatttttaatcaataatattgcgtgtgtgaaataattacatgagaaaaatagagggggtttccttatcctttttgtttttctgggttttatgtatttttgaaggtttattaattatgatgacaattgggagagaatcttaatatatagaatattgctgatctgtattgacaattatttcccttcgtatggttttataacaaagagatgtttaaatagcagggacaaactctcccactaaaaaatcagctaaaaaaaccaaatacgcccttgcaattgtatggacaattttatttactgaccgcttaacataagataaaacaacattgtgtaaagaagataaaataactttgcaatcctgaataattaaagcatatggagaagccatgcttatattactttgaatcgcatgaattatattagcatagtcggtttccacctccactttgctttgtccccttgttttgatccaactaagtgtctccttgaaccaacctcagccatatatttggtcttacctggcccttccagctgcaacattttgcctcaattaacttcccattttaatcgagacccaaagtatccatagctaaatcttccctcaattgcaaatatggcaacatcaacatcaaccttgatcacttcctcatattttaccaggatcttatttacactaccacaatttggtctttagttacactatttagtgacccacataaatagttttttttttttttttcttgtaaaagaactattattattaatgaatagaatccattacaatataatagagtggattggagaaggaatttcccccaatcaagaacaattattatccaatcgaagagcatgtctagctaagtcatgagccgctatattagcaccacgcttaacatgagaagcgacaactctaggaaagtaggataatatcatcaatcacatcatgataaaaagaaatacaatttaaaggagacttcttgttaatggcatttacaactatgagtgaatcggtctccacaaaatcaatgttcagtccattttcaagagcccaggggagactgtgtatcaatccatttgcttccatttcttttactgagtaccagccatacaacggctttgaaaaagcacccataacatctccaaaaaaatcccttataacagcgccgttactgataattgaaccatcactatcaaaagatgcatcaacatttagtttataaaaacctggtggaggtggtttccatcgaatcgggcctgggaggctagcgttggaaggacttgctggaacatcttgttgaactgaagccgaggacccagaagcatgtatcggatgggcttgagctttatagaatcgttggagatatgtttcagcaaaagtgcagatcaccttagcttgttttggctttgtttggtgtaattccttgtttctctctgtccatatacaccacacaaggcaaagaatcttctctagttcaacattattgcaaccagccgttaaataagaaaagatatctggaccatgtaaatttttgatattgagaggcaagtgattgaattttgcttgggaccacacctgtcttggtctcgaacaagagaagagagcatgaccaaccgactcccaatgataattacaaagtgaacaagctgttgtagggctgattttgcgatattggaggttgggcgcagtggggagagcattgtttatcacccgccaaacaaaaattttaaccttctttggcaaggaaagggaccataatctgttccaccattgtctattcgaatcagatggagaagaatcattcagttttcccaatctttcagctaaatgataccccgacttgacggtgtagattccacaatccgaatggtgccgaaacagtttatcctctcttggattagaactaagaggaatagcaaggatacgatccacatcaatattaccaaagtgactcgcagttaaaggaagatcccaatgtcggtcaggagttatataatgttcaacagtaaactcacgatccccactataagagaacgggagaaatgatgtagtacctggcaaccaaggatctgtagcacaccgaaccttatttccaaaaccgattttccagcgaaggcccttaacgaggaggtctctcctatcacaaatactttgccaagtaagagaaggtaaagtggccttagatgcagtaagtaaatcaccatgcttaaagtatcgagcttttaataccttagccaagagagaattaggatcctcaaagaacgaaagcccaaacctccctccgcttttgattggcaaaggagactccatttcttccaatgaatcttggatttgttggtgtttgaaccccaccaaaagttagctatcataggctcaatttgttggcaaatttttttaggtaaactaaaagagctcattgcatatgtaggtatggatttcacaactgcctttaacagaatttttcgccctccaatggaaaaaagtttcgcatgccaggaattcataagtttccaaatacagtctttaatattgctgaaaagttcttttttgtcacgacccgcataagatggtaggccaaggtatttttcatgtagctcgcaaattggcatacccagaacactatgaaatctattttgtaccaccgcactagtatttggggagaaggacatcacagttttttcagtatttaggagttgccctgaggcacgatgatacacatctaaaactctatttatcgcttggcaagatgcttcagtagcttggcaataaaggaggctgtcatccgcaaataaaaggtgggataccgaaggagcactcctagaaattgaaagtcccttaagattacccaactcctcttgcttacggagtaaagctgaaagaccttccgaacaaatcaaaaagaggtagggtgatactgcatcaccttggtaaagacctctttgaggtgtaaccaaaccatgtacaaccccgttgatgttaaaagagagagttgaggatgaaacacacagcataacaagatcaacccatttggcatcaaaacccatcttagacataaccttttccaagaaaatccattcaacccgatcaaaagccttaatcatgtccaattttaacgttgcataacccaaccgaccttgctttttgttcttgagatagtgaactaactcaaaagctagaacgacattgtcagtaattaaccttcccagaagaaaagcgctttgattctgagaaatagccgctgggggagctgtcttaaatctatttacaatggctttcgagactaacttgtacagaaccgaacataagcttattggtctatactcactaattctcgtaggctgttcaacttttggaattaaagtgatcaaagctgaattaatctcatcaaggttagccccatcatttaaaatctgcaacacacactgagtaacaagaggcccaactatatcccaatgttgttgataaaacatagcggacatgccatcaattcccggggatttatcaggagccatagaatgcagagcatcctccacatctgaactggtaaattcttttagcagaaagatcttcatgtcagcagtaattgaaggagttatagcttccaaagtcgtagtaattgcttcatcgtcggcccccatagcagtaaatagagaagagaagtggctcgatacttcattagccaaatcggcttcagaagtaagggttcttccattgctgtcaaggagggttttaattttattattattgtatcttgacttcgctctagcatgaaagaatttagtattagaatccccacttttcaaccaatcaattcttgctcactgctgccaatataattcctctttttcaaacaagtcatccaaaaaaatttcagcatcaatcatattagcaacatgtgaaggagataaatctcgactgttatgcaaagctgctgaatgtttctgggtagcagtaatatttcttttcattttaccatacttatttgaatgccaactttggagagcattggtacaatctgcaatattttgcagcaaaaaagagattggattttcggcttgagattgagcccagtttgtagctattatctcttgacaatcggggtccttgagccaaaactgtgcgaatctaaatcgactttggtgatgaacctcacgatttgactgagttggaagagaaactacatattcaatagctcgatggtctgagctataaaaatctaagtgagagatgtgggattcaacaaacacatccccccaaactctattaacaaaacctctgtcaagcctctccttaatgagcacaccattgtagtttttattagtccatgtgaatttatctcctttgaaaggaacagctgacatgttgcgatagtccaatattttcctagaatcctccattagactctctcatcttaacagaccccctccttgtcatcattagaaagaagttcattaaaggcccgcatgatcaaccaattcaatggtcattggtggctggtgtaccaaattccttagcatattccaagtatggtgtcttaaatgagattccggtgcaccataaaaagcagtaaaatgaaactttggacagcaatccgatgaaacatcaacatcaaagtggttcattgaataagaatttaaagttacatcaacatcatccaaccataacaacattaatccccctttcaacccctgtgtaggaacttccaaaccattactaaatctaagagaagaacgaactcgattgattgaattacaagataattttgattccatgataaaaagtaaattaggcttcagctgtttgacgagcaacttgagatgtctgaatgcagatgggttgcctaattccctcgcattccagcttatgattttcatggctccctgcggggttgcaaatctgaaacctccactgaagaaaaggataagtcctcattcgaatccgactgggcagaaatagtagtaggagagaccgacaagtaatgttcaaaaagcagtttatagcagccaaggactatgatttggaagccaccaccttgaccaacgtcaatcaacaacaaggagaaagcttgaagaaatttatccaatgcatgatggatgtggctactgcaaccaaagtcattgatgacatgaaaatggcggctctaacatcaggatttataactggatccttagtgtggggagatcttctgcgcaaaaaggaagatacattgagtgagttcttaattagagctcaaggatttataaatctaaaagatgcgtatgctcaagcatatggagtactcgcaatgcattccaccaaaataacaaatgcctaaccttcacagatgacaactccattaatttaccctctgccagctgcttttactactcctacgatatatggacaaagtgcttctgtgcagccagttccaaagctagtttttctaggttcggagctgtacaaactggatacaatgccgctcctggacaaataaaccaaaaagttgaagctctagagttcaacataacctactcacggagtaaaaggagatccgaacaaaaagtgtgaatatcatggtgatattggtcacaccaccaatgaatgtgactacttaaaagatgaaattgaggggttagtacaaaacgaacacttaaccaattgggtaagaatcccagtcatctatccaggacaggcacttgcacacggatagcttttcattccaggccagcagggatccataaatcctcctcaaggagtaggtcatccataagttcttagaatacatgctctaaatgtacaaaccctttagggaacagaacgctccaacagtggaagtagctgcagcccccagtcccagaaatcggtaccctcaagagctgcattgccattcttagatggtcatgtagcaactattttaggtagaactcatattgatagaagtactcagaatgcacaaaagcagtacctaagtgagttgaattaaggcaaagcttgccacttggtacaatcacctgtccagcatccaaggatgatgaatttgcctatgacttttgtagaagacgacgccaggcacatgcgcttccttcataatgaccctttggcaatagaggctcaaatagcaaacaaaagagtttctagaatcctcgtagataatggaagctctatgttatcctattttttgcaccttgatgtggcaatgagaatagatgacacgtgtcccatatttttgctacctgggtggagggaagtattcttagcagcccactaatagttaatcttaatattagtaaaactcagatattcgagcacgatagttaagaagacgtccgaccaagatgcaaacatacccatgccgaacaaagcatgtaagttagaaattctagagatcagtcttgttacttctaggatacgaagacaatccctataattatgggattcagctaaagaatagaggcaatatgtcttagtttcctattctttacattgtaattatagaattaatgtagttttctattttattcattatagattaaaggaaattattcttcatgtattaaggtcccgtccactaataatactcaaaggccagctggagatgacactaaactttagaatctacgagaagcactcgggctcatgcaaggccacaacaatactcttcatcatgatcagaaagatctctaagaagccattaacctttcattcgacgagcaaagacatcaattcatggagtggagggaccaagagatggaaattatgagagcatagcaggcagccattgacaatcgttctaggcaggccaccgtgataatcagaagggcataccaggttaccagtcaacaaccaacaactgaatctagtatccccctaagcgggtcagaaggatatgcaactggacataccacacagactcgtagtggttagccatccaatccaaggccataggtccaaactgtgggccaaatagtagacggcaagatcctaccgaaccgccccttgggaggaattacacattaaaacaactatgctaatatagaggtcttaggccaacctctcagccaaacaggtcaagcaccgagaccacctggtgttgggaatattttacgacgatctggatttactaacaagtaagttaattaacatcctaaatatgaatatctctaaaaaaatgaaattaaacacatacgggtttaagaaaaccttacattggttgtagtggaatataatgactcattccgttcaagatctctagcctttgattcctttgtcgcagagcattatgaggatctaaactagatctctttctctccttcgggtttggttaccaccgtcttacacactatgattgagtacttgactagttatgtgtgggaatgacactctttcagtcaaggtttgaatggtgaagaacaatgaaggaggttttgaaatcactattgaaggtgtctctcatctactagttgtttgagaatgaaaactagatatggtaggttgaatagtcaagttgacaagaggatgagatgagagcatcatgatccttttatagtgtttcaattagggcttagggctgaattatatggatt

SEQ ID NO: 15172 - DNA, 5135 bp, Cannabis sativa
gtatagagaattttcctatatatatatatatgtacatttaatatttttcttccaatagaaaggaaaatggtctcttgaaatttaacctacaaatgacatcataaatcaactaataaaagccaggagaactaaaattcatacacttaatacatttatcaaaatttatagatgtagcaaaaatttctgcaactttcaaaaattaatattgttgctgctgggaaacaaattcaaagaatctctaatctaaaccaagcacactgcataaaacatgatttcacccagaactgtacagtacagtagttcattcctaaggatttaaatgaagttgcatatatgctgaacagaattgaaccttgacacacataactgcttaatactacacaaacaagttattataaacatcaattattatttaaaaaaatgactgcataacacaaacaatgaatgacagaagctgtgtaagagaattcagctacagattaaccaaaaacaaattccaagaaatgaaatatcttatttcactagaaaaataaataactcacaattctttcaactcctgaagatttcccaattcactgggtattaaaccgcttaaataattaccctgcaagtatctgtagatcacagatattaataagatgaaagcacacagaatgaaataaatacaacgtagtgcaaaagtaaaataaaaatattacaagttgtactacaataaagcacaaggttaaatgattagtttatattaaagccaaatatgagtgcgtaaaatgccaaaaatagtaaaatctacagaaaaaaaaaaaagagtaagaaaagatccttgttcgcagagtttcaattcatcaaacttgatttgcatacaatttctactgactatatacttctaaaacaataaccaagaatccatgtcaaaggtcttaggtaactttttttggtaaagaaacaaataatatatattattgataatagagatcattgcgtaagatgacaaaggtattagtagattaggtgctcaatcaaacaaactagaagagaacctttgtatgctagaacttttggaaaaatcattggtatgcggcgaagatggcaaaatgacaacatgaattcatgcagcaattaatatcaaatatacctgacaaattaagactcctttttctccctatatatctatgactctttattgatcagccaacaaattttttttgcatgaaatgtcatcttctttgatagtctatgacaagttgtcaacatggaaacaactgactttacatcaagaactacattcctcccagagagaggaggggtgcaccagtttttgatagtaaacatgagcaaatactcaaactagagaacaaataatggcacttggtacttacattttctccaataaggtgcaatttcccaattctgacggaattgtcccataaaaattgttattatgaagtgctctacaatatagaaataaaaagaattaggaaatccaatgatttcaaacatactgcatacataccaagagaataatttaaatatctgaggacacatacaataatttcaattgcccaagcttcccaaggtcggatgacaaagacccactcaatttgtgacccgaaagactcctgaataataagacaatcaaaatgaatttataattacaagtataagtacagtaaaaatacaaatatgctttcacaaaagctacaaagcttctctgttagtgtaggaacaaatatatatgcataatcacaaaactgtacatacatgcccgtgtctatgtatggattcgggaccaagttgtgcacaaaggcccatgtacatacatataacaataaactcaaaaatttaaaagtaaacgtacatttataggttttgatgtgtgctatgatttcctactctgacaaattttttaaatgacaataacttgtattcgatttccaaattctagaaaagttgtaattcaaaacatatcaaagaactgagaccacttttggtacattgtacataaacatgaagagcagtcctctttagaggtattcccatcattcctatgaaattatatcttcatctctcctcttttatttgtcttatttctaataccaatgtacgaatactagaggccttcttctattatatgtgtctttctcttatatttttcttttacatatatatgtatattatattgatcttgtttgtaaaacactgaccaagattttgttttaataagaaacagaagaaatgatattaataatataaagagaattacaaaaggatgacagttatcatttttggttacagaaaggaccctacaaaaagtacacatccaggaattgaaatcttcaagtaaatgaaaagtcatgccttgggaattacaaagattaagggaaatctcctaaaagtattacaaaatagaagcctactacttaagcaaataaaatagcgaaataattttgaatattttccacccttttctctctaaccaaattgtccagcagagttccataaaattagagcttcacagcctctttcctcaaatgtttttcacaaggaccacagtccttttgaaaaagatccacgatatgactaggactcatgtactggaaattaaactcagcttggctacacaacataacttatatggtaatgaattgctgcaaagaacctcttaaaaatttgacagaagtaatatcaaaagattttgagttaaaagtatacatcaattcaaatagataccacaaaattatcttaccaaaatctcaaacagatgacatcgtgacagataaatagataaaaggaatgaccctcatcccaaaaaggagaaagactaggtatatatatactactgagtcatatgcataagctaaagacgaatatgaaaactgatgattagaaattataaatgtgtggtaatataagcatacaaacatatatatatataggatcttcatctgcgttgtgtatcatataaatgtatacgtgagagaaggacataaatttaaactcacagataaattactctctttgattttggatcacatctaactcctctccaacggcatgggtcaggatcctccggtctccactgaagaaggacgccatttgaactaacaactgatgtcctaaagttcaaaagtgcctcacctataaatcatataaggggtttaatataacaaattgccagttaaaatagagaggtgataatgcataaaatatggacatgtctttcagtttcacttgccaaatgaataatataaaaaacctactgaaaattcaatacaataactataacaaaaatatgtaacaaacatgtcataaaagttctattacattgtaaacatgtcaagagctaaaaataacagtgaacctaaaactaatactctctaaaaaaaatggacaaatagcaaccaagacgtaatctcaccatccggactgatagctctgcttgtgtttattgaaagatagagcagtagactgtaaagccacaagccttgccatttcaccagacagaggcccatagcggtactggtcaagcatgcaatatgtactatacttcatctgatacacagagctttagaatgttttcctctaattgatgttgacatccagcagctagaaacaaagataaaagttcctgaaagagaaaaactaatataaatatgacagcaaaagcaaaaacttattccagaaagctctaaatagattagctccgacaaaatcaatggtaaaagcattcagttgcatacgaaaggttccaaaagcttccttctttttttctttaatcttccttctgttttctctataattaatacagtgcaaatgatatgagaataacaccttccccaagtgtctcaagagctatctcagtaccctatatatgcaaaattaaacaattttctaagaagcgccaagtataaaatctaacactaacacatagctcatgcagatgattatttcataaacttcaccatcagtactgtgcacagtattttcatacccaagactctcaaatgcaccatcagaaaacctcctaagataaaaacgttaaattagacccattcacaaacaaaccccaaccgctcaaagctacaaatgtgtaaatcaaaaccccaaacttttagtgaaaaacctaaaccaaagacatgaaaaacaagaattaaaaataaaaaaaaaaataaaaaaaaaaaaggaaaatggagagtgaagctgtaatagtcaagatttacccagagaaaagtgaaagatcaatgaggaaaaagcaggaggtgttggatccgagtgaaatgcaacaagttgagctgtaaatcagagagaaaagtcagtagtgtagcggttggggaggagcagagcagagcagaagctatggaaaattggaaatgaaatgagtcttcttgttgggagttagagagagaaagagagattcgagtgaagagagagagtgatgggagtgtgtggaaaataagatgggtatggaattaaaagaggcatcacacactaaccaatcagaacacagtagcttacgcacgctgaccttccctacgtgtgcgaccgaccgacgcctctttctctctctttctcttctcttatctctcaccaataaaccacgccatttatagttttattatttattattattataaatatgtaaactaataagtaaatagatgtaatgtattaaataaaattaataaaaatcttgccttgctgtctgtgtctggtttttgttggattccctacagttttcgaatgatgcactttgagcccatattctcttgaaattaagaacataaatgtacgaaaatgacttttgactacatttttagtagcaattcttttaactagtttttaccacacgtgcaaatcacgtgtgtatgtgtacatatgtattattattattattatttattagagctttgataattttttgagaaaatattaggttaattaataaagggaaatttatatttcttactatgtttatttttaatatcattatattaatgccatatattttataatttctttttgaaaataatatttatgtaattttttttcttgtatataagatattgggtgattctacaatgcacccccttaaaagagatgtactgatgcacccttaacttgtttcggtatctagaaaa

SEQ ID NO: 15173 - DNA, 2303 bp, Cannabis sativa
aaagaaggctaagaaggtgaagcatagggagattgaggaggcgtctgcagtgaacaacggcgaggctggtgtctgttctgatccacattcggctcggttaagtggtacaaaacatggtgttggtgatgctaaagatgagttgaaggttccttcaatggtgggaactaatgggaaggctgcaaaagctgcaagtaatggtactgtttctgtgaaaagttcgagtaataatgcagcagccaagcggttcaaagctacagatattgctccagctcatgctaccaaggaagtttatgcatcgattttcacttcttcaaggaagtctgagttcaaggaaacttattcttgtagatcactccctcttggaaggaattgattggtggtgttctgttcttgtggccaggttcttgtactagttatcttcagtatgattgatatttggaaagatacattagtatattgagtttgtaatgtcctttttactaacttgtgtatttgaaccaaaacttttttctttaatgtaaagtattgatttttattgtgaaggatttaataaggcttcttcttgtttatgtcttctttatatttagaatatgcagttcaattctgatgatttttattgtttaatagtctaaattataactgtaaataaattataatctattccactcttcttttttcctttcttgatattgctctacataggtacacttgggttctttttaaaaaaaagggtacttctaaattttcctgtatataaacaccactgtgttaaaatccaaaatcttcttcttaactactctcttcaccccaaaatactcttaccaaggccaacaaacgaaataaagaaatatttccctctctaatcttttttcttttcttttcttttcttttcttctcttcttcctctctgcaaatcacgtaactcaatatcaacaaaacactcgtttgttggcctctaagccgtctcataatagtaaagaaattatccacagtattcgtcactggtcagaaaacatcatttattgcaagatattcttcttctcaacgtcttgaaggggggaaatcttgactttcagagcatttgatgtaaggccacacatctctttcatatctatttcttggtctgtttttttttttttttttgttcttttttaggattatgtgttgggatatgacagattgtagaatgtggatgttttttttttccttctcttgatttgggatggtgtgcttttgtgtctttttttctctctttttccagacttggatgttcaagtagcagaaaatggcagatttgttaacaaatgattcggttcacttcagggaagtttggagagacaatcttgaagacgagtttaaaatgataagagatatattggattattacccttatgtatctatggatactgagtatcccggtaagcttgtctccaccaccagggaggacagggagtatgacatcatgaaggtcaatgtgaaagacacaatattgattcaagttggtttgacattttctgatgagaatggaaaccttcccacttgtggaactggtaaatactgtgtttggcaattcaacttctgcgagtttgtcccggagagggataaatgtaacagagattcgattgagttgttacgccgatctggcattgattttaagaagaacaatcgaaacggtgttagctcttctgatttcgctgctttgctaatgtcttcaggggcagtgttgaataatgaggtgctttggattacatttcatggtagttatgattttgcataccttctaaagctcctttctggtaaaaatgagcttccaaagaaagaagatgatttctttaatattatcagagtctacttccctaaattttatgatatcaagtgtttattgagacgccaaggtttgcatggtgggttgagcaggatttcgagcaatctcggagtgaacagaatcggtacgagtcaccaagctggctctgatagtttgctcacttgctgcacatacatgaaatttatagacagaaatcggagactccctagggaacaacaagtatcactcagtttagcattaggagtattatacggtttaggagatgaaagtttttatcgttaaatagtaaaacactcctttaaacgacagaaacatttgtgaaattattgtatacaaactaaatatatgcaaatgaaaatttcgttagtacttctgtcttcatggagccatccatctttgttttatctaatcatttttagttacattattataattattttttatcattacacccattaaggtgaattgagtaagagta

SEQ ID NO: 15174 - DNA, 11332 bp, Cannabis sativa
  modified_base (8729)..(8734): a, c, t, g, unknown or other
tttcttagtggtcgtatttctgtgaaaggaaattcccattctaatttctagggttttatcactctctaaatccttttctcttcacattcccttctattcgagttccttcttccgtgccgtcacaaaccacggtaattatctccttcgaccgccgtatcgccgcgcctagggctctggttgatctccctgacccagtctaggacctggcttccagactttcaccagtctctcgcatctcgcttggacgctcggcctcgcattcctctgccacgcccgtttcagacgtttctcacgtttcggtctggtagtctcgttcgggcgcttggtctcaccattctcttctgttcgaggtacatttatctgaattgacacttgactttttgtgctttgatctatgaggattcatatgcttatacgcctaatatgatttagggttataatttgtatgtcgtgtgattttatgctctgaggattcttttttttcttaaggatgcggcatagtagttagtcccatctatgaaaattccctttcaagtgatcattgtaaaatccatagattacagaaaacaaaagctaggtaacattcctgagttcgggactagtacgctatagaaacaatttgacctaggattttatgaaattactgtgacaattgtgctagtagtagttggagaagttggatcaatgcactatggagccatactgcagccaaggtatgaaattccaacttagattggagaataaaattctaaagtttgtgtttttcaaattaaggtggtggtggttgatcggctaaaagtgctggaggtaagaataatgtagtgttggaggtttagttaggtttgcttgccatgtgcaaatatgattgtcattgatgaattatctttaggtttgtggagcgagagggttttgaactattttccactgttgcatgccctaagtttgattctctgtatcatgcatagcactacctagggatatcacgaatccttactattaggagggaaaaaatgagttttctaattctttttattagtctccctgaccaatgagtcgtgtgattctattagaaatgcttgccatatattgttgaccgcacactatatagatattgaataacaattgtaaggggattttgaatttttatcaattcctaatcacaataggaagacaataggcaaatcgattgagacttgcttaaaacaatgggggtgttgagagggtttttgcaatcataactgataatgcctatcaaacaatctagctatttgttacacaatgagaagatattgcaagtttggaagcatgtggcttatgattgatagattttaattatgggtgatagattgtggtatttggacttgtttgtaatgtaattaaatatgttagagattctcaatcaaggttgtctgtgcttgatatttagatgtttaatcattaattaattatgaaaaatagagactctggattgtttcaaacattgactagtactctgactctggaaccttttcctcaaaatatgaagtgaaataagaaaaatctgaattataccagcatgtgcttacttataagatctatttacacacaataggttctacggttattaactagctcatgttttctatgcatttcacattttgcatgtcttgagttcctcacagatttgctaaacattctatcaaaaactcaaacacagataaaatagcaaacatgtcgtgttaggtacagagaaagaaccgaatagactcaattaatattgctattaattataggatttttgaaatgaaaggactatcctcatgtgtataaaatgatcctagatttacatgtgcttggtccaatggttagcttgcttggagtattgtttttttggttgtatttgaaagtttgttttgttttattctatccaacgtttgaaacttttttccccattattattgtatctgtccactgaatttaaaggctagctgtggtactaagagttttttatcaaggatgggggtgatgatgaggcaatagattcatttctttagaatgtaaaacaattaaacttctgaatatcaagcattgaccattaaaggcaataaatcctgcataaaaatcataataacaacactcaataaaagctcaagtttgaataagattttaattgaagttcaaccacagcaataatgtgattaatgcctcctaaaatgcttcagtttgttgaattctaaaggaatttgggtttgtttttaatcacttaaatgggagttaaatgttgtaggtttcttcctacagtttgaaaatactctaggggtgcttttactaagctcaactatctaatatgaactatatgaaaaggttctccaacatcctctaaatgttttgtttgttatgatgtgtatgtcttgcatacttttggtcaccttgtacttctaagatacatacttctacttctagtatatgtctttgaccaatttcaattatctgtgggcaggaagcttatgtcttttggtgattttattttataagcaaataagaacatacgtctatgatagactgatagtattaatttacaattggtgaaaggagatacatatggctggtgatggctctcatcatggaacatatgaaggtggttctaatagacattctcaagaaacgcctgaggatggaggtcgatggtacttttctcggaaggaaattgaagaaaattccccatctaggggcgatggagtggatttgaaaaaggagacttatctacgcaagtcgtactgtacatttctccaggacttggggatgagacttaaagtgtaagctttgttacttctaatttattatacgtaaatcattaaattgatgtacttctcactgttaagttgaatgcctggtgttgtgatgaggtcaaacattattttagtcgccttccatattaataggtttaggttaaatgataacaaaaagtccgtccaggcatgcttttttcagtgaagatatatgacatttagttattatatagcactgatgttgaaagaagtctttcatatttatcttctttcatttaaaaaatctgtggtgttatgatcattgattgaagataatgatgattgtaagtgttgtataatgcagaccccaagtaacaattgcaacagccataattttctgtcatcgattcttccttcgtcaatctcatgcaaagaatgataggagggtaagccaatgctggactgttttataaccccaataggtggttatagaagatttatcattccatgctgtttggcaacttctgaaatgtgtagtggttcagggacaactgttagaaaggattaagttggaatttgtattgacatagggcatttatctattttagtgcctaattggtgttgtaattcttccacagaccattgcaacagtttgtatgttccttgctgggaaggtagaagagacgcctcgccctctaaaagatgttattcttgtttcatacgagatcattaataaaaaggaccccacagcagcccaaaggattaaacaaaaggtatcttttactgctgtaattcttgttttaacgttcaaatcattctgttatttttaaatttatgatatttcttttaggaagaactacccaaattgtcttgaacaactttatttgtagcctacttgttattttagtggatagctgttgtatgctgaaagttagggaagctttgaagttttttctgaagtatatttttatggggtagctgctgctgttcaaaaatttatgtttgtttgattgaaaatggataaacatcagatcaggagattttgtttattagaactgctatttgaattacgctgggcgcatgatgcaaaagtttaagaactaatttatatatgttaacatgtatatgtacaatacacgttgagaaaatcatggtatttaggttttggaagtgtagaagtaagttgaacaatttttggtgcaaacatgagacaaggggatggaacaagcatatgcttgataggtgttctatacccactttaagacagggtaaatttagcacgccttgtacaggctaaactttgttatatgtgaatttgtttttatataagaacttttgtgataccgttttcattgagtgtattctattccattaaccaaaaattcttgactgctgcaaaacaaatttatccctgtcttgttgaacattggtcatgtttagcaattacgtggatagctgatgtagccctaaatttcagggaagttctgaatttagctcaagacttttttgtgggttagttgttgtgggcttaattgttgaccagaaaaggaatagtttcaagtaatttaatgtagtctttaacctagaaaagaatctgaaaaccacattgggtatactaaaggttaaaactgagatatacaatacaagttttcaaactgatttatatgtgtgtttgtattgtataaactagctgagaaaatcatggctttaggttttgttggtgtagaagaaagtttgttggtttcatgctaaacaaactcaaagaggatcattaaagaatgccttggataggtattcttgatgcattccataagatgaggctacataatgtttgaattgtatagacttttttaaatcactcgtcgaaatggtgtatacgaatttagtcttggagccttggtttgtaagagattaacagtattcaaagaaagtccaagaacattgtttgaactaaagccaaaatgaataaggagataagtgtatttaatggtctgaaatgcctaattaaaaggaatggaaacacaagaaactagggtttcggctggtgaatgccaattgttttgctatatatttttttaattatatcctttacatgtttatgattttggatttcaaatttttgactgtcctttttcttcttttgttattcaaggtaaggcttatgccctaaaatagctttattctcttgcaccaactcaccaagaaaatttgcataatagcaacttgagctaaacctttttttttaaactttccactagaggcatgcctgagctaaccttttcataaatcttccacttgaggtgtgcctgatctcatgaagcagtttaagaaacctaataatgtattttacatttatactctttctgtacgtttctctccgaggtgaggtgccccttctatggtgcctcactgcattacgcgaggtgtaagcttctccttcactaaattgccgtttggtacaaggagttagatgttttttaattaatagaaagagggtaatgtacttgtttagaatcgtgtagaataatagaaagagggtaatgtactggtttagatcatgtagaatattaaaatagtgttcagttatgcatgaaaatagatttagttgcacacaagatgtataatttgtcatttttatttaattacttctgtgggtcccccaaatttataaatgtagggaatctaacactgacctattttaattgggtttataatgttactgtcgtggttgatagaatgaatctcttgtgtttgataaaagttaaaaacttgtgacatacaatacaaggcagtgttataagatttccattcctaccaattgactcttaaatgaaccttttgggatcatttttacaagcaggcttagaagtcattttaaagcaatattgcccgcccaggccaaagattcactaatgtagcctacaattttgtctttccctttagctgtcttgctaagttgacagttggtgagacattttatgccatgttgtaattgcaaattttattcttccactatttttttgacatagggggagggagaattcgaatttggagtctcctctttgtgagaagtgtgatgccattagagtatgcctatatgaccacaatttccacttttgtgttgttgatgatttattaagtttgattattattgcttggtgtttttaggtatttaggagtactttgttaattgaatgcttgagccttaccaacacgaaacgccttgtacttcaaacccagtttttaaacattggtttgttgtttcattattgttttttagcttctatttagtttattcgtgtatttgcttctatcatacaggaagtatatgaacaacagaaagaattaattttacttggagagagagtcgtgcttgctactcttggttttgatctcaatgtgcagcatccttataagcccctcgttgaggcaataaagaagttcaaagtagctcaaaatgcccttgctcaagttgcatggaattttgtcaatgatgggtatgcttatcttagtttatttttactgcccagtgcccactgttggtcatgtcatgaaactgaatgtggtatgcagacttcggacatcactgtgcttgcaatttaaaccacaccacattgctgctggtgcgatttttcttgctgccaagttcctcaaagtaaagctcccatcagatggtgagaaggtttggtggcaggagtttgatgtcaccccacgccaattggaaggttggcatccttctatgacagaaattccctgttacactgggatccactgatttcgatttcttatgttccatacgtgtgtgattctcattctttcagtgagctattgttttgtgcttgcaaatggtgatgataggtctatcaaaactaaaaatgataactaatcatgtagtcaggacatgaaactgcatttgagaatgtttttgtttcgtgttctttttgcattccctgtttctgtcggtttttttttaaagtggaaaacagtttatatgaatcagtattctgttttgtttaacattatatgctatgatttattgcagaagttagcaatcaaatgttggaactatacgaacaaaatcgggtgccaccttctagtgatgttgaaggaagtgctgcaagtggtgttactcatagagcccctgtcaaagctacaacgagcaatgaagagcatttgactaacaacaatcattctcaggccggaagtacaagacctggtgtctcaaagcctgtggtatctaggccagcatccgagttgtctcatgctgacaatcatagtggaccccctagaacgactgagagtcggagtaatgactatggaatcatagaaacaaagagtggttcagatcacaaagttgaaagtgaattcagagataatcatcattctgaacccaagcatttgtcacaccaggcggtgggtgaaggccaaactatattaaggcttgggtcagaaggaaccggtgaagaagatcaacaaaataatgttggaaggagtgaaaccagagaagctagagaattgaaggacaaacatcatggccgaaattcagaaaatagaccaagcacacttggccggtcaccgcaagatataaaagttgacaaagatagggtaaaagctataatggagaaacgaaggaagtcagttggtgatgtaactcgaaaaacagatttgatggatgatgatgatctcattgagagggaactggaagatggcattgaactggcttctggaaatgataaaagtaagcaagagcggagacagagttggtctaaaccctcaaataggcccgaacatgaggattcacagcatgctaaatatcaggagtttgtgaaagacgagcatcatcagagcaagggacaggcatcagcaatggacatgaacaatgtggaagagggcgagctatcattaccggatgaatctggttaccagtcacctaagtctggaagccgcaagaggaaagcaggaagcccacccccaaatgcaatggaggggaagcagcggcatgattttgctcctggggtaaaccatcatgacaggttggcctaaaatgtataaaatgggtattatcttttttccctacccttaaaacgttcgacggtgaattttgagagcagtcagtaattcaaccattggacaattccattcactttttaagtgatttatttgctgtcccctcttttaatttatattaattattaaaattgttataggtatattgttacatacttttgagaacgtgatcgcatattcagctgatatgatctttaaagctctttgaggaatgtatgtggtggcatatatatgatagtaactaacaccaatattttcattttttttctcttgacaaagccccagaatattcaaatcatagattactagattacaaatccgttcgtatgatttagaacacatttcttacatagattacaagcaattgcttccacttgttgatttatatgatagtattgattgcaaggatggatccactgaagtttctcctttggacaaaaagaacagccctctcaaagttccacattgtgtgttcaatcaaaaaaaaaaaaaaaaaattaataaaaaaaaatacaacaattaattatacatgaattttattgttatgactgcaaatatatatattttttgaatggagtatttgcaaatatttagttacaaaaaagaacaaagatttaagaagatggggctaatagaattggagtgtattgaagacacttttaagtacatcaattttcaattgggtaaatactattttaaactctgtattttgtaaaagttattaatttgaccatttattttgttaaatgataaaatagactctactaaaatagtaaaaataggatcctgagcttaatttttaacaattttattttttaatataatcaactttaaataatttctaacactaactaatatagaaaatgtaattaattttgtcacaacatctatattagattattattaagttttatnnnnnnaaaaaatcaattcagggttttatttgtacaatttaaaaaatacaagatctattttgtcatttaacaaaaccgagaattcaattggtaacttttgtaaaacgtccaaaatgatatttaccctttccaattagttaaaaaatgagtaaatgttgtgattcttctaaattacacactcaactctaattttagatttatctcttaccaaactcacagttttatcccatctaataagattattttattagttctcttggcttttgggatgcgaaaaagcttaattattattttgattttgaaactgtaaatcagattcttcaaattcagattgtgattgaatcaagaggatagtctcatttggggactacattcttcgggctgctttttttggtcaaaacaacttataatttagctaaaacagaaactcttcttcctgcttcttctaattctgctaaggcaaatgaattagtaaatatgtcccctctcatgttaacatatttgattgtctaagagcttaagtacgctataactcatctgaccctcttcaatatataatgattgaagcggttggttaatccgatcagttcatcgatggttggcaagttatgatcctccacttcctatctatttgctttaccttgtgaattgcaggggctgtagtgacccatgctctcctagattgttctaaaacgaaatacatatgaagagtctcacttttcaaatagttttatagtaagaataatcattgtgacgttaaagaattttttttgtgtgcttagatgatttggatttgtttttgggtttgttgtggggaatttggtactgcaagaacgattctctatttgggaaaatacgtactaaagatatacattgcggattggattagttcttatattatatttatgattacatggaatcttagattagatcaatgggaagaatgaaacatgagcatgcaaatcagagtaaagtgctgtggcaacctatcaccactgcctaaaggtttcttaaaactgaatgtggatgctgcaacagattgcaacaacattaagcttggattaggggctgttgtaagatattggcaaggtaatttagtggctagaatttcagttcatgttcttggccaagtgaattcaactcaagcagaagctttgaatcttaatcattcattcaagtgttgtgttggtgagtattagtaaccacttcttgaagtagagacagatggtcaagttgtggtgaataagatacatagtcactatagagataagtccatcttatctgatttcttaatcccaatttgtaactctctgtcttatctccctaatggtcttcttctctgttatcatcttggttttgttgatgttagggtggaaatggactgccaatgggttagcctggctctctttgttgaattatatattgtctctttgtaatagtgtccatgcctttaagtttattcattgtaaacgcactgagaatattagagctgccattagattgtttacttgaaataacaagaagtgtgtacttgaaaaaagttttatgaagtaggcaaatagcacaagttgcctaaataacaccacctgaagtcatatacttgggaggccatcaacaccaacagtcaaagacataattaaatattcacaatattaagaatgtggaagtgtggttaggaaagtaggagagggtaaggtgtatagtaaaatatatgtagtttaatcttaaaattaagggcaatgagtgtagtatcctatatgtattttatataaggtattaaatttgtacacgttatcaattttatcttccctcaaaatagtaattatttttctcacaaattggacaactctattacaaatgactcttttagctcttgaatcactagtgtctcttttaattcttatttttgaatcgataagtaaattttgatcatatattcgttagagttttatttttctctgatgctatatgaagaatgtgaaagtgtggttaagaaagtcagataaggtaaggtgtacgatacgatgtatgtggcttaattttaaaatcatttggctgcggagtagtccatgcattttgtatatgatattaatttttatacattatcaatatgagattttctaacacacaacactgcaatagaatcatcaaaatttagttttaaattaattatcaattagaaaggaactcaactcaagcgcacctaaaattcacttgctatggaccatcaaaaatagaattccaagaacacgccataaacttgaccatcatacctagttagaattgaaaagaaaaaaaacaaggggtatttttacagaaatccatatagtaacccacatagtaattaacagaaaaatttaaattgcaactaaaattcacataacaacctacataaaaactaccgaaacaacccaaaccataaatataaaagaaagttaaaaaatagcatatgagataaatttttcaaaagacaaaaccaaaaggtgtgacgttatgaatgattaataaaatatgtgagacttaatattaaattgaactaataataacataggaacactttttaatgggtaatacccattgatgggaactaaaaaaaattaataa

SEQ ID NO: 15175 - DNA, 5124 bp, Cannabis sativa
  modified_base (3718)..(3724): a, c, t, g, unknown or other
ttctccccctaataggtcagggtcagcaatgaaaagatataaaatcagaatcttaccaccttacacaatttactacaataatgtgcagaaacatataatccagaagtgtggcaaatgaagaaaaaaagtcaccgattattaaagacattataaattttctaataaattttatgtggaaaggtacccacttccaaatatagaacaacatccacaatatgctccaacacacgaggtccggctatttctccagattttgttacatgtccaatctgcaatgttcagaggatgacaagcagaaaaaattgaggtgtcatacatactcgctcagacaaaatccaagttatgagctctaattgaaagtcataaaaaccagtccaattgatgagttgattaaacatgctaaccaaaagtacaggcacattagtcttctttgcataccggagcaaggctgatgtgcattccttgacctgatatatgataaaaagcattggaataagcaaagttcataaattatcagtcttacaaaaaaaaaaaagtgtggcaggaacttaattctcttgacgtttttagtttgtcccacttagcacaacaacacattcagtttgtcattgttacaaagaaaaatcaatagtttttccagagtgggttgcattcaggtgtaaaataaaagaaatgcctgtttataaccaagaagaaaaaagttatctactagaaaattataaaacctgtgttatccctccagcacttccagtcacatcactcaaataaactgtttgaattgagtcaataattaatgcccggggagagagaagctgagctttattcactatgtcctgaaagaagcaaactcaccacttaaatttacctcattgagaagaatggtctaccactactagtagattcaatattaatctagaagtcttaacatgaatggcagaggagcaatcttcaagtacgattcaaaaatgatgcacctgaatatcagtgctagagtataagaaaagttcttcagttccaatccccatacggtcagctctgtttccaatttgatccacactctacaattagagagcaaatgaataattactgacaccaccttatgagaaaaataaagaaaattttacacaaaatgtcatttttggcataattttacgaagtcttaaacaacatgaaaagacaacgtgaatcaatagtccgtactctagtaaaaaaaacacttgtaatccgtaaaaatgtttaaaactctgtacaaacatatttttgtaatttttttctctttttttggttaattatgaaaagttcccaaaaataatactcttaccaccaataaaaattcaaaactaatatcaccttacaatttctggaaagcacacaacaacacaagctccacaaacacacaaatgaagagaataaaaaacccagccctagtgcaatgccttgtaactaactagaaagccatgcccctacctaattaaacttaacactatcacttcaattaatctatttcctgaaagaatagttcaacaaacacatgttttaccacttaatagtataataagaaatagaaagaagttctcacaaacctggaataatttcattttccagaccctggttacttaataagaaaagcataaacgactgcagtatttgattgaaggagcccaagtataccctacaagaattattaactactaacctcttcaccagagacatatagaactggggctgctctgccaagctctcccccttcagctattaaggcagcaatcttcctcaatacatattcaaaagtatcatattacatgagaataaactaaaaaaacataaatacaaatgaaataacaagaagtttagttaactttcataataaattataatcagagaaacgatatggataaaagttattgaaacaataaagatcagatcaaaccctacagtacaattctacctgcaagatgagtgtactcttgccaataccaggatcaccaccaaccaaaaccaaagaaccttcgcgcacaaaaaagataaaacattgttaattaggatcaccacctaccaaaaccaaacctcattatcagaaatcaaatatagcaaagaaaataacatcatatcaaagccggacatgcttttcaaagttaaaccataactagctcacaaattattttgatcagtgctaccttttgccactgaaaaaacatgttatctaataagtacatcatatttaaggtcaaaaaaacatgaaacctcagatattgattgttgaaaaatatcataaatttacataatataaactattaacgtagaactgacctggcacaagaccaccaccaagaaccatagaaacttcttcgcccaaaagtccaggcctgagtatcatgaacttagattaaaaacatgaaacatcgtaatgaataccaaaataacttggtatagagtatagaaagtaagctaacggaaataacaacttacaaggaaatccgccaacctggatgactaataccacgtttcacatctttaagccgcatagggagcacttgatcctccgactgtggtagccaagccccagttttctctgtcatccccaacccaggaatctcagccccaccggcaaaggcatcaccttcagaaaactccgtcatcgtgccttgagctttacatgaccggcacataccccaccactgcccatcggtatatccacaactcgaacagacccaacaaatcttgttcttcttcttcttcttgttccccacaatgcccctcaaattaatcttctcaatacctcctgacttggcatttttaacagacccataagttctctgttccaataactcctccaccccatcttccgaacttgatgaagacttttcggtttcatctcccgactcttcttcgccgctgcctttctgaattttctccgtaacgagcctacccgataaaggctcgtaaactgtccatactttggaaggcttcctttctggtttagggtcgttttggccgtttggaacttcaaaactgaggctcgacgcttgggagccgaaacgacggtgaatttggcaggaaaaagtagagtaatgtgaagagaaatgaaatgggttgtaagttaatttgcgattgtagagagtgagaaggtgtttgtgaatagagacagctcggagggctctcatgtccaaaacttgcatgagaagaagattgggatggaaccctgaaactaaagagagtgaagtggagtcaagactcagaacagttgtagtatttgcatatggtcttcttcctcttcgtcccgatcctgaaaaagtttgaacccggcaacttcaaaagacgaacggtaagaaagtaagtccttttgggtttgagaaatatgacattaccctctaaatatgacaaattagccctaattccttccgtctatttttaatgggtaaatagtggcataagtactcaaaaagtttatgtttgtaagcggcataaacccaatgttaatttttagtagcataagtactcaatgtttgcaaaactataatttttctctaattttgtcagtacagactctgatattgtcttaaacaggacacatataaagcctaaatttttgatcatcgggtctcgatagaaatatataatatcagttacttctaaatgttcttttaataaattcaaaacagactctgtactgacaaaattggaagaaaattataattttacaaacattgggtacttnnnnnnntaaaaataaacattgagtttatatcgcttacaaacataaaactttaagtacttatgccgctattcattttttttttaattattattatttattttacacagagtgtttacactcacttttttttattactatttactgaaaacaacaatttgtattttcataaaaactaaaatatataaatccgtaaaaatattaaaaaggaaaacctataaatctttatttatgtgatttttttttgtcaattctgaatatatagaaattatcatccatacttaatacatgggtaacctcatcttaatacattgtaatcttattttaatatgtatagtataggtaaaccatgagtcactaagaatttttgagaagagaaaaggatcacaacttaatacaatataagatacaaatgacaaacaaaggaaaaacagcaaggtttaaataaggctctaaagtcctaaaagatactaatcataaattaggattttatggggattcaatgttaggaggttatttgagcataccaaagcactcacaaaatactcttggacatattgctatataaggtcaataaatttggtggtgaaggaaaaaaaaattattaagcactttattaaaaagttagaacatgtttgattgattggaatcaagattgtaatgaaattaaagtcaccattagaatgtttggtttgtgtttctaacctttgtaatagaactccattgtaatgggcattacactaatcctatgaattctcattacactcttacatctcatgaatgaaaattacaatgacaactaaataataaaaaagacagttttactttttctttttctcactttgaaaatataaataaataaataaaataaggatattttagtcaatttgattccaattacaatgttcattacaaaataaaccaaacatagtaatagtattcccattattattaccattacattctatttctattcttattaccattacaattacattccggtaaactaaacaccaccttatatggtatttttgaaaatcaccaaatcacatgtatacttttaaaaaaatattttttttttgagattggtgatctctaggtgcaggcttagcccacttaagtccaaacccaactctatcaccaaactatgggcgatatgaatgtatgacatttttcaaatttggttataagttaccaaaacacttcaaatattttcccataatccaaacatttattggtgatccaaataacatctccaataggtagtgtctttgttgagcattgaagtatttgtagtggtatcaacttgtgcctgacctagataatggtcgtaatgcgcaacctctctcttctatttcaccataacataatgggagtccttaaaataaaagttaatgcaaccattaaat

SEQ ID NO: 15176 - DNA, 5353 bp, Cannabis sativa
  modified_base (1051)..(1055): a, c, t, g, unknown or other
  modified_base (1850)..(1853): a, c, t, g, unknown or other
ttcatatcattttagaagttcatatttaggatgtttaataatatacttgttagtaaagctagatcctggtaaaataattccaacaattatgacgcaaatgccctatgtaattatttaaaagcactttttattaaaaagaaatttttaaggggcaattattatacctaaaattcgactaccatttgagtggaggacacatgtcaagatagagggaatatggatcgatgaaatcacttttaatggaacaactcattaattgcgtaagtaacagagtatacttgcaactcgctgactataaggtgttatgcgaggaaaagatatacaaactgttatttcgtgtattaacgagaaaccatgcataaagcaagacatcaacttcgttacacctgggaagacgaaagcgacgcatatcgactgagaaaacacttagtgtataatgtacaaactaagtataacagttgggtggacttgagacctaataagcgaggcgcctgtctctctataggacaacgcattcctggtaccttcaccaattaacttcaaacatcttcctgtgagacttataatcttgatgagtcagaagctgacatttaaatgactaccgaggaactctttggtaataagaactgcaattatcagaatgaagcattaagtcttcaaacaaagaagcagcaaggtgtacatcatcgaccttggaaagataggggagaaagctctagctcgctatcaaggtcattggaaccaaattcctatcgagatatcccagaatgctacagttaaagatgtgtttaattacacgatcattttgacccagtataagttggaaaatgacagctgtgcgatattcaaataataaccacatttacactacgtgatatgtaatcaaactccatgatttcaggagaaaaacgctgtaaagattacagtcaactttataattaactgcctactatatgattataaatagtggcaagtaagatctaaaaaggggcataaaatcatacaaagaaaaagaggccctaaaaaactatcagaaatctaataagattgnnnnntggactatgcagaattttaactgcgaaaccacataaaaaattccttgtgttcatactttttactttactgcttttatttttctgtgtgaaattatcactgttaggctcaaattttggttaacgaaaatctgcgttaacagtaaccataaggctagtttgtggaaaaatcaaattttcaaattctaaggctactaatatctaaaactaattttaattaattaaaaaattttaaaaattaattttattatgataattagatttctatttgaaaaatcagattctacacaaaattctacccaaaatagaattttgtttcagtgaaaaatgatttttgaatcaatagatatcacaaaaacaagattgcactgggggagtatgcaatgcatagtccccgtgcgcacacgaggctgcatgtgggcgagggaaaggttgcaagcagcctgtttggggggcaatcctcagtcagaaggggaaaagttcggacagggccttgtttgaaggcctcttgtgagagtgagtctccccatccgcgcgcgcacgtgttgcttggtttcaaatattttcatccaaattcaaaacatcataactaattcataaaaaatcctaattgagttctgtaaaagcctaaattttttaatttttcatctaaatattttcagagcaaaacaaaaaatatttatcaacgtacattgcgttttccatacaatcatcagttatgcaaaaaaaccaacatgaacacatccaaattaacacaaacatgggtttaaatctatatttcatgaaagtaaatcattnnnntggctctgaggccaattgttggagattatcttagggtaattatatgctatttatcgataggaaaaattctagttttgactttaagtccccaaaagtgtttatagtaacacttacctattttacataaatgtgacatagggcctccgttcagcaagcgatatttcactcaggttgactggtaaacgtgaatttagaaatgaagtaagattagtgtaaatatatatatatatgtgtgtgcatatagtatacatgttagattgtataagttatatgctactaacactagtatggttgaggtacgaagtgtatatgttacaatatactattgaggggtatgacatagcattgctgttatacgtgtttctaagcatgtgacatgtggcatataaaggaaaaaattaaccttataatctcactaattaaaatccctaattattattatgtcacaaagaagcctcacagaatcaggaataagtcaagactatgagacaagcaaaagtctacctcaccttatcctagtctcctaatagggaagacatactatctctccagataccgggaatgtccaagtgcaaaagcctacccaactgatacctgaataggtagtcaaagagcttatcacggacacttatcacctaagagtgtcacagatgtctacctttggtgtaatctagtttgcccaatgacagttacactttttctaacacaaaattagatcttgtcccctgcgtccaggcatggtagtgtgcgcacctcatccactttttagccagaaggttattttagacctctacttttaatggttaaaccttttgacgacacgtgtctccaacgtacaatggttcccaattgtccaattacatcacgcacgagcctaattatttccaacaggcccaatagacagctctcttttacatgtagtttaaccaattagtgggcttttagcagaaaccctagacttgtcatgggcatgtccataaccaatcatagcctataaatatccttctatatctatacaaagggggatcacaaccaaaatagatgaagctaaacatagagttaggattccctacaaaatattgtaaacacataaaaaatgcccttagatgctattacactaactcgtagactaaggttgatgaacacctaaactacgtaaaaaatctctatcttgtttatttatgcattttattatttctttagctcctaaatatttagtttttaaaaatttcggtaaatagttaccaacaatggtactggaagagtgtagagtgtatgtggtatagaaattagttgtactcacagtgggaataaaccctaccaacactagtataagaaagataatttgtgcatgtggtacagaggatgtactattgtcaacaacgttcaagactcgttatatgcattggaggcgggtcaaacttgtaactcggtgtatgggcgcttgagttatgagacaaattatatgttttctacttttcttattgaatctatcgactcacatatatagtttcatgtgtaggtaaaagtaaagaaaaggctaagcaactttgagtctggagctcgttggtgattgtacatatccagatggttaggactagagggttcaaatcttcaagactagtcaatgggtgacactttttttttttcttataatgtattttgaaaagtttaaaagtaaatgcaggatccctgaaattttaataaatatgttcaataaagtaaagtttattttattataaaattttaaataaatcacatttttattaaaaccctttgattagcaaaggtcagaaaagtaatttgaaaaacattgtaacgcaaggatgtcgtggtgtggtgggatagagtatctctcacttgagatgttttagtgattacccgagatgagtttcaagatttatttaatgccaaatattttaacgatgcagtctgtagtacaaagacaagggagtttacacaattttttcaagaagaatcaatgtcagttacaaaatatacaactaattttgacaagctttccaaacttgcctgttgacccaaactcttaaagtctccttattttgaggattaacaaatatttgattattatttgtgactaattatttgataattttgtagcataatcaaagacaattaagctttttcttaaggcaaaattaacttaaagggaaaaatgataattctaccaaaattctcaaaagtgacccaaagtggattccaagactcaagaaactcaaggcaagacttcatgaaggtttatttacattttttagtcttgtacattgatttttaagtctatacttaaaaaagttttaagtacgaattcggcccactaacttgtgtgacaagttattttacaaaatgatatctaaaatttttaaattgactattaagatcacatatcatttaactaagatagctaaatttctgaaattggacaaatgagtaaaaagtcatgcaggttttagttcaaaaaatataaattttgccaatgtaagccatctggaattccgattggaatccaaaattcttgttgtaaccaatcctgaattctgattcccattcagtattcttgatcactgcagaattccctttaaaatgcgtgttaacggttataattggctacagttcacccctaacactatataaactctatttttactaaaaaaagtcaagttggttgagcatttatttcatatacctaacctattcaagtgattttaatgagctcctaagtttaaaatctaataaacacttttcacacactttgagctaaaacttgtgtttaattcttcaagtgtgcttgctaatcactctaggctttctattgtttcatcatacatctagagtgagtatgcttgtaatttcaagcgtattaccaaattgtgattgatgtgaggttggcattggtattgtaaacaacctagttagagtgagattttcactacaacaatctcaaaaagaggttgattgtaacggcttgtcacacaggggcaccacgtgtgtgcgcttttacaaattaatttatagttaatctattaatttaggaaaagtgtggtgtaatcaaaactttcagattaaactaaaaatataacttttatacaaatacaactaactacagggatcccctgtccataaacttttacaactagattcaaaatcggtttacaaagaaatagaaattaagcactgtaagactgaagaagagtaggtagatattttcacaaatgcgctacgaagaggaaagtttaagctactacgagacatgatcggagttaccgaaatgtgtaccaaggaggagtattagaatttgctacatatttgtacacaatttagtacaaaaatttctatacacttgtagagaaaattatctaagaacttaagcgctcgtttaaaacatcgtattgtattatattgtattgcattgtgttggattatgttgtattgtattgcattagtattatttaatacaatactatatttgatattaacttgta

SEQ ID NO: 15177 - DNA, 3975 bp, Cannabis sativa
  modified_base (750)..(766): a, c, t, g, unknown or other
aaagtacatcacgggacaaaatcatatcccatattatatattttttagaaacagtttaatacaataatttaattaccaaggtggacttgaaatttaggggacacgagaaaaaaattatgtttgagcttttatttagaaaaaatataatatttttaaaaatcaataaaaaaaattgtataattttaaaaaatgaaggtttttttttaaacctctaggcaaagtaagctctaaacacatgcctagcctatctatgtttagggtcgggcctgttgattagtatctatattatgacgttaaaaatttaataatatattttcactaattgtttaaactttattagactaatcttttaatttttattttaatatttgataataatagtggtaaggtaagagcctaattgtatcgtagtgcatttttgtagtgtggtttctgcagttttaaggttttacaatgcggttgtagtttgaaaaattataaaaactgcattatgcaccacttgcaccgcgaacacccaaaactcgaagctaagctatgttaaacaataaacaataaaatgtttgtcttacaactcttagttaaaacgtttttttttataatttaattaacataataaataattattaaattttatgaatgtgtattgtagatttacaacacaatattaaaaattaagctaattagtaatttttttctcctgaactttaatatgtattaaatcatgtcacagtaaaattaaatgaaattagnnnnnnnnnnnnnnnnntaacaatctcaataatttaaggggaatttttaactgctaaaaaatttcaagaagcataatttaatatatgtcaaagttcgagaaaaaaattactaattagcctaaaagttaatgtaaatatatcataaaattatattttttttaatcatgtttttctcatattttttaactaattgtttcttacaacaaacaaaaaaaacatacttccacagatttttaccataaaaaccgtaaacataaaaattctgatgaggggaagctaatttgtcaaattttcacaaaatcgaatttcttttctgtattattctggattcaactcatattttacactcttttctgcttgaacttatttttcaagtcttgtttcaattaaatttaggatattagggaaggattatgtgacatgaataataaattattacatccccaattataccacttgaacttgcaactgacacagttcatcctaatcacttcgaagaagaagcccgccttcgcttctcctcaattcctgactgagagaatctctccctaagaacttgtagaacttcttccattttcacatctttcaccgcgagaagaaccatggcatgataaagcacatctgccatctctgaagcagttcgcgacttttcttcattttcctcgagtgtttgacacaactcgttcgcctcctccctaaattataaattactcatacccatcagaaaactatagtctttacgaaacaataactaattcgccagtgaaagttacctgatttttgagcacaacaatttgttatcaagtaataatcgtctagtccatgatggtttaccactttgtggcacttctaattcttctttccgcagggaaattgtagactctaacgagtataaagtcgtttgtgccaatttgttttcttcaatttcacgctacattatgtaatctacaacgttatcaaatgaataataatgagaaaaccataccagcaagactctaacgaatgcaataacatacctcgagatgttctaaagaatcagaaactcgtgtataatagcatgtttcggcccctgtatggcaagtaggaccatcaggcatcccaaggtagattatctaaaaagaaaatctcgagttattgttggatcaaaggtgatgaaaatctagtttacatacaaaacttaactacacaagttactttgtttacttgctagaaattggcattcttaccaatatctttatgaatttaataagattataattataaccactcagatttcctctcataagaactttcacttcagttttccttttttcgggtattatcccctttatcaaatcttttacttctcttctctcttaactacgtataatgataaatgtcaatggcaaacaagttaaagatttgttatttactttcctaattggttatactaccatagtattcatagttttccaggttagattataattaaaaccacaagtttcctctcttataagaactttctcttctgtctccctaaaaatcccctgttctacttgcttgcttgccaatgacactaaaattagcatacaaaccagaacataccgagtctcggtcacagtcaatgaagatgtcatgcacgttgatgaaattatttgaggtctctccctttgtccacaaagtagacctagagcggctgaagaaagtagcctttcgagacaaaatcgttgtggccacagcatccctgttggcaaacccttgcattaatatggctccagtgtcaacgttttgcgctatcgccactgctaaacctttgtcatcccatttaacactatctaacaatgtctcaacctgaaacaattttcgcattattactacataatccttgatacaaacagcaaattgcatttggggattaatgcttaacataatgttctaaacacaagaataaaatgtacggtccagatgtagctcgacaataattagacgacattatcgggcaacgatgaacaccttcaagagggtacataagattgacgggaaacccgtcaatcaaatgcccttctctatctttccttttccaaacatgtaacagtctctaccataaaaaagttttggtagacacttgactatgtctggtaaaaaaaatacctaaagtacattcgaaattaacaatgtagggtccagatgtagctcgttaataattacatgacattatcgggcaacgatgaacaccttcaagagagtccataagatagatgggaaacccatgaatcaaatttccttctctagacttgcttttccaaacatgtaacagtctctaccatagtcaactttggtagacacttgactatgtctggtaaactcataagcataacaaaaactataactattctagatcacattcacaatgcacaagcttaattgaatttttggggcaaggaaaatgtacagtccagatgtagctcgaataataatggattaaatattaacgggcaacgatgaacagcttcaagagataaaagatcagacataataatcaaatccatgtctctatctttagttttccagatatgtaaaaactactaccatagtataacacagtagaaatctgactatatacatctgggtctgtatatatatattattaaatatcatggattaagaaaaaacaaccttcttgttggaagctaacacaaggcaagtggtccttctcgtaagagagtctctacttgaaatagataaacgacttgtggaagagaagttcaaaggttggagaaaatgaagatatgaaaccgccattgatgtttcatatcatattattaaccatttttgtttttgtttctgttgaaaaaaacagcaaaattatttatatatatatatcaaattgccatttttgtgtatgagcatttttatggaattaaaaccctaaatgaaaattgaatagagaggaagaaaggcatacctcaatggtttcttcagtttcaggctttaaagacaaagagatgagcggcgtgagagggtgagtgagtgttgttaggtttagggttttcaaatttttggtgattggttgatgattggactacattggcccattaatttgtacaacccaattccaagaggaaattacactctataccctttttatcttctcttcttttatttttatcctattttttaaaatctattatttttacttctttttttaaacattgtaccaattttgtccctgtcacttcaagatact

SEQ ID NO: 15178 - DNA, 11330 bp, Cannabis sativa
  modified_base (3091)..(3092): a, c, t, g, unknown or other
ccccatacttttgctgctgccacttcacgttctctatcaagatcacgatttcttggggtttcccgtgctcttccagcacttgcaggactgtccctctgggattctggtcgttctaaatcatccaacccgcactttctaccagacccaccaccagtttcaatcctgcccaattctgaaccagcacttacgtcccttgcaaggtctctctttctgaaatcaggtgaatttctatgggtggaaggagacccatttcgccctccacgtctgtgttcatctgggctatccagcccttctcccatgcttctgcgatcatccctattcctgggagtagatgaaccaactctattactcactgcattagggtcataagtttgggaggccaagtatgtgagagcagtcaccacatctcctatcagaggccttgtagcagcttgttcctgcaaacacatggctgcaactgcaagagcttggtagagtccacgcattgggtaatgaccttgaagtagcgggtcagccattttggggaactttcttcgatctttgaaaagtggtcgcgcctgcattcacatcccagaaaagaagacaataataatagtttctttataatctaaaggataagtgcataaatcttcaacaggtaaaatataatatatagtaaatgaggaaactttacccatgcaacgagattatgttctccttgagctcgagtgttatcaatggcctttcgtccagtaataagctcaagaaagacgactccaaaactatagacatcagattttagagtgagttggcctgtcatagcatactctggcgcacaatatccataagttcccatcacacgagtggagacatgtgtcttatcgccaacaggacccaattttgcaagcccaaaatcagataatttagggtgaaagccctcatcaagaaggatattagatgacttcaagtctcggtatataacaggaggatttgctttgtcatgcaaatactccaatccttttgcagcacctgccgcaatcttcattcttgtattccagtccaaaggctccttgtctggtggaagatctgaaatttacaagcagaaagggggttggtcagttgtggaaggtcttcattgttaaagaaatgaccactaaagatgggattgagggacaactaaggtgctgaaggaaagcagatgctatttggcaagtcaaccaagaatatcatcctaacaccgatatgtatgtgacagttcatgtctattctgtaaaccttgacctatgttgagctaatttcatgttgcatgactcagacgtcagtaagttagttccagaaaaaaattgaacaactacattgacattctagtatcaccaaaacagaagaaaatgatacaatttgcaatccttattccataataagtgcatattgtatccaaacccacccaaagataaataggtgtggcatcagtaaatgaagcatttgtcttaggtccatgacttcatattttcttgttaaccaaagttttagtgatcaaatatgaaaaataaaatggtttgtggttctaagtactacggtagtaccaaccaaaggtaatcgaatgaatagtatgtaagtaaccataagtattgagaccttagaccatggattagtacttctaacaacttcttttgttgaccatgatgttaatcactaagttatgtgaagaaaaacaatataacaccaaaacatgcataaagcaagtcagttacttgtacttactccaccacagttcattaaattactaccagaaaacaaaagacatcattaatgtcaagtacccaaagcaaaaacctggtttttgaaacatgatttgctctaattgtctacttctcagaatttggacaaaatattagaatctcattcacagcttagtatcagattattattccatttccatccttttatttactccgtttgctcaatccacattttctcaagtttcttgaaatttcatattctcttatacatatgatagcactatgttggtttcttaaaaattaagtctgaattacttattattggatatcaattaaacctagtttgcctaattaactgcaagttaaacagtgttttctgaattttttactagggtacaatccagcagtgtagcaatgactttgacctactgtgttcaacaagcattataaagaaaaaatataaccatgataattgattatcatccaatttctacaggccccaataaatggcaaaagcatagaagatttatcactacttaagttaaaacgtaccatgtaaatgatcctccaaggaacctaagggcataaactcataaacaagaaggcgctggtccccgtcagcacaataaccaataaggttgacaaggtttgggtgatgtaagaggctaagcattagaacctctactaaaaactctcggttcccttgcaagccattcctgtcaagttgttttacagcaactacctagaaacaaaaaagtatgtccaacataaaatcattaaatagattaggacatggatagtgataataaaatttgattctacaagtggtttctaaatattatagattgcgaaaaggaaaggccactgcaaattagatcatgctccattatgatattggaatctatcaactttaattaagcattattacctggtttgtgctctccaagcgacctttgtaaacacgcccaaaacccccttcacccagtaaactctccggtctaaaattctttgtggcagcagccaattcccgaaatgtgaatgtttgtgcagcaatgtttgttgttggtccatctttcggaattactgattctttcttaggatcagaaccacttcgcgattttgatttgtctgcaaaattattaaatgagatgtattgtgggtgcaatctataaaacacaaaacgaatactgttaagattcttaatgaaaaagttgtccaagttttcttatgtttgtgtaaaggatgcagctaacaatgtgttctttcccttgggattgttacagaacaacacaactataggagggaaaactcctaccaagaaaaacaaaactaaataaaacaaaaggacaatagacaattagagagattcattnngaatttcctattttgaagatcctttttggagatgaatcgagtcaaccattgtacttctttctaagccagttaagtgacgcgagctaataatgtttctttaagaaatggccactacaggttccagtgaccttgcgaatatcaagcttgacctctctcatttgatagtacattctacattgcattaacaggtgaagaacatgccttcaaaaacagtactttaatcgtgtgtccattccataaaaaagctattgcaaccaactccttagcatcaatatctacctcacatttgacaacttgaacaaagcctcaaatttcatcagcacaaagcaaaataaagaaaattccaatataaatcaccgatctccaagaatgtttcaaatgcaactccatcaaattaactccaaactacccccttctcaaaaaaaaagtagaaaaaagaaaagcaattgacatacctgccaaagcataaaaaacccccaattcagtagaccaaccaagtcacccaaacaaccctacacgtatcagatcaaaagtaacaaaacaatcctagcgaaagcccaaacttgggttgacaaatgaccacaaaaaacacataattcaacaaacccagcaaccaaaatagctaaaaacataaacccaattgaatctccccctacaaaataacaacatatattcagataagtaaagattaaattttttttcctttcatttttaaacctgagctaactctggtgacatggtggtgagactgagtagttgagccctctttaactgaatccttcttcacttctttcacaaccttcccctctttatttgacgatccaaagcagggaaaacacccacccatatcaaaatccaagcaaatcaacaccaccccaccaagcccaattcagagaaactcatataactcaaccccaaaaagctcttccaatcactctcttatcatattctctcaaactccccccaatcgaaattatctctctttctctctctacctcactctttctctctctgcttaagatcctcagtgcccattaaagagaaagatcgagaccaacatgtccccaaagcagatcaacaaatcgaagaaactgatgtggtttgaagagaaggtaaagaaaaaaaaaacaaagaaaaaaaaggttaagacagaaataaccaattaatatatattttttaattaaatattattttgtggtttacttattaaaaataataacttttttctttctcttttttcttacaaaaactttattctattatatttaattaatttccttaattaatcaaaatttaaataagctaatttttcatttacacgtaatctccctctattttgaaactatatatataggaataataccaatatattccataaatactttttttttcactttttacccctcgatttgagaaataattacgggtaagggacagtaataatgatcatcacggtcggataattatagtaaaatataaataaaatgggtcccactacaaagggatgtgcttccacactagtgatggacattctaaaacacatgtttttatactatttttatttattttatttatttatataaataaataaataaatattagtgggatgggaataataataaggacatggggattgtaatctcctacgggagagactattttaatttcctacgattgaggggttgagagccgttggatttgtttgtgtgtttgtgacctaaaaaggtttgacgtcacgttgtttgatccaaccttacgggaaactcactaaaatttagtaattaaaacaaaaatcttaatacataatttattatacttgaccaatattatttttctttttcatttttttctgaacaaatgtgatagatttattcttacttaaccttttattgtcagaaaataaattattataattatatttccaaggtggtgtagtgttgttacttgttgtaattaaaagaattgcatatatttaattatttattatttgggtgcgtaaacgggtaagtactaagtactatacataaactttgatttctgacatagcacactaccatttatgtgataaatacaataaataggttaaaatatgaggaaaaaaataataattactcaaggtggtaaaacgggttttgatagcggcactacacaaatataatacaaattttacgaattaggtcagattaattagctgtgtgtggaatcgactcatataaatgagtatgttgaaagatacttcttttattaatcaattaattaaatttacctgtaatttatatttaattgaaacatacctctttttatatgtaatactctaatataatggagtcacatagaaaatatcttaaagtaacagggacaaaattggtacaatgtgtaaaaaaagagataaaaaagatagactttaaaaaagagagtaaaaataaaaaaagtcaatataaaaagggtataaagtctaatttcctcttcatatgaatgtaaggtcggcccttactattaacgggcccacaaattttatgagtaaaaattagagaaaattaggtgtgggtcgaaagtagatcgacacgactcatatttccataaaactggtagctgagtgagagagacctgcagttcattcaaaaggaaagtaatccaacaaagttcaacagctgcattttctagagcctaaaattctctttcaatgcttgaacaagcaacaacttgttgctttttggcagaacaagagacaagattgttgcctaaaaacatcacatatccccctatagatcttttatcattatacaactagcccagtcatcatcactgtagccttgtaaattcataatatctgatgctcaaagcttcaaaccatcagataaggtacccttgagatatctaagcaatctcttgcaagcctcccaatgtgttgtggttggagaatgaatgaagtgacttagtttattgataatgaaaataacattaggtcttgtgagactcaaatactataatgcttcgagtgtgcttttgtaaagagcaacatcttcaaaaggttctccatcttgctgacttaatttggatgttgagctagtaggattaggataactcttagctccttccacatatgcagcttagtgagaaggtcagtaatgtatttactttgacttaaatacattcatgtggcatctctgtatacttccatttccaaaaaattaatggataggacctaagttttccaaggagaatattgtgttcaggttatgtgtaaactgagcaataagtgtaaaactaggtcctgttaaaagtatttcatcaacatacaccaagagataaaccaatgagtcccctttaccatgaatgaacaaaaaagtgtcaaactcggaagcttagaaaccccactgaaataatgtagctttgagcttttcattccaagttgcgggtccctactttaatccatataaagctttctgaagcagacagacatgatctagtttgtggggatcaataaaaccttcaggttgcttcatgtatacagtttcttgtaaagtttcattaagaaatgcattgctcacatcaagttgtgtaactggccagttttttaaaactgccatgttgagaataattctcactgtaactggtttaacaacagggctaaaagtgtccttccttaccgagatttttgaaaatcaagtatttagaacttaagaaagaaataatagaataaatagaaaatgtgagatttttacgtggttcaggcgttagctattcttagtccacgaatccattttattaggctcttcggccggtaaatatgagtgcgaatacatatacaatggactggaactctttcttcctctcgttcctcttgaaaaagaagaagcttcataggaattttcgtgtggagtgatatattatagtattatttctcttacattttctcttttttgaaaagtacccttatcccatggagcgaaggggtatttataggccagtttccctccatgtgccagcttgaattgatcatccttgggcaagatctgaccgttggcttggtaggtggctattttcccatatggcatttaagagtgtcagattatacagactgggcatcatacacgtgccgtcccaaggccttcccttttgaatttctcttattaatggttgttgggtcattcgggttggtacaattagatgcgcatgctctgtattatggcatattgtgggagacaaactctgacaccgtacctgaaaaagcctgggacttgaatacgtagtttgacatgtacgggcagggccttcgcgaggggggagtatagctcagctaaacgcatttcaagacatcttcgggctttcagcgaaaagtccataccctttgcgggagcacttgacttcaactatgtgggagtaagtggctttagcttttgggactaggagtggctcctaatctcggatatctcctgcatcgtttcctcgcaggggagttcttatcacatagacccttttcgcaaaccaaagcccctattttcctggagtggtggtccatggagttgaccggctaattatcccttagcccctcctgattaggattcacgtgtcaagcatgcaaaaattcggataacagtcctagtcaatgccaggtatttttagatacactttggctactaatttagattcaaacttgtccaaggaaccatcaaccttcaatttgatgatacggacccactcattgtcaattacatgcatatatctttattataaagtacaagtgtccaagcatcttgcttgatcagggctagaaattcttgaatcatagaggcaagccagtgaggactcttaggggtagcctaagtagacttgggctcactaggcagtaatgcttcgggaagagggtgctttgtggccacgtaggatttacgcttgagaatatcattctgggatctttgtcctcatggaatgtgatctgctggatgggagaatggatgaatctgctatagctgatatggagctgaaatttgatgtaacatggtggacaaatgaagctgaaacttgttgaagaatatgctcaaaaatgggtattggggctggggagggaattatctatggtttagtaggctgatgttctagtactggtgtgggaaggaaaactgtgtgaggattaggaggatggggaggagatatttgtggttcaataggctgagtttatggtactagtatgggaattagggttggaattataggtgatggaggaataggagtagcaacttcagtgttagtggtaataggggtaacatttgcgcatgcattagcatgatgaaaactaggtatggttgaaaaagtagtaactaaaaagaggtaagggatagaatgagatacatgcagtgaagaagaggcgtatgagagggaactagtttggaaggataacattcttcattaaataccacattccttgcaatgtaaattctcccttctggactctcataaatatatcttttatgatgagaggagtagccaagaatcagacactgatctgtcctgaaatctattttgtgcatgttgtatggtctttagtgtgggaagcatgcataaccaaaacttttaaggatgttgtagtctggtttggtaagaaatagaacctcatagggtgatgtgaaatctaacacccatgttagtagtctgttgatagtgaagacaatacaactgaatgcatgccactagtaattgagatcaaggccagcttgagctaataaagtgagtcaaatttcattgatatgtctgtatttttcgtattgctcttctattttggtcatgattatgaggacaaagactttggaaatgtatgccttaatctagtaaaaatctttttgaatgacctatattccccaccccaatttgctgggacaactttgagtggcaagttaaactatttttccacaaaacttttccatttaatgaagagttcaaagacttgaggttttacagtttgggggactatccaagtatacctactgtaatcattaagaaaatggacataatatttgtatccttctgtggagtgctcttgagaaggtccccacaagtcagtgtgaataagtgccaaaggttgagaggctcgactagtggagatagggaatggctttttccttgttgacaagcagtacaaaatttaaggtctttcattgagctagtgtggggaatgtgaggtaacaacttttgtaaagtgtttgaggcccaatggtcaagcgtgtagtgccaattattgaagttattgctagtaaatgaatgaaatagaggaggagaatactcaaaacaggaagatattttacatatcaagattagtataagaattgtctacatcatcttgtttaggaacgcaatagtaggggaaacaattagaaattaaactattgtgagacgcaaaggcaagattgcactatagagctgtaggtgatgatgtagaagagccattttagagcaggtttaatccattcttaactgtccccttgagcaaaacttgtctgaaatccttgtccttaactaaacaacattgtttgtgaaactcaaggaagacatcattgtcttcagttactttggacacactgaccaaattcttattaatataagggacttcaagaacataatgtaaattcaaaggagaagaactagatgaaggtaaacaagctgagccaacatgagagatgagaagtttcttaccatcaccaatagataatgtctcagtgccattatagatcatatcagaatcgaggttgtctactgagttagtggctcctgcgttagcaaaccatcctgagtcatcaccaaagtaggaagaacctagggagaataacctttactttcttaaccagattcttgtttagtgagaaaggctcaaggagtatttggtccaaaatttagagtaacccaatttgtatcaaagcggtagtgacacactgcagctctgtgacccatcttaagaaacacttgacaaatcaatcgagaatgtgaagtgtaacctcgaccaaaaccacgactagtagagttcccacaattagcatactaagggggtttggagttgttacctcaggagttgccaaaggtgcattttcatagttagatcaatgagcgcattatgatgttccatacgactttcgtgagccatgagaagagcctgaacttcatcaatactcaagagatcatttcttgaagtgattccaaacaccacagagtcgtattcaagccattgaaaagttgtaatatgaaatcttgctcattaatagtggatccagcgatggtgattgcatcaaaaagactctaaactttatcagtgttatccaagattgtcaagtaaaatttttgaatgtgtgagaactgacctttgagctgaagaagatgtgctcaagattggctcaaaaaacgttgttccaaggctttcaagactgagtaagatcgtgaaattagcaacagatccaagaacaccctcatacattgaagaccagagccaggagagaatcaattgatcttggcacttccatttttgatattgggggtttggttcgctagtaacaagaatctgcggtggaggaacgtctgtgaacaagatctcacaagatcatccaattatagtagggacgacttaagacttccatgcaacgaacttagtgcgatcaagtttcacaattagtgaagatgtgacagaatttaagaatggattccatagcatcagaagaccaggaggttgagccatggcgagagctgtagtagcgagagtcgtgggattttcaggatcaagttgaacactggagctagaagttttatccatcgatgcccatcagggacagaggtcagtggcgattgataccatgtaaggcttaacaatggcagagagtttagaaaatgcagagcatagagagaataagcagagcttttagagagagaagagaaatgctaaagaaacttaaccaatcgatttagtcttaatcttatttatactgattgaatagttcataatagcaaaacaaaaaagttaaaagaaaataacaaactattaactaacttttaattactactaaacaaactagcaaacacttaggtacgtggcgtttggttgggaggaataaaaacgtaagaataagaatgagaacgagaataaaaatagaaatggaatggaataaaatttaaaatggataaaaaaattggtaaaaaaaataattaaattttttctcatattacattagaattaatgatcttttcttctattttaaa

SEQ ID NO: 15179 - DNA, 2494 bp, Cannabis sativa
agtaaacttctgttatttgtatcagttatgtctgcacctggagacgatgaagccaagtcattaggacacctacaagcagaagacgattttgaagaaaggttccatgctgatattgaaaaggctatgcgccaaagccttggtaaaatttctgtaacataattaagtttatctattaattataatctgtatgttatgtgattgaagctgtcatttaaaatggactttacttctttttaagtatttgaattatagtcctaatcgtaatcctattggttgagatctaggatgacttctatactatatgtatatagggtttatgagaatagaaatttgatgtacacaacacttttccactctctctctaactcccaacctctcaatgcttctagttttctccaagaaatttcattaagaatttgaattatagcttaggactagatatgtgatatttataccatgaagtttgtttaccttataagatcattggttagagaactttcttaaaagtgttgtaaaattctgtcacttccctaagcaaaccaggaaacaaaatacttgcaactatataccatagataatcaaaatctttaatgaaaaaatattataattaacactttgttctcgccttgttctggaagtttcaatatatatgttcaatagttaagtggttaaaaagatctaagagtaaaatgattggctcaatcaataaatttgcagtaaataaaaaatgacacacaagcactttgttgtggaagtttcactatatacgttcaaatagttaactcaatttacatctcttttcaccagtgagcagattttccagtggctttttgtttgcttgtttattggtttatgttactgatgtactgcttaactatataacttgtgctgttttacagacatatttgaagcacggaaaaagcttccctccgtttctactagttcaaagatgctgcaaatgacttctggagaagtagatagtgggggtggtgtacccaatgatgaccaagtggataatgtgatcgaagataataaagttggtgcaggattgaaaaatgaagttggtgaatataattgctttctgaatgtaattatacaggtgagcttcttatgaatagttgtggaatgtataatctttgtgcaatttcttccgtctaatttttgagcacaaactgttttgacttttattttgtgtacagtcattgtggcacattagacggtttcgagatgaattcctgcagaagacatcagagcatgttcatataggtgatccttgtgttgtttgtgctctatatgaaattttttctgccttgaatgttgcctccattgattcatggaaagaagcagtcgctcctacttctttgagaatagctttgagcaacctatttccagatagtaatttcttccaagaggtaactagtaacctgtcttttgcataactactaggatagttattttcattatctgctcatcagtccagcaaaatttgcattttataaggtttgattgacataagtgaaatttcaggctcagatgaatgatgcttctgaagtattgggagtgatatttgattgccttcaccggtcatttactcctgcttcaagcatttctgatactaaatcagtggtaaatagctgggaggggtcttgggattgtgtgcgcaatacttgtattgtgcattccatttttggaatgaacatttccgaaagtatggattgctacaattgtggagtggggtcgaagtttctcaagtacaccactttctttcacaatataaatgccagtgcgctccggacaatgaaggtatgtgcattttactcatggttgataaattactgaagctgttttgtgggtgggttggttcctctaatcttgatgtatttttttatttttttggctgtttaggtcatgtgtgctgaaagctctttccaagagcttttaaagtttgttgagttgaatcatcagtcgccatgtgatgctgaggctggaggctgtgggaagcttaactacatcaaccacattctctcatctccaccacatgttttcactgcgggtgagttaactcaccagtttttgagtgaatccacttttattatgggagctaggaagaacacatatgttaactagagctataaattgtcttgcagttcttggatggcaaaacacttctgagagtgttgatgatattagagcaacattatcggctcttaacactgacatagatatcagtgccatttatcgcggtataggactgaacaacaaatatagcttggtttctgtggtatgtaatagtttgaatcttagtattggcattatttttgtcctttccttttcacttggattcaaaagaatagtttttcgttctagttttaatctaatctgcaatatgttttactttcattaggtttgttattatgggcaacactatcgttgctatgcatacagtcacgaacataaacagtggattatgtatgatgataaaactgtcaaggta

SEQ ID NO: 15180 - DNA, 7310 bp, Cannabis sativa
tggcaagaagtaggtgatgatttttcaatggacccttatacgcgacggtttaaaaccgtcgcctatactatatgcgacagttttaaacagtcgcctatattatagacgacggtttataaaggtccattaaaaaattgcattttattaaaaaaacgtcgcctattttgtttactacaattttaaacggtcgggaatactaaatttttctcgacggttttaaatagttacttaatttttttagcgatggtcctcgaaaaaaattatttttaggaccatcgcgaattctgatatttgtagtagtgtaggttctaacccagtctcttcttctcctcattttctttgttggcttcatttctcttgtaggcggcaccaatctctcaagttcgcttgagagaaaggctagatgagtgctgagaggatgacaaggttcttgtggctattttggatgccaatggcatcaacctcatatctacacttagatgccgactttggagaagataatggctgattctgttagaagattccttttttttttcgattaaaaatatattgatttttttagttatgatttatgatatgatttagtttaatttaagtttgtagatgatagaaaatagatataataattttttggtcattttattcaaatgcatactgttgcaattttttttattcaaatgcatgattagaaaaaaaaggtttgatacattaagttcatgtttaaaatctaagttaatggtggttgtaatttctttttatttagatttaatcttaaaattgtaccagattttgctatggggtggtggtggtggggtgggagttgtcgtacaaagaaaatgaaggacaaagcagtgataaaagaatttgagaaaaagaaaaaaaaaagaaaaaaagaaaaaaaatgattaaagtattaattttttttgttaattttaaaatacagatgttacatttatattggtctacataattatacatatttaagtattataaaaaaattaaagaaaatccaaaaattaaaataattaactaaagaataattaccacatgtatatttgtttacatgtggcgtaatccatactgacacataactacttttatagacgacacctttgatttgtaaagagaagtgaagattggtaggtgttacaacaaaaaattgagtttggagagttaaatacaagtaaaatgatagttgggaggatttaaccgcaaaaaattctatttaagatattaaaaatactgtattaaagtttaaaatttgttcatgttaaactttaaatatcatatttaaaattatcttattagatattttatttaaaagtggtaagattctaatttaacttagatattttaaaatagaaatactattagattttattttttgaaaagatattttagttattaataaccaaatttttgaaataaacattaaattttatttatttattaaataaaatttcataattatcccacttttatgatttgctatatttagttttattttaaattatttaatgcaaataatttataaaacctattatttaatttggtctaattgggtgtgattaaattaattttagattcaatgatccaaattaatcatagacaattgttggtagaaaaattaaaagtgacatttgccaacgcattacattaatacactggcaaaagtcatgtacttaccagcacacttttactctgttaaaaaatatcaagggattggtgtttagcttgctatgccagggcaaatatgagttgtgttggtaaaaatatattttgccagcgtaaatgtgcactggtaaaactatgacccttttactagtgttgtttgcgagatgcgttgggaaaagtgactttgccagtgcaattacaaaatgagctagcaaaagcgacatttcttgtagtgtccttaccgtggcttttgctcgggtgtatttgaaataaggtcactcaataaacggtctcatcaacacactatttatctcatcagaaactcgaggcaggactgaatcaagcaccaattagtttaacgcatcatcagacagactatgagaggaataaagactgaaaataatcttcaaacaccgtagctataccattaggcgactcaacccaggtcttatctttattaaaaattccaccaataccattttattttacaataagtggcactttgatggaaatagacagaatttttatcacccagtttgagccaagagtttacgagacgtccaatacttctcattataccattaggttttatattatttattaaatcaaaatgtgtggaactcaatattaaattatactaataataatatatcacatgttgtagtgcttgacacgattcccttttccatttcctttgcgaaataaagtatttctgtgtaagtcgagctaatataatttcactctaaaagtaataataacaaagcttttccacaaatgagaatgtgtttcacattcatgatttacctcttgggaatagaaaatatgagttactttgatattggagaaaagttattatatatatatatagattaaacaaaattatgaaaggaaggattacgacactctataagtactccataagtaggactaacataacaaattacctttaataagatgacataatgaattggtataatttttttttttgtatagtagtactactagtgtgtgtaactagcaaatgtgaataattatttcaaattaagaaactaccctgctctttaattatatataatacatttataattaactaatgtttcagtacataaataatttgttaacggatcaaatttggtctatcctggattaattcccttttttaacaggatgaccaaatttgctccattaaactactatatagatcagtgagactgagagatcacttttaaagcacttgagcttaagagaaattattcaatcatgagtacttggctgatgatggcgagttgtaataataaataacattaccttaatctgtttatttggataaaatataattaattaattaattaattaatcaagttattccagtactgtagttaattaggccacatacttccaccaccaccatcgcccgttacgtatgacatgcatgacaaaggcactagacaaagtcctcgacttctgagatcccccttttcatctgatacacttccataatcttcttttacaccctgaatttgtaagcaatactctctttgttagttatgtatatatataggacaagtacagtagaacatttatgttttaaacctccaagaaattatatagtataggcattagtatattcatttttaaaaaaattctaaataatttactaagttgaaatggaatttaaagattcagatgatttagttacacacatacttgtttgtgtaactgaatatttacacaattatatgaaaaaagtttagttataatttccctaaacgctaaaagtagagacctaattctagtatatatataaatatataaagtcataatgatactacatatgtatgtacacataccctttgcgttgatttaatgatcttctttcgtgaagatttcatgtatggaacgcttagtgtctgcatttagagacatgcaataatgcaaattaagtacacagatcgatcttctatcaagtatagagaaagagaaaaataaaataagaagatacatataatgttggtgataatgccacgaatttggcatatactaagggttcaatttcccacttcttagacaatttttttaagtaaaaaaaaatgaaaattataatcccattagtaagtttggcacgcactctttatatagacaattttacatgttttatatatagtaccactattaattcagagatcgagaagtgaaaaagtttcatgtgaagataggcaaggcatgtccatgagctagagaaaagtgtagcagtgagcaatatttatcatgcatgcagcgcatgtttcgatcgatgtgtcatcatcagctgaactttcttaacacacaggacatatataactgtccctatgtataaatatatatatctatatagtaagagggataagatatttattaagaagggaaagtaaatatgtacctcgacttggttttgaagaaatttgatgtatcctatagcctccattagtacggaagctgtgtctgtctgcatatgtaaaatgacggcagccaagcagtgcaaaatcttataagagttttcaacacaactactccttgagctatttactgtttcaatatctccagttcttgattactatatatatgtattaaacaatgtctttaagttctagttcatatttctttcgttaggtgctagtactgtgtttagaagtcaaacattttcaacaaaaaaaataaaatttaaagacgtaataattatgccaaaagttctgcgattttaacagttctactatttatgcattaatacaaatatctctattaagtctcagaaaatatagatacagaaataaattatgctaaacgattcgaacgtactttgatgaaatttagcaactaattatatatatatatatatatcagtaacaatagaatttaacttcactatatatatatatatgtagttaccttgccaaagggggacaccaactgttgaagggctgcaattctatctcctaatttttcttttctaacctgtacacatgatatatatatttattaatcgactatatatataaagaattatattggagtgtatacgaagaagaagggtgtaaataatttgtacataaagtaagagtgagttgttttggtactttaaaaggtgggcaggctgatcgtgactccgtccgtggcttcttatttggtgcagactgcattgtcctaatttttggttctatcaaactgcctctgcctcctcttttagctactgttatttcactattgataaaggatggcttctaattccacacaaaaaacaaattaatatatacatttatatgtaaaattccattaattttactcatataaataaaacttaaacatatatatatatcccaatattatgtatgtttcctttatcaattaatatagatctccaacagtacaagtataagtagtgtcatgtaaaaaaaaaaaaataacgttcgactaaatgcatatatacatattttctttctttccaacttttgggtaaatatatttttatcttaaataaaatgagacaaaatataaattatagtagagttacatataatctctctctttaaaaaatatatatatatatatttatatattgtgatttgtagttaacatcagatccctttcaatataagcttgcattaaattaattaattaaagtgttaagcatataattaataattactttaatgatcaagatatatccaaaatgatttaattagtagaatagaaaatacagagatgtttaaccaaatagtaccaaatacgaatcaaaatttcgaaaatttatgaaaatagtaattagagagagagagagagagagaagagaaaatgattacccttttactaaggccacttgaaggcctttgcggtaagtgcatctggtgaagttgtaatggactaccacaaaaattgttagaaggagtactctccctgaaagactgattatgatgatgatcatgaccaattgaattgatatccaagctacaagtcaccgagatattggacgatggagacggcgataatttgttgaataagttggaaatatttatacttggataaatctgactaaactgtcctctactacccactgcagccattaaaccaccaaaactactaccaccagtcatattattattattgttgttgttgttgttgttgttgttggaatcgaactctgaagtagttgatgaggaaatctgctgattctctacgttgactacttgctgaccggttgagtaggacaatgttttgaccatgagatttttatgatgatgatgatgatgatcagtgacattactactgctaatactactattattattattactactactgctgagatcaccgggcttgagaaaaaagtgggcgtaatcatcattattaacatgattagtactattggagagaggactagtactgcttgttgtagtagaagtacaactatttaaaatttctgtgaatttcgggaatgatgattccgattcttcctcaattttcgctgcaaggttcatgtcgtacgaggctgattgatcatgagtaacagtagtagaagtagtagtagtagtagaaggattacaattagtccacggaaacccgaattcgaggttgaccatattggaagagttgatagaaataatattatcatgatgatcaatattatccctactacttttcacagcccttttactcgactctgatgagaccattacatcgtagttgtagttggggttaatggtgttaccaaagctattattaatattgctgcaaacatatacagtacacaataatataaacaatattttaatttcgataataatgtgtatatgcatggtagtactttcatgaggtgattgattttaaaacatcaaatcaacactaaagaaataaattagattccgaaaattatacaaatattttaatattaatgacaattaggatatataattaaatggtaaagtttatgaacacacaagagaaaggaaaagatgaatatatatatatatatatgattattattgaggggagaagatttcgaggtgagataagagaaaggtatatacttacaaagtggatggagtagtagtagtagtagtgggtgatgaggaccaagtgtggtgagtggtgcttccaaatccatagcaagatggggtagcgcctaaaggtactagtagcagtggatgaggagacccaacaacctggtctgggagctgctgctgctgctgctgctgatgctggtggtggccgagatttgcagactccatgatgattataattaagtggttttaaaaataaattaaagcttcagaatcccaatatatcaccaataataaaaatgtgcctaactatagagagagagagagagggaaattattagctttggtttgatcgatcataatcgatggtagagagaaaccaagtaagtagtgactcccatatgatggtctttctctttctttctttcaactttgcttttagctagctagccacttttctcagttttttttttttttgtttttcctctttactctttcaagtttcatcttaatatatatgtatatataaagtagccttgaaaagaaagttagaagagagagagagagaagaggagagagcgtgagtttttttttttttttttt

SEQ ID NO: 15181 - DNA, 3794 bp, Cannabis sativa
  modified_base (55)..(68): a, c, t, g, unknown or other
ccccaaccacgtaaaaaaccttcatctcactttcttacagctctttattataatnnnnnnnnnnnnnntgccgaaaatctcggtcaacaaaagtgattatattttaaaaaatataaacatggaggtaaaaattaaaacaaataaagtaaagtgggtatacaatgcaatttcctcaaatgagaatgtatatatattactcttatatttcaattaaattcgacacctatgcaaaaatttctattttttatttttaaaattgtgttttcaaagtttttaaaatacaagtcacgttgggttgatgttttctaaaaataatttgtttttcctttattttttttaaaaaacacttcaatactttaagacgtcgatataaataagattcgacccggactccgatcctgactttggcctcggactcgggttgaaccttgaaacttgacccgtgaatgtagaccccggtgccaaaccaagactttcaccctagcgtttgaccaagaccaagatctggacttaaacccagaccttgacactgctgcactcggactgcagacccaaatttggaccccaacgctgcacctagattctagacccgaactcaaaccttggtgccgcaccccagacccgaactcagacctcaatgtcgtactcgaccctcaacactggccccaaccccgcccttggcactggccctaaccccgagcttgaagagagagaaagtgatgaaaaaaatggtgagagaaaataagggaagatacactgatgagagagaaaataataacaaaaatgttgtgagataaagttgagaaaaaatattaataaaaaatcactaattttttaaaaaagaaaacaacattttgttgttcttaaaattcttatgttttgtaacttttttaaaaatatagctaatttttttttttttttaaaaaaatattttttagttataatgttaaacaacttaatatttaaaaatatagttgcaaaacatttaattatgttttaatattttactttaaatgacaattttgcatagtacataataaagcaaagaaatgaagtgtatagaccatttgattgcattgaacttccaatgttgcatttaaccaactttttgttcttcttatctctaccattattttataattacatgcaaataaaatgaccttaaattaattgaaaagaaatagaaaaagaaaaaggagagtgaagaagtctatacaaaagcattcaagtgtttgttatgaaagaagtggcaaacagcagtgcagtcatctattttaatagaatgtgtcgaccttttccaggccgccctggccgccttaaccaccgcctttgccgccgccgcctcagtctttgcttcccaagcaaccttagcaacttcatcattactcaacacatcccaaacctattattcattcattcattcaccaatcaataaccatctgaagtgtttaatatagttaaacttttacattaaatcataaatacattgttcggagtgttaacatgattcaaacataacatgtcattatattacatgaatattatattatttacaatttgctaaaaatattgtggttggtgattgatgtaattacagttgtttcaaaagataatttatttttttttaataattttattttttatagttacaatatcttaaaattttaaatttatttttgacacagtaaattatttaaaattttaaaaaaattacaaaaatgatatgaaagaatttttttttttttttaaaaaaaaatcgatcacaaatcaacatcaacatgaaattaacatccaaagatatcatctatatctatatattgatattcatatctatgtctatatcattatccatatctataatctatatcaatatctatatctaatactacttggattgaaacacgaagaaatataccaacatttaaccaacacgagtaaatttgtataataagaatgaaatgaaatgaagaagaaattaagagttagttttgaatagtatttggggtttagggtttatgatttaccccatcagtagcgagaacgatgaattgatcattgggagtgagtcgacggtgggtgacatcaggaacagagatgaccccataaggtttgagtatgaaatcaccaaaagcacgagacatggctaatccaggcatgtactcgttaggaagccataccctcttgctctctggttccctcttcaacccaacaactctcccattcatactccttattcgatctccctcttctacacaatcaaatcaattatcaaatcaatatcagatattcaaattcaaattcaaccaaaatcatttacacattctttcttactggttaagcttggtttatgatcagtactcaattgaacactttctatactgttgttattatctccaattctccctaaaatagctcttgaatcccccaaattcgcgatgatcagatcttctccctacacacacattaatcattgtcaaatacataatatataatattaatatatatattcaaatctgatctaacattgaatctactctacctgagtgattgcgacgacggcggtggttccactacaagataaatcaactttacggagaatctcaagctcagcgtccattttttggaaagaactttcgatcgcttcattccaaatcttgagatccatatcaaaattaggcggtactgatttcaaccgatcgattcgttgattgagtaaaagcagaggaagacgattcctcacttgttggctcactacatggccgtgaggtccgtggccgtcgaaaacaccacagagagatgcgtctgtcattccgaaaccctaacgaaagccaaatcaaatcgttggaatgaaaatgcagaaaacaaatgggagtagttgttattggttacctgagagtgaagtgcggagtcttggttgataggtctggttccaatgtgggagtagagagagtagagagaacggtttccatggccgtggttgaggtaatcggagctgtagatctccgatgatggaagcttggataggcagactcccatggcggacttaactcaataataataataataataataattactcatttcaatttattatatcaacttaatttaaattaaaacaaaataattaaatattattatgaatgattatctatagaggattatatagataatgaattattatttatttataaacacttttgatatgagtaattaaaattattagattatgagtaattgtgaaaataaattagctttttgttttagtgtgattggatggtcattttaaaaaagaattataaaaagagaaagagaaattattatgcttgtcaaacattccttattataattattatgattagaaattgctttacttttttttttctttaagagcataaggaatattaataataaatgagataaataattaattaatatatatatatatatttattcgtccaagaaggaccacctacacactacacttattattgttttctcactactttgtgtttcaaattcataatgaaaaactctaatagaaaatcactttgttgtgtgtaatttaagatagtttattgctaaaatatattattagtgactagcaaatttctgggtgtaatattcttagattttatataatttaagaaaataatttttaagtaatattgctaactaagtgtaaaacgccacttatggaagatattagacaccactaatgtctaattgttataaatattaataattatgtgaatgtccaaatcttttatttattaccatgaattgtaatgaacatt

SEQ ID NO: 15182 - DNA, 3549 bp, Cannabis sativa
cgttcttgactcagtaccgtgtcgactcacaaatattgtttgaaattagttatattaatttaactaatttttgttaattttaataaaaaaaaaaaattatttagtcatttaagtgttacgttttttatacaatgatcattttttattaataaataatttcaaaattttattaacaagaaaagatatttttcaataaattagaaaaatgtgcacttccaataaattaaacatatttttcaaagaaagttgagagttaaccataaataattagtttggaagatgtggatcaataaaagtgtttcaaacaatacatcagtggagaatatagaatatagaataattaaagtcacctataaaatgttttagatatatacataagaaaaaaaaaaaaaaggataaaatacatacactctttccctgagtattattgcactctctctatatatactaattaaagataaaccacatttttatctaactcaattattggagagcactatacattgatcattagcttttggattttgttccccttttctctcccgggaagtgggaacctagcttccagaaaactgatcactagcaaaccctaaaagaaataaaaaatgttttattattattattattattggagatatagttataatgaatgatgtggtcaatatttgaaagaagtgaaaagtgatgtaatgcaactaattatgttgtgaaattctaaaggtgatactgacaagtgaatacatgttttaggacaaaaatagtgtgttggttatttctgaaaacacataaaatactgaaggaaaatgcttattgcaaaaaaattacatacagtcgctgccaatattatttttggaccacacatctaaagttaaaatatatgtggtgattcgaaacaaactattttcctaattaatgtgtcaaccaaattaatgagtatgaatctgattagatctatttgatgcttatgacacatgagggccttagttgagtgcctaactttttcatctttatagctatgtcttgtcaatatatataatgtatatatattggattttcccatattgagatttaataattttagtataaatatttttaacgtggctatgaagatatggcttgataattatcaatcgagacaagatagtgttcgcgtttgtggacgaaaaaaaatggaattttcactatatatataataaaatgaatgaagtaatcgagaccaggctagggtatagctaatgcattatatttttgtctattagttaattctttcgatctaatccgtttcatacaaccaactagtttgaaattcggaaagggagcagtgatatatttattattaagtactatatatttatgtgtgtaaaaagaaattagtaatatgatcattattattgatgcttaaactgttaattaattatgattttaatttttgtgcgctcataataatgacgagtttggcttttcaaaatctaataaaggcagtggtgactttagaatattcatgcatatctctacgaacagcaaagacaatatgtcacgagaacgaatgaagaagaagtttacataaacttatcctcatcaagattcctgacagacacacccataaatacaattaaataaaagtataatcacggccttaattataatcatataataattaatatcggtaggcgataatcaaaattatttccctggaaattgtgatatatatatatgtgccattttgcaattcttatcatatataatatgtttccctatagccaaaaagaaaagcatagaaattatataatagcgatatgcatgtgctattaatttggatatattacatccattattgcaaaaataataacaagagatcgacaatatggtccaagaatgtcaaccgaatttttttataaaagtcagtcatgatcaactttcgtctttttatactttttatcttttggtacgtacccaaaaaaaagacaccattagtggagatgaaaatacaagcatttattcttctgtgcaaaaaaataatttatgttattaggcacagtgctcgtcaattcaattgttttcgatcacgatttttattatttgttatgctcatcccccatattgtgataaagatcggttatatactttgatacacatggctcacttttctttttcgtatctatatttcttgatgtacatataatctttttgaactttcaaggccttttagtttttgtctaattagacgaggtagtgaatgtagtgctttaaacctctgatattcaattggattattagaagaagaccaactactcttctcggacccttttcacagatttgattcgtattactatatatacttaaacataataatgcaatgaggaccttaagatgagtacgtaaaaataaaaaaaattcttgtcagaacccattcctaatggggttaaatgagaacgagattggaatgacatcaaatttaaaatacaaaatattatctttactaatgacttgtaaaaatataatcaaatgaagatgtatacccattccgatctgtggccgttgacatcattacgatgaactctgaaatctaaatgattgtaccaaataaaaagggatattggattgtagggtcttcggccaattcaaggtttccaatttatttaggcactatgtgtggcacttgggcgattaattctcatgaatttttagtgcaacaaagtgatcagcacggacagaaacacactgcacacaacacatgattgtttaatttgaccaaaatttcataaagattttatggctgtaataagttagatcggcagaggagagagctgacctaacacattatagtcattgcagtatataaacaaacaaatatagaattattgaaagataggctgtggcctctggccagtagtggggggtagaccttggatatcatactactatttttaaataattaaaataagatccttttttctcgagaagagaaaatcaaaacaaaatatataattttaaaaaagaaaaacaaattctttactaacaataaattaagtagaacgacaaaaatgtgtagtctctccatgcctagctagtagctattaagatgtgacttgtcatggtaggtgtggaaaaatgattggagacaagtatcaaaaaatctttctaattctatgcaaattgtcaagtggatccatggcgagccatgatccaatccaatgtaattcaactgaattgatctaatctaatataattaaaaaaagtttgatttctaattacaattagattgaattgaatgctaaaagtttagattctaactagattgaattggttattgatatcaatatcaaaatctaattaaaaaaaattaatcatctaatcaaattatatttatatatgttaaaaaattatttataaaataaaaaatattgaagaatataatatatatttattagactttttttgtgtgtgttaaatttgtaatacttggttatttggtgtatttatgttcatgatgtttgtctattttattactaagaaatgtatcaagatattctgattgtatcaagatac

SEQ ID NO: 15183 - DNA, 5321 bp, Cannabis sativa
tttttttcttttattttaatgaaatgatactgtaaacaaaaaaaaaatagaaacaattattactttccacttttcaagtaaaaatgttgttgccaatcccacatggtaatccataactattttgttaaatttttccaattctatttatttttattaaatgcatattctattcattctatgggtgttttttttttttttttttatatatatatataattctttgcaattaacttttaaaattacataaaaaaataacagtgggtgaatgacttttttcttttctgttggctctcttctccgagctctcaaagtctcaaagaaaagatgataattaataaacaaatgatgatcctttttaagtgtaaggttaatgttagtttaaaattgtaatgagataaacaacaattttaataaaataatttaattttttagtgcttaattttgtaaattatataatcgtactacaataatatttgaataaattattagttttttattgtatttttttaggggcccaaattttaaaattaaaatatggactcaaaaatacttaagacagctcccaaatacaaaaaacacaatgtcttcccattttaaaggcgttaagaaaagttttaaaaattaacaagaacaaataaaaagttaaaaatgagactcaaccgagacataaatttaagaggaaacaagtaatattaggagagaagttgaagaatttaatttaaatatattttttttatgagtattgtactcaaattattctcacacacttgcataactaatatataatttcaaacataataaatgtgtattctttgtagatgaatgtgtaggtttgtaggaaattcagagcaaaattttgataagaaaataataaaaattatcgtgaaatgataaggataaaattggtagaatgaatgtaaaaagagataaacataataaatttgttaaaaacagataaaaattaaaaacatcaagttaaaagaggtatgtagtgtaatactctctaatattagtctatttgtgtcatactttacaaagaatcctaattgaattattcttttgataaatatttgagattattaccttttatattagcgggggaacaaaaatcctatataaatatagtttcaacattcaacattagtgtgattaaaatttatcaaaaaaacatccaacattagttaatttttttttttttaaaaaaaaaaacattcaacattagttcaattattaattatttctatctttgatatatgtttaaacgagattaataaatactaaaaaaatgtaattcaatatttttttaaatcatttgtaatgcacaagaattgggtttaaaagaaaaaaacttaaaagtgtagtaattatccttttcccatattttgtaagagagaaaattcctgaatatactctgggacaagttgaaatgatgtgtttaaataacatagcaaaagcctcagcctgtcttgtgtgatcatccaccctaaaattttggaccaaataagctgatttatctattaacaatacaataaaagtcagtattattataccaacttcctcccaaaagtaatgccgagtacataaagtacctggtaaatgaagatcttaggcagatattctacttttatggtggttgtgttgaaccctgaaatatacttagcaattagtaggaaggtatgcaaacgttttttcattcggctcgcagccatcaactatcattttctcataaactgcataagcatggtcagcatttcctgccaaggtgtaggcttcaatgagagcattgtaggtgaaaacatcaggttcaagacctttacgttgtacttcttcgtataaacttgctgcttgttccaccaatccctccatcccaagacagtgtattagaatgttgtatgtgctaatatcaggaacaactcctctactctgcatttctgtgtacaaagatagagcttcttctagcctctgtgatcttccaagtgcgttaatcaaatggttataacagaatgaatcaggactaaggccagtttgctttagttcctcaaagtaatatagagcatcatcagtttttcccgaacaacataaaaattccagtacggctgtgtaagacttcaagtctggttttattccttctttaaccattcttttaaacaactgacatacaatttccacatctcctgttttcccaaacccattcataagaatattaaaaatcacagagttaggtttgcatccatattctgccatctcctcgaagaaaagcattgcttcgtcgtgtctacctaacctaaaaagtccatccatgagcgggccatatgtgcgtggacatggggaaaaatcacgacctacatgatcgtagtataaatctatagccttatccaatctatttgatttcactaaaccagaaatgactatattatatgtcattgtgttaggcatgagaccttgggactccatattacagaaaacttttaaagcctcatccaatctacttgctcttaatagtcccccaatcaaggtgttgtaagtatgatgatcaggcgagatccctttctccttcatgacaactagagtatcaaatgcttcatcaacattgccagctttgcataaagcgccaataagaatgttgaacataactacatcaagagcataaccatcagctttcatttcatcccaaatttctttcaaagtttccaagtctccacaatcacttaatttgtccaaaaaggtaatgtaagttacacggttaggtttgtgactattgctagctttcatctttagaagcaacaactttgcatcatcaagtttacctgcattacagagagcatcaatgagaacggtacaagtgataacatctggctcgcatccttcttcgtccattctcttcaatatatcacaagcttcatcaattttcccagcccttccaagaactgttatgcatatggtaaatatataattatcaggcctcaatcccaaatgtccaatctcttcgaacaaacgcattacagtctgagcatcccgttgctttccaaatgctgtcataagtgctgcataagtcctcaaggctggcttcatccctttcatgaccattttgttgtaaacatccaaagcctccctacaaaactgtgactggacaagaaaatagatcaacttattatatgaatactcattcaaaatgaatccagcctttctcatcttctcaagtgcagttggtgcttgccgaattccaccccttatataaagacctttaaaaatagctagataagtattcaaacttcggttaacctttttcttttgcatgaaatcaaaaacagtagccatatcctccaccctcttatgagtcaccaagacttgaagcatgtaattacaagtttcagtggtgtgaacaacatatggtaaaccagcaacagccataaaatatgaaaaagcagaatcagtgtccattgtagacttaagaacccttataacctcttctgaagaattcacaactatattcttctccttggccagttcctccccttctttggagattttcataacaaatccacataaaaccatttgtttcctcttcaatgtcaatctgttttccaagtccccatatgtgcaaacctttaaatttgcaaagtttcttcctttaaatgactctctatgactcgaagcagtcgctacagtctcaattaaagcacaagtatgactgaaactgctacaatacatgctcgaagagaaacctgataacagacccatcgaaagaattagcaatcgctaataatggtgtcaacatttaaaaggacagagcattatataacatgaacacttgaatttctgacccaaatgaatacagaaacaattagcctgacattttcattctctacctaccattgcaaaaattgggaattttctctaccatcaattaaacaagctgaaaagctgtaatgaaagattaagttttgccaaactcaaagtctcactctcatagcacattcattcatagataatggcttaaaacttaaaactcggatatttttttataaaaaaaaaaaaattggaaggtttaatgagtaagtgagtaattagtggtagtggagtaccttatagcagctggctgatggcagtgaattcaagagagagagagagagagagagagagagagatgggatgccgtggacggaaaatggagtcgagtgatgagatttagagaagaggaagaggcgaaccacagaggttggtggtctgaataggtggaggcaggaacatttagttatggcgactgtaactgcaactgcaagcgacagagagtgagaagaagcagtagggtgtcactcttcactccgataagtgtttaccttttcttttttttctttcttttttttttttgttaaataagcgttctagatggaaatgaagattatgattcgcagtaattacaaataatatttttgggcatgtataactccaacataacatatagattgtgagcaagggtctacttagtcatattaatggacaataaaattataaaatctaataatatgaggaaaattacaattccaaaataagggagatattcttttacaaatgtaggaaaattaagactgatgatgcagaatcaaaacaattaaagaattaacaatgacaagatttataaacattaaacatagatcgaggaaaaatagggaaaaacagagtaaacaaaactagaaaacagtaacttgtagaaaataaagaaatcaacaccaaaatatatactagttcaagttcgatatatcgatgtgatctatgacactactccagttctagaacaccattgcaatccttctttattgattgagcaagaatagatacaatataatcaagatgagattctctattgagttctcacaaagtatttcaactctcacacttacacccaagaatcttcttcatctacagaagattcttcctacaaaacccaaactcagtctctctcttttctttgcacctctctctacctctcaatcttttctctctcaaaactctcaagctcttctgaactgagctctcaaactcgtgtctcttaaaataactagtcagggtgccatttatcgacttaggatcaagatcctaaagtcggtagctggaagaagcgaggttgttaagttagttagaaaatactaacttaaccaactccttattgagcaaagtctccatgccagcttaagtatcagagccttcgagaacatatatgagattctagactcacagaccaaggacactcgttgatgatgcttccggacaggattgagtctgctaaagtcaattatctggatctaccattccatgaggga
